United States Patent Application Publication US 2014/0325702 A1 - sequence listing, part 39

SEQ ID NO: 80586 - DNA, 1812 bp, Heterodera glycines
atgaagaaggaattgagctttacttatcaaatttctggccatgaaccacgctaccattcgtggaccgtgttcaagtcgttggtcgcgagggattacgacgaattaatggccaaaggcaccgccacgacggaatttcacgaccagccgagcagcagcagtagcattttggagatgactaagacagcatcaacaacttcaacagcaacgcccaatgttttgatcaacaacaacaacagctgttcctcttctccgttgtccgttgagacggttcgtccacagcaaaatcgacgccatccgccagacataagaaatgacgcagaaaatggcattgtggagcaggaaaatgcacagttcatagaacagctgaagacccactgcaacatattgcagccgaaaaggccaaaaagacagataaaattggtccaggacaatcaccgagtaagcaaatgcaacaaaaatagagcaaagcgttggaaggacaaagttttcttcagaagctcatcagagttaccgctcctcctccgcagaggcaacaacatctgaccagtggcgtagtaatgtctcacaatcaacatttgcacgtgccgaacacggcaattggtgggaggacgacgacggtggacatggccataccccaacggcagcagttgtccgacagtgaagtgttgccggtgcatcatcattgtctttatcgaattgaccacccacaaattctttcttcgggcactgcgacagacttttcggtccttcagaatttcccggcggccgaagtgaagcgattcatttccataattaacagaaaacatagctttcagcctcgcaatgccgtcaatttgaacaataacaacatgcaacaatttgtgccaacaacagaatcgttttcgtcgccttcctcgtcgtcggcgccaaacactgccattgagctgacattgatgaacggcgaattgtcgatggactcatccgctaccatttctcagtttcatccaattgtcttggacaattcgcccaccaaaacactccccgaagatgtgcgaaatgcttatgagcagatgctcaaagagaattccgtcgattactgtcgacaatttgaacaattggccaacctgcacaatgacggctctccgattaaaacatttgaagaaatcaggcggtagaataacgaactcactcttaccaattgtcgcattatttccttctataaattcgtctaatatttcttgcaatttctttgctgttttcaatttttcagtttatttttcgtttaatatttgtacttttatttttctttctttccttctttttttggcattttcccaatgcgtttttccatcgccccttctctctgtcgtcgtgtgctttgtagacattgttggcctcgtgttcgttttggtcggcttctgtcttcctccgcttcagttccttggcattgtccccaatcggtgaacgccaccaccagcacgaacagcttcagaacatgccgttattcgtcacaggcggctgctgtagcacccgaaaattatgaatttcaggccgaaattaacagtcttttgggcatcgttgcgaagtcgctttattcggaccaagaagtgagtgaaacggacgaagaattgagcatttcatttgattacgtgttcatttattttgaggtgttcatccgtgaactcatttcgaatgcgtcggacgcactggaaaaacggcggtgttcggaattgcaaggcgacgcagccgaagcaacggcaactctcgagctgagaattgaagtggatgaaaagggcaaaaaactcacattcgtcgacacaggcataaaataaa

SEQ ID NO: 80587 - DNA, 3120 bp, Heterodera glycines
aaagattgtgaggacgcatcagatgagaaggaatgcacatgcgaaggtgcggaacggagggggataaatcaatgacttatcccttgggtctcctgcatacgatagtcataagctcttttgttactatatatgcgttattaaactttaataaatgcgaacctttcctccatttccctttaattattttcacctgaatcttttgaaaaagttttttattaaaaaactgataaaattaattatttaaaaaaataatattttttcatagaatgcacgcgtttttcttcgcatccaatgtacatgtgtaaggaagcgcgacgttgttacccgctggacaaagtttgcaggcccagcagtttatgccctaaggtctccaaaatggacgaattatactgcgccgtgcggacccagcgtggcatcgaacttctctgagaaaatgaacgaaaaatgacgaattcgatttattgaaaatcttttttgacttaaacccactgacatcccaaattacctccaaattacttccaattttcaaagcttttcatatttttaaagaataatattgtgttaaataaacttattaaagattctttgtgtttctctaatttctaagccaaaatttatacgcttatttaatttcgatattatttttaggatgttgtgctttttaagaaatataatgccaattcaagagataaacaattaggtatttgctttgggaaattcacatatttgatttgttggttaccaatgactgctccttgcattgatgttggcaatcttttactcattgatgttgagacggacgccgaaggtttggccagtagcaactcagaacggattaacgaacttacaagcaaaaatgcccagcttttgttcaatgaaatatggaaattacccagaaaaattgtgcaagatgcgacttgttctcaggtgtacaaaataatttgtccgtttaaattataaaattcagcttcccgaatacacttatggccttcctcgtgaaaaacccgtaaattttttaaatttttaattaaataattccaaattctaagattccaaaaccgaaagaaccaacgaaatgggagaagttcgcgagggctaaagggataacaaagaagaaagacaggaaagtctgggacaaaacgactcaggttaatctgagacattggcgaattgttcaatcgttaatatgttaaggaatggaagccgaaatacggatacagacgagccgagaaccaatcgaaggaatggctcattgaaattcccgaccaaaaaggcgagtcttttttttatttcttccgtttttttttgctcattctctcccttcagacccatacaaagattattttgctgagaaggcggaggaaaagcgggaaaagaataacaagcaggagttgcaacggctgaagaacatttcccgcgcctctaacaaatccaaagttccaactgggaacagaaaggtgttcaaagattgatcaaatcaaatctgtcaattgttttatgtttttgttgttttcataaacaattttaatcgagttgctttcaatgaattttgtttgctcgaacatcctttatggtttattgttagattcccatgaaccttttacaattgttgttgcacttggtgccgatgaattcgccgtcacatgtccatggtatgatgcccgatgactcctcaacagcacttatagtgtcgagaaggaggctggcatttaagtaaaagataaaaaaatgcttgaacacgggatttagctaaaaattcaaatattttgtgctaactcaaattcagataaatttatacttaaatttattttttcctccctttaggcctccaaatctgtccagcaataaaaaagcaataactcctgtttcttcaacttgcgtttcggctgacaaaaatgagcataatgttcctctctccacttctgcgggcctttctttgagcataaaaactacggcttctgattttactgcttcgtcctcaaagtgtacaacaaatgcaaattccgttgaaacggttgacaaaactcggcgaatgtattggacctttgacgaacaagcggtgttctacgaggctttgaaattggtaagattttcggtccaattgataagcctaaaccaaaaatttcagcatgggaaagattttgacgcaatttcaaagttcatgctcaaaaagaagttcaacaaggacaaagaccaagtgcgcaactactatttgaacaccttcaaagtgtggaagtgcaaagcgcaaattgaggacgtcgattgggagaacattccacgcgatgcccgggaattgtttgtgcttctcaatggtttcgagtggcgtaaacggctcaaagggttgtcatttgacgagaaaaagttcaagcaactcgtaatggaaggggtacgttttctgtttgattattaattgactttccttcaccaatttttcatttcagtacgcatcttttcgaccgaaaaggaaaaagtttattgtcaatttgaagacgccttactgtccagctttgctcaaatactttccatgtgagttttcgtaattcaatggcatttgcctatgccattacggattttttacttttggttcagatgacagaagaaactgtgaaatcccacaacatttggttgtcagacttaagccattgaggaaccaggacagagaatttgttgttgccagtgagcaaaatccccttttgatggtccaaattaatgtaaatgacaaaattacatctttgttcgaactgctcaaatgtaaatggttacaaaatggcactcaaaaggtaattttacagcattttctttactttttcttaaatgacggttacagaaaaacgctgctcatgtgtacaataataatgctagccgaactgtggtgggcgaaattcggttatttgttggcgaaagtaaccaaattatccacgatgttttggttggaaatgagggcaattcccctctcttgtcgcttagcaaattgaagaaagacttttgtccgatagaaagcaccgaaatgggaaaacaatccatcggatcaggtaaccaattattttctgtaaataattcctgacattcaaaactcagtgtcagtaatgagacagcaaaatgagatcaaagtgagtgctt

SEQ ID NO: 80588 - DNA, 1597 bp, Heterodera glycines
aaattatacattttaaatgcaattaaatattttcaattaaattattattttaattaaatttagttgaaccgtgagcctcgtcttgcgcagcccattcagctgttgacccgtctccatgttcatgtgttaaaccccgtggacgcaatgcgctcttttctggacgaaggtgacaaaacaaataaataaacaatttcactaatttattaattgaaaaatgttattaaatttttactaattaatttattaaattcaaaatatgatttttgcttttaatttataaaattattgaatttgaatttttgaattttatttttcacttacctaacgcttttaaattttattctttattatattttcaatattttaaactttctaacaaagttctttcattactatacatttgtatgcatttttctttatttaaaatattaattatgaagtattaaatttaaatttttaaattatttccggcgttttgtgttttccctacggcgctttgttggaccgcgcgttggccatgcttggccgtattgaagacattgtgattagttccgccgaacagatcaattacgacgaggtgagctcacaattagtagtagacaattactttttaaattattatttattttaaaaatttatttttaattatttcatttatttacattttaggccagcgatcagcttgatcaactgcaggatttggcacgccgtgccaatgttcactatcgccaagtggtggagccggaggcggaaaagcgcatgagcgaggtgccatagcaaaatttttaaaaaattccaaatttcgaaaattttaaaaccgtaaatctgtggcttttcagatgtacaggctgtcggcacagcagcgtctgcaacggttggactcatttctggtggagagcagcatgagccgagtggaaagagtagggcacagagaataataaattattattatttttttttaatggcatcaattttaaataattaatttcaaaatattgtccataccacttcaatttgtcttgttggttagcccttttcgcgaatgaattaattatttttgatattttgaaattagaaaaaacggacattcgacaaaaatgccatttacaaaatatgggactgtcgagagaaaaatgaatgccatttgtcgccaagttcctaacttttttggcactcattaaattttaattgctttttgaaagtgctttattatccaattaggagttgaagaaggtacatattttcattggccagggattttcaaatttttggcactcatttaaattttactgcgttttaaaatggcctttttcacccaattaggagtcggagaaggcgcacaatttcattgcttgggatctcggctttttttttgcactcattaaatttttcaatgccctttaaatgccatatttaatcacccaattaggagtcggagaaggcgcgcaatgacatgcgctgggagttggagcagttgaaggaccaaaatgcgcagctgaaaaaggagaaccgggagctgaagcatttgtgcgtccgcttggacggccgcgttgacgttttggagcggaagttcaaaacaatggcacggctgctgcaa

SEQ ID NO: 80589 - DNA, 1487 bp, Heterodera glycines
atgaattcggccgatgaaacaacggcttacggtagcaaagtgggcaaattggaagcgcaaattgccaaattggtcaatgacggcatcaaagtcggcatgcgattggcggagttggaaagaaagtcaaagtcaatcgaacattcaaaatcggacgaattcaacgaaggaaaaagaaatgaaatggcaaattatgacgaagaaatggagggggaggagtacggtagggaacagagcgaggaatacggtaaaagcggcgaacggagggcaaagggcggagaagcggcgagagcaaaagcaatggaagcgggccgattggttgacgttttatcgccacggtttatgagcgtcacggccagcaagtcgaggggaaaggtgccgaattttggcagaattgctcattgatcagctccacgcggatcagagggggcgggacagggacgaaacgcgacaacacgtccccggccaactcagtcccaaacggtttaagacactgtactcagctagttcgggttgatgggactgagttgatctcctgctgcccagcaggaggccccctttcacccaaattcctgaaaaactattggaatgttatattatacctatctatatataattcaaaaatagaaaatttttatttttatttttcttgttttaggctaattttctgtccccatcactgttcagcctgcacacaaaagggcatggccttgaaaggcaaatgagtttgccaaatttgatgaaggagggggtccatttagtggaccgagaccaaaacgaatggcttaatctgatcatggaagcatcgggggtcaacgagcaagtggacacagtgaaggtggatggaagaataatgcaaaaacaattcattgacttaaattttaaaatatttttataaatttattattttgattgctcacagtctcacctcagatcttttatgtccttgaaaaggaagtttttatattcctatagcagcatgtccttccaaaagacgtccttgaaaaaagaacatttcatttccaatgccccagaactatcatttattttgaattccccaactagctcatctcccctagcaaacctttagcttgttttgtaattctatttagctttttattaattacaatttttggatataacttaagtcgtccatttggctgaaacctcctccaattaaaggaaataattttcaccagaattagcaatgatttacaattctcagcatttgttgtcctctgctgatgatgggtacggcactgatgatgagattgccaaaaaagtggagaaacgatacaaacgcgaatttgatggcctttatctgacgaaggaaaatgtgaggagcaaatgggcaaaatggacaattgttcactcgttgatttgaaaggtgcgcgaaatgtatggacagaacgaacaacgaaaatcggacacatgggaaaaattggtgcaaaatttgagcaaagagcaagtaaaatgaaaaacaaaataaa

SEQ ID NO: 80590 - DNA, 742 bp, Heterodera glycines
atggccaaatgcatcgttcggctgttgaacaacgaattcgaaattgagctcaaaaatggcaaaattgttgctggcaccaaaaatttggtgaaaagcgaaaattgggtgggacaaattcgaatcgaaagcgaaagtgccgaagaaaacggacaaacggaacatcagaagaaaaaggcagaaaaaggacacgaaagcaattcagcagtagaaaaagaaactgttaatggtaaataaaatgccgaataatgggaatgaatttccttaaatgaaattttcgcaaatttaataatgtatcattgtataattaggggtatgggattttttgactatataattaacctaaaaagtgccaaaaattgagcgaattctgtgcctgttaattaatcacttccaattgagagctttttcttttttaatttccggcattatttaggtacaagtaaaaccgattattacagcgcaaagccaaaatttgaagttgccaaagtgcggaaaagggaagcagtttttgccagagaccaacggcatttagacaaagactttttggcaagaaaacgcaaaaatattgcaatttcgaaaagtcattcatacaatttgctggaggcaaaacgaacacttggcctcagtcccattggaggattggcacgctttttgatgagcggcatattgggaaggaagaacaaaacacggacaataccgtaaaaggaatactataattcaaattaatatagtaaataataaa

SEQ ID NO: 80591 - DNA, 1204 bp, Heterodera glycines
atggtgctgctgctgctgctgctgctgctgctgctgctactccgaccgatcagatcatcggatcatgggcggatctgggcctgtgggtgtggtggaatgagggtgaaagtggaagaaagagaagcggaagggagaagccggttcatggagagaaaggaagcagcgggagaagcggaggcttttgcatgaaaagcatgcgcgagagaaaggggggggggagagagagaaaggaagaaagagagaaatcagagagagaagatggctggcagagtaatcagagaaagcattggaggggaatctcatggatagggaaaagatagagagtggattgaaagagcgagaggcatgcatacagctagagaaaaatggatgatttaaagaagtcagaaaggagcgaaagagagtgagaaagagagagagagagagagactagcagagaaaaatgtgatcaaacgattggaattcactttcagattcaatcatccaaatttgatgggttttggtgcccctccaaaatgatatctgatcactttaattatgctaaaaattccaatttactaaaaaatttcaaatggcaaatcgatcaatcccccgcccccgcattatccaaacgcaaatctgcgactgactgatttaagtaaatccatccccgctgctcgccctcctactccgtcctccgtattcgtcgtgtgtcctccctccctcaaactgcccctccccttcccccccgtccccgttgtccccgtccccgcgcgcgcgacagccctgacccaatttggggggggggggggaattagtgctctgactgctggttggaagtggtggttgtcgagttggaattggtggtggtgtactgctccgctggtggaagaggtcgtcgtcatccgtccgtcttccaattccccgccgtccccgccaaaagcgcatttccccgcccgctttctccccgaaattgcgcatgtttaatccgccccaataacaccgatcatagctggcgcccccgcccccccggactcggcataacttgcaaaaactggcgactgatcactctgatcatcaggcatgcctgatcggataaaatgccggttccccgctttctttttagtgcccgaaattgcttttttaaaggtcaccgcttctatgaacacattaatcccgcttcggcggttcgtcccaatttgtagcaaaggatcaatgatcacta

SEQ ID NO: 80592 - DNA, 1302 bp, Heterodera glycines
atgaatgagatagtcaataaaaaggtttttcgagaagtgattgcatggatgtatccggtagagaaccaaggacggggactaccgcacttccatttgcttttgacattggcggagcaagacaaattgattaatggtgaagatgttgaaaagaaaggaattagtgcgagaataccggacaaggaattagaagcagaactgtttgatttggtgaaaaggtttatgatccatggcccatgtggtaatttgaacccaaattgcccatgcatggaagagtttgttgacaaaaatggtatgaaaggaaggaaatgctctaagggataccctaaagtatttcaagaagagacagttgttcttgaaaatggattggctttgtatgcaagaccaaatgatggaagaacagttcaagtatttgcaaatggaagaagacatgaattagacaacagatgggttgtcccgcacaacctgtacctgttgaaaatgttcaagtgccacattaatcttgaaaaggttaatagtgttagttcagtaaagtatttgcataagtatgtgcataagccaccagacagagcaagattggaattagaagagaaaaatgatcatgatgaagttaaagagtttattgatgcgcggtatgtttgcccacaagaagcagtttggagaatttttgaattgcctatgtatgatagaagccattgtattatgtctttgcctgtacacctacaaggtgaacatatttgttattttgacgagaatatggaagaagaagagattcgtgaaagaattgcgaatggttctgagttgatggcatattttgaattgaataagacaaatgttttggcaaaaaatttgttttatcaccagatacctgaaaagttttgttttaagaaaggaaaatggacagagagaaagacatattttaacacaattggccgaatggtgaaggtgtcaccggctgagccggaacgataccacctgaggctgttgttgttaaatgtgaagggagcatgctcctatgatgatttgaaatcagtttttgatactaatggcaatgcaaaagtttgtgaaactttttcagccgcatgtttagaaagaggtttgattagaaatgatgaagagtggaaaagagcattagaagaagcagagagttttgagatgccatggaaattgagagagttttttgcattgattttagtccattgcccggccaaaccggaagagctttggaatatgtttaaagactcattgtctgaagattttagcaggaattttagaaaagaagtagcttatgctaaagctttataa

SEQ ID NO: 80593 - DNA, 452 bp, Heterodera glycines; identical to SEQ ID NO: 65604

SEQ ID NO: 80594 - DNA, 635 bp, Heterodera glycines
tttggctggttatccgttgccttttaagcgcccctcgggatgggaggagccctatcggagagataaaatgggggggggggggagaagggtaaaggccatttccggtcccggccttacacctccggccctccaaaagaccgtccctggtcgttaaaatttaaataatttccaaatttgaatgaagtcctcagactttttctttcttttgatttgttttacgatgagaaatttgttttgattttaagccaaaactgaaaataaaataatttaaatatttatttaattactcaaaataaaaatggaaaatgccgaacctctaatgggaatgaacccattcctccaaccaatccacagaagctctgtcattgagctactaaaagaaatccgccctttttaaattaattttcttgaaattctgattcaattggatttgaattaaattggcattgcttttcaaattatgagacaagagaaaatctgatgaaatttaaaacttttaaaattatataaatttaataattgtttcatttaatttccaatcgactaaaatttggatttttgatataatttggtgtgactgtatgactatacctccccttcatatctgaggatcgtccctgatccaagaacttaaa

SEQ ID NO: 80595 - DNA, 463 bp, Heterodera glycines
atgaatcccgtgggatttaagttcttggatcagggacgatcctcagatatgaaggggaggtatagtcatacagtcacaccaaattatatcaaaaatccaaattttagtcgattggaaattaaatgaaacaattattaaatttatataattttaaaagttttaaatttcatcagattttctcttgtctcataatttgaaaagcaatgccaatttaattcaaatccaattgaatcagaatttcaagaaaattaatttaaaaagggcggatttcttttagtagctcaatgacagagcttctgtggattggttggaggaatgggttcattcccattagaggttcggcattttccatttttattttgagtaattaaataaatatttaaattattttattttcagttttggcttaaaatcaaaacaaatttctcatcgtaaaacaaatcaaaagaaagaaaaagtctga

SEQ ID NO: 80596 - DNA, 500 bp, Heterodera glycines
atgaccgcccacggggacaaattggccatcgttgagccaaccggcggagtaattgtggactcggaggacgactacgaacatcgggtaaacgaagagttgcctcggaatatgcattcttaatgacaattttcatccctttttattactttgatttcacatttcgaattgctttcttttttaattaatctttttcaggtttcggtctccgtttacactgtcaatgcgttgtccggcgactgttgcgctccgtcgttggattggacttgtccaattccgttgtcgcccttctcccgcctctgttggctgaattttacagccgttggaaagtaaaatataaaatttaaaaatatcaatcttttattccttttcagtttggcaacaatggacgaaggtatcaaacaaaccaaccagtccttgtttttctgttcatgtggtcttaagaatgcactgtccgtctccatttacccggccctaatggtggcgtcggtctttggcttccg

SEQ ID NO: 80597 - DNA, 410 bp, Heterodera glycines
atgaaattgttttataaaaaagttttgagatataatgacgtcaaaaggtgcaagctcatttaatttttgagtaacaacaatttttagttttttaaatatggaacaacgatcacagaccatttgtggaaggataagagccttaagaatgtatacatttggaattgagctaggcattgatgacttagctaactttgttgcgcacacaactcccccagcccaggtagacatcaaagtgttagtatatctcaaattgaaattggcttaatttttaaaattggcaaatttgacctcattcagctccgttcaactttggctttggcatttttcgacccgacgaggcaaaataaaatggccgagtttactttcgcccaaattttggctgtcactcattcgaagtgaattttgtgaaa

SEQ ID NO: 80598 - DNA, 1564 bp, Heterodera glycines
  unsure (1)..(1564): unsure at all n locations
atgtacccaatatgtaagaaaatcccgaaatatgtaaatatgtataaaaacgccgaaaaattaaaagtcaagattcttgttcgcaaacagaaaaataaagcgtttttcctactatttgagcatggagaagccaggaaaatatctatttacataaaattggcagccctaataattaagcatttatgtaatttcagcatcaaaaaattctaaattaaattcgaaaaaagcatgaaatagcaaaacaagcacaaaaattgaaaaaaaggtataaaaatttagtcatttttaggcaaaatttttttatcagttaacattanattcttaattttctttttcccactanagattcaaatattttcttttagcaaaaatggcatttttaaataaaaaatgttgtcaagaaagtggatgaatttttgagagtaaattttgcatttcttaggggatgtattttttgaaaattttaatcgatgttagggttttgtcttagggtagtgctggtagacggtgttttcgtcaatattttacaaaaaatgtcataagcactaaatgctaaaaatcacatgctcagcattaagcacaaaaatacgaatttaaacaaaaataagcatgaaaaagttggacctaaaagcctaaaaccaagttagaaattagttttcatgcttattagcacgccccaagttagcaaaaaatttagtgattgctgcaaagccggtcttattgttcgtcataactagagaccgacttttgaggcatatgccttttttctgctcattagttccggtatattacgcataaaaaatacattttgcttttggtttgaagcttctacattgacttttattatgcctttttttgtctttttcgggattttcatgtatttaatgcctttttggcattttgccgttttggtgtctttttagcgttttttccaaaaaatccattaaaatgcaataaaatcgggaaaatacactcctaagaaatgaaaaattttctcaaaaattgattaccaaattatttttttcttgttaaaaaattttaggtttaattattccttattcgaaaaacattttcaagcctagtatagtgcctttttcacgatttttactgaacctgcccgttgtgcaacaataacccgttgctgtgcatcattcgcaaccacaaaacaccgccccattctcagttgcacaacaatcgcaaccacaaccatttgcccctgttcaggacccaagtattcgtcagcatctggttcagatacttcagcaacaacaaacgcagcaacaccaattccaactgtcgccacctttgcagcgtgtcaacaaccccgggctaagcattaatccagtccgaatgataacatcaggtcaattgatagccaatcgtcaacaaagtcaagcgcagttacaacaacagcaacaagaacatttgttgatggattcgccaccagcggcacgttcgtccagcctacaccaacggattatacaacatatgcagcaacaacagctaccgcagctagccgctagactcccgacaatatcagttgaatagaaaatatttacgaaaa

SEQ ID NO: 80599 - DNA, 434 bp, Heterodera glycines
atgcccccaaaacgtaaaaatatctatttggagagctacgaaaaagaattccggcacataaagaaaagtcgaaaaggcgaagaatttgccctttgtgtcgtctgcaacgatgatattaacctactttccattgggaaagctgccatttctcatcatcaaaaaactggaaaacatcagaaagcggcaaaagcagcaaaccgatcaattccattgcaggaatttttgccaaatacttcggccccatcaactgaagaccgtaaagttctggctgccgaaggttaacaggcttattctgatcaaaatttttctaattaataggcactatcgcgtatcacactgcacaacattgccaatcttttcgctcggtggactgtttgtcatctgacggattgttgcgcacaatttttcctgattcaactattgcgaaaaaataa

SEQ ID NO: 80600 - DNA, 799 bp, Heterodera glycines
atggcattccgagacatcaaaaattttcggaagtcggaattcggagggccaaaatgtcgtaagtcggacaaaggaagtcggaaattcttgaaaaaaatataaatactaaattgaaaattcaaaacagaaataaaagtaaaatgatttcaaaaattattttcgctatttacaccactttttcgcggacgatcggcggtgccggtaggcgtcgccggaaaaattttgaaaattttaatgtaagcgttatttttgaaaaaattttaaaaaatttccgatttttatcagattttgtgagtcggaattacgacctgaaaatgtcggaactcggaattccgtgccatctctagtgtatgtattgaaaaagtaaaaaaaataaggcctaagaaactgacgattatatttattggatgcgtaaaaagagtagctaatcttcgatatttcatagagctttaaaaagcaccaagattttgttggattcaaactcaaaaagtcgcatataaccagttacaatttgtaggcgtccaccttttgccggttgcacatgttgcgccacgctttgcatcagtatgatgactagggcagcaacttttagtgaaaaaacttttttttgctcaattgttttgaagaaaggagctcaaaaaacgcatttctgcgttaaaattttttcatttggacgtcacttttcgtcactagaaatcactattttggcgacttcgtcactaaaatagttaaaaatcactattttggcgttttgtcactatttcgacattttttgggaaaatttctcaacaaaaatgca

SEQ ID NO: 80601 - DNA, 200 bp, Heterodera glycines
tttccgtttttattgcatttttgttgagaaattttcccaaaaaatgtcgaaatagtgacaaaacgccaaaatagtgatttttaactattttagtgacgaagtcgccaaaatagtgatttctagtgacgaaaagtgacgtccaaatgaaaaaattttaacgcagaaatgcgttttttgagctcctttcttcaaaacaattg

SEQ ID NO: 80602 - DNA, 952 bp, Heterodera glycines
ttgaagaggaatgcacgccgaactttgctacgccgaattgcttgtcattcgtgcacttttgacttttttcatcgacgaaactcttggcggcttcatcaaaggcgcctttcgcattcgaatgtgttaccaatcattcaagtcagcccctccggcagtgccattgccgcaatttaatcattgaataataattgtgatgactaattggcctttctcccccatttcctccagagaatgccatcgggtgctccgttcaattcctccgtgccatctttccgcttgtccctcttcaaatccgtcgctgcgacgtcagttcgaggccggcatccgtgccggcttcgggttgttcaacgtgatgctgtccgcaatgcccacccgtgtgtccgcactgctccaacttgtcggcttctccggcgatcgggcaaagtccaccaattcccaagagttccaatttccctttacaggactttgggatgtccgaactcgtttcggtctgtcctttctttcttcctttcgaatgcccctttctcccacagagtgcctcaatggcggacactctccgcgcgcccctcgcggcaatggttttgatcaggcgagtgcccgggttgcccatccttacttattctgttcctgatcagttaccaactcttcctggcccatctgctggacggatgtccgcccgatttggcgttgtgttcccaacttttggcacctttggtccgccaattccccaatgtccgtctccatttccaaattcgtttgtccattgtcctttttctcatttgtcagggtgccgttgtgcttttccttcgtgcccgtttccatttggtcaacggcgaattgaacagagccattcagttgaacaacagatccattcaatcgcagaacgtctacaaacagttccagcacatttgccattgggaattggtgtcagcaaatagaatatctttttttt

SEQ ID NO: 80603 - DNA, 303 bp, Heterodera glycines
atggcaaatgtgctggaactgtttgtagacgttctgcgattgaatggatctgttgttcaactgaatggctctgttcaattcgccgttgaccaaatggaaacgggcacgaaggaaaagcacaacggcaccctgacaaatgagaaaaaggacaatggacaaacgaatttggaaatggagacggacattggggaattggcggaccaaaggtgccaaaagttgggaacacaacgccaaatcgggcggacatccgtccagcagatgggccaggaagagttggtaactgatcaggaacagaataagtaa

SEQ ID NO: 80604 - DNA, 528 bp, Heterodera glycines
atggcgctgaattggacttttcggaaggagtgcgtcattattttcgtaatgaatttggtcaattatgtttccttgatgatggcaatggtgcactttttgtactcccgtagagcgaaaaaccgaaagagatactgtatagtaagttgagcagatgaaaatttgttcggatagtattgttgatttgttcgatcaggacgggacactttggcgccaaacgttaatgcatttttcaatattcaagaattattaccctgtaaatttaacatcaaaatgtcccgcgccaaagtgattatgatccttaatacatgcctattcttggcttgttgttgttgttgacgataaattctatgtcttttagttacatttttcagtcttaaaatcaaaatcatcaacggatattagaggcgcaacagcgatgccaatattcagagtgaaatattggaatttagttgacttccaacaaaggaaagcacttttctagggtaattttattatttgttaatgaaaacttcaaaagaacaaaataaa

SEQ ID NO: 80605 - DNA, 2924 bp, Heterodera glycines
atgtctgggccaatacaaaaagggatcatcaatgcactcaaagctctggacaatgccaaaagcgccacctcactccttctacaccccgacccggacctgtcaaactgggaaaatgccatcaacttggaggctcaatttgatcgcgtcgtcaaggaaatccgtacaacggaaatgcagatggacagtctacgagacttatccaacgcttggattgaacttctcgcccgcctgaccggagacgacaaagacaacggcgaaaaagaatacatcaaattcgacaaaaatgagaaaatcgccgaacgatacgacgcagcatcaaccaaacttcgggatttgcgagatctcgaagcaacactcagtgccgcagccaaactgcacagaggcagagccgacagagaagcaaaggcggatcaattggccaatccacagcaacaaccgcccatgccaccagcaatggcagcaccaatgacaatgccaacattcacagcaccgctctaccaattccagccaattcaactggataaatttttcggccaaaagcgaaaatggcccgaattctacgaatccttcaaatcggcaatcggcagtcaatcaatcagtaaagcgcagaagctgaacttactctgcaatctactgggcggagaagcgcgagaactcatagcgggcttccggctggaagacgcaaactacgagacggtccttcagctgttaaaggacacgtacggagctccggaggaacacatcagaagtcttcacttcgaactggccaatctcaagccgtgccgaagcctccgtgagaccaaagactttctgcttcaacttgagcggcttacaagggagctgaacaatgccggagaggacatcgagggaccgcaggtgttcctcatgctggagaagaagctgactccaccattcctacgaagcatcctcacaaagaaaggagaggatccggcaaactggacgacaaccaaattccgggatgtgctaaccgaagcagtccggaaagaagtccaaatccaagaagtgatgggagaatatgggcatcactacgtccaaccaaaagcagaagtcgtctcagcagcacctgtacaagcaccgagaacaccaaaccaaaggtcacgaaggcctaaccaaccaatggcactgcgtgatatgacatttatagcctcatcactggacgagggtcacagacatcaagggtatgtaagccaacagcacacacaacaagcaaagaaacactgccaacaaatgcgaaaccaagtacaaagcgtcaaaaagggtccgccatacccctgcattttctgcaacagcaatcattggcatgacgaatgccaaaacgtcgacacactcaaccaacggatcagcatcgtcagagaaaagaagctgtgcttcaaatgcatgaagccaaaccaccgcgcatcaaattgcgctcgaccatctaagtgctatcactgcaaacgtcggcatcccacggcactctgccgagatcagtacaaagccgagaatggcatcaactcgcctagcacctcttgcagtgaagagaagccaaatgccaacgatggcaagcgatcaacagtgatcgaacaacaacaaatgtgtaatgccatccaaagcaaggaaaccagagcgttgctaatgacgacaaaggcaacgatcttcaatccgtcacggccatccctcagcatgatgggaaccatcttcattgacccgggaagccaccgatcattcatctcgagcagtgcagctgaacaattggatctgaacgtcctcagcacggaagaatgctacttgtccagcttcggtgaacgagaaccgaagcgatacataagcgaccgcgtcgaaatcggcattttatgccccgaccaggacaggttcattttcaacctgaacgctttgaagttcctgctgaatgatttgccggtactacaactaaacgcattggataatgacgaacttcaacaaaagaagctttccctgccgaatgagtcacggcaaccggacattctcctcggaatggacgtttggcaccagctgaatgttcaaccaattgaacaactgccaagcggatttacgatttgccaatcgaaaatcggcaatatcatcagtggaacagggcgaatcaagctcaagcaaccgtccaacatctctttcgtgctaatggtcaacaacgatgaatcgccacaaagcagtaaagcggctcagaggcagaaaaacattcaacaaaaagaaaaggacgaactgagacggcatcaacgcaacaaactcttgtccagcattgcaacattgcgatcaagacggaagagagaatcggctcccatcagctcaaaatcaatcgtgattgatctttcatcagacagcgacgcatccggcattgagatcatacaaaatccagtcagggatagacaagccaaatcaccaaatgagcattcaacggcaccaatgcctatggcagtgcaacggctaacaccaacaaggaagagttcatcagttgccatgcgaccagcattttcttccagcaaacaaccaaaaggaaaagcagcgaatcccgcacaaacaagccaaacaaatgaactcaacagaaaaatgaaagccttgtcgccaaccgcaagtggatcaggcgccaaccatcattgcgtcgctacattggccagaagctcggactcaacaacagtaattgataagggcagtcaacagaattgcctaaacatgagctcggcaacaatcagtaagacaccatgccaacagcactcgtccgagaagacgttaaactaagctaatcaccaacaatcgtccgcaatgacgttaaactagcctaagccatcaacaactgtccgaaacgctaatcacccggctgccacgagtccggaatgacgttaaactagcaaagcatcggccaacccacacaacaatcgtccgcaatgaca

SEQ ID NO: 80606 - DNA, 492 bp, Heterodera glycines
atgcagctgacagcacgtttccggaagcaaattcacatgtcctcaacgattgaggaggttcagcagcgaatgaaccacaacagaccgcaaccgcggaggtcacaacagaggggactaaggccaactcaagcgcctaaaatatgccaatccgggatggcacagtacaagcagggtcgagggatccgccttcaccctgcgtcttctgcaatggcactcactggaccacgacgacgactcagcgaacaacccttgcaacgagagcaaggacacgaatccagtacgtcaccaggacgagaacgcagaccacgaaagagccaacgacacgccccagatcgcgtaagcacgatttggaaactcaagagcacggaaaattcacctttttgccgtcccccgccatcactcactgctcaatggctcaacctggcaattgagctcttcgcaaaaaatcatcaagcccgagcagagaatgcccattcgccaagtctgaaatga

SEQ ID NO: 80607 - DNA, 1919 bp, Heterodera glycines
atgcgccagaactcatcgcctgcgatggcacgcacacgcatcgtcatgtccgaacagaacttcggaattgccaaggagcaatacgacgacattgtcagcaccacgacacgatggaaaagaggcatccgaccagaacagctcgcatcacagctctcggcatcccaagtggcaacaagcgttgcgttaaatcagctctacacgagggaatgtcagcgaaacacgagggcagccaacccgactctccaggccagacgcttactacggcaaccaaacatccaagctcgttggatcggcgaaacgacaatggaagtgtttccatgtgtcaacatttcgctacaggacatctcatacaggccaatgaatgaatgtcgcctctacattcccgtgactgcgcactttcccgaccgagctatcgcagctttcctggatccggaacttcgcatcatctcgctgacagcacaacaggcaagctgtaatagctaccggttccatcatcttcaactgcgaagcaatcccaacatctggttacggatcgactctcgaaccggcacagcacgacgaatgccaaaagattacgtgcacgaattgtacgaaacaacgatcaaccaaacaaacagcaacttggaacttcatccattgatcttccacgcatggcaactcgacaatgagtctgacgcgacacgcttcccgcacatcaacgaattcatcaactcggagcagttcaaggacaagctggaacagcacattacagcaaggactgaagctttgggcgcgttgaagggcggaatagaaggattcaccatgcgctggctaaaaggcctgatcgacgaagcaatcacgtggtggattcgagtcgcctgcgtttattcaaccttcctcatgctgcgcgacattgttctcccatgcactctggcgtatttgctcaatcccatccgagtgactcttcacagcctcgttggagtacgcccgcacccgacattccgacccaccgtttctaaaccactcgggatcgaagagggaatgccgctgcgtgaaatgccacgaacccccaaaccaccagcgcgcagggcagagcatcgatccatgtcaccaatcaaattggacatgattgccagaacggctcggtaccaacaaccactaacacagagccatctcgacctcacagaagactcgccctttgggaggccgagacgaaaagaattctgacgggccccatcctttttcgcgccggaatgtcggaatttttattcctatcgccgatcaatgatcggcggaattaagagggaggaggcccttcaccaatcccccgcccgccgcgcgacatgttttcgccgttccatccctctgtccccttttccttcaaattgtcaattgtttttgtgtgttcctcccccactccgcgcacaaattaatgaccaatttgtcaaaccgcaactttctgcccccgtccccaaatttggcgaatcgactccaaagaacgatgaacccccaaatttcccgttttccgcccattttgttcatctgttcattttgtcccccgtttttcatttcgtgcccaaattttcggcccattttgttctgctcacatttgccactttttatttaaatttattgttatttaagcggccaaaaatgcccccaatttcacaaccaaaattcattaggcatttttgccgtttctctcccctcccttccatttgcctttaactgtgataaccccattcgtgatcattctttgacccccggttattgatttttgttctgtggccccagtgccctccatttcctgtcccatcccggtgcccaattccatttgtgataattccccggtgatggcatttctgtgatcaatttgtgataattcgttcaccatttcaaaatttttgtttaattacccaagtttgaggtcatttcccgga

SEQ ID NO: 80608 - DNA, 990 bp, Heterodera glycines
atggccaagtgagttccgccaactacgtcccagtttagtttaagaagccgtaacttttttttcatgagttggatattttataagtttggcactattaaatgctctattagatcaggagataacgactggaattaaaattgtccttctatttttgaaaaaattacaaaaaattttttttataaattcctgtctttggtctcatttttaattgaaaaaatgtcagcaaaagcgcaaacaacaaaatttaattcactaaaataaaataaatggaaaattttttttatctcgtggctttttgtcgcgttttttttaatttgaaaatgaggccacaaaacaggaaattaccaatttttttaaggaatttcatcgccggacaatacctaaacatttgaatattaataattattatttttcgagcggttccaaaaacatataaaatttgataaattaaaaaaactgattgcttcttaaacttggctgggcctctgttggcgggactgagttcggcggccaccgcttgggcgccggtggtgaacaaacattcgattcttgggtggtggaggacacatataataaaatggttggtcactccttttgcgcccgctttgctgcacacaaccaacaattttgccggcagcggggtccgtcgctgtttttacgacggacggacgacccacggtctcgcggaccatttgccgtccgtcgaatgacccctaggggggggggggggggggtaggcggcgaggggtggcaaacgcataggtcattgagcaagcgggaaaattttgatcgtcctcccttaaagaatttgtataagaaacaatattcagtgaagaatgcccattactgttccagactctcgaagttgtcgatgagcctcgaggatttttggggatctctgtatcaagttttttggcaacgtctcggtactgggatttttctttacttcatttggaccctattccgtaccacgtgtactcctcgctctaa

SEQ ID NO: 80609 - DNA, 483 bp, Heterodera glycines
atgaaaggttagagaacaagaggaaaaagggttttgaaaatttgaatttaaatcaaaaatattgtcgaaatttaaatgggacagcatcaggatgaacatagaaaattgtaagaaatttggctaaataaataaaatttgggtaattaattatctatgatatggcccggagccgaaaatggccagaatatgttttcggaagtttttggggacccataacttttgtcaatttcattttgtcaaaaatttttgaggaaatgattccggaactcagggattagttcccgcaaaaaataaatttaattcgttcaattacggaccaagaaagaatcaatttgtctatatttttttggcagttttagactacggtctaatgatcaatattttcggttaaattttgttagtagacttttcgaaaattgccgatttttgaattttgagtcaatttcttaaagtatttagcggaaaattaaaattaaaaattca

SEQ ID NO: 80610 - DNA, 591 bp, Heterodera glycines
atgaaattacacataatattttctttacttttatttttgatcgtcttaataaaaattaattatgttgaagcaaaaaaggaaaagttgcaacaaaaatcatttgatgaaatatttggagaaaaatgggaagaaaaagaagaagaaaaacgaaatgaactcaaaaaaagagaaataattgaaaaattttataaaataaaagagaaaataaagcaaaagggaagaaaatactcaagaaaaaaatggaataaaattaatttgaaaatagcgaagaagttgggcacaaattgtaattatatttataaatggattaaagaattagggcttaatcaaaaaatacataaatgtcacaaatcaaaaactgatgaagaaaaacttgaaattgtgcaaaaatttatagcaatgaaaaaagaatacaaacaaataagaaaatattcgccaaaagaatggcgccaaaattatgccgaaatttgtaagaaaattggagtaggccgagacataattaacaaatggaagaaacaatttggcattagcaagaaaagaataacggagagagaaatccaaaaatgtatgacaaggaaattgcaaaaatga

SEQ ID NO: 80611 - DNA, 581 bp, Heterodera glycines
atgaacggtttgctattaaataatttcattccctctgtgattttcggtggaaaagtgttcatatcttcgaagttacatttgacagaagaatcctgcggcctaatttgtttttttttcgcgccattaccttcgaacaatttgactacctgaatttgaaaaagtgaaaaattattttcatattttttatttaatttataggcagggttcaaataatgaaattaatgaactaaaatattttgcttgcagcaatatggactctggcgctcaatgccgttgtgtttttggcactgatggttcataagcgaattttggctgttgaaatgttcctcacccaacacggcattgaaattcccaaaagacctaaatatggactaatgaaaaacgcaaaggcaataggaattcagaataaaaattcattaaattaaaaatatgaactaataatagcaattaaaaataacactgaaaagggagtttagcatttgtcaatcatcagcgagtcgttacttgattttaattgattgtttaaagctttgatttgtatggaaacatgaactaaaatgcgtctgcgctataaaaataaa

SEQ ID NO: 80612 - DNA, 1763 bp, Heterodera glycines
tcgacgacgccatactgtgcaaagttgaaaatggagggaaattgggcagtcgcaaaggggtgaatttgcccggaacaccggtcgatttgccagccgtttccgagaaggacatcaaggacctgcgttttggtgttgaacaggtgcggttatctgtggcattttattttatttaaaggcacttttcgatattttccttgattttttgtttaatattttgttcctccaaattttcagggcgtcgacattattttcgcctcgttcattcgaaacgccaatggcatccaaaccatcagagaagtgttgggcgaggcgggcaaaaacatcaaaatcatcgcaaagatcgagaaccaggaaggcgtggacaatgtggacgaaatgtgagtttaagctgaaagacgaacaagggagagaattcaaaaacttagaaagttcgttgtataagaaaattcttagaaaaaataatttcaaaaattttcagctattgtagaaatttttgaaaaatcctagtaattcgctgaaaatttttgatattggagtgggaaacggagtgcacccattttttctatttttacagcattgcggcatcggacggcgtgatggtcgctcggggcgacttgggcatcgaaatcccagcccagaaggtgtttctggcccagaagatgatgatcgcaaagtgcaacatggccgggaagccggtgataactgcaacgcaaatgctcgaatcgatggtaaaaaattagggttttaaaaaatgaatgaaagtgtgtgtatttaatttccaaatttgtcattaggtgaacaagccgagaccgactcgtgccgaggtcagtgacgtggccaacgcagtgctggacggctcggactgtgtgatgttgtcgggcgagtcggccaagggcgattatccggtggaatctctcaaaaccatgcacgacgttcgtttccctcgttacatttgataattaaagactgaaaatttaatttttcagatttgtctggaggccgaaaccgcctttttccactcgaggtacttcgaggagttgttgcagaacacgctcagccccaccgggccgggcgaaaccatcgcaagcgctgccgccaacgccgcgaggagatgccgggcaagcgcaatcattgtgctgaccaccaccggaaagtgggcattcatttttttattgtttgaactatttgcaaaattaatttattgtcctaattccaattacaaaaaagaggcataacttttgaacaattgcattctgcagattctctggtcaggagcaggtcgtttccctctcccttttcgccgcccctccccccgaaaatcttgaattttttttattacaagacttagcttttcctttggttttgaattataaaatttaaaaaagacaaatatttaaacctcaaaattttgaactttttccagtgaaatatggactataaactaattaataatcaaaataaaatatctgaaaataacaatttttcaaccgcaacacacccaacacgcactctcaggtcggcccaggagtgttcccgcttccgcatgccaatccccgtgttggccatcacccgctatgagcaggtggcgcgtcagctgcagttgtgccgtggtctgttcccgctgtactacccgcacatggaacgcgacacggagtggacggaggacgtgaacaagcgcatcgcgtacggcatcggagtgggcaaggagcgcgggttcatccacaacggcgactttgtggtgattgtcaccggatggcaagcgg

SEQ ID NO: 80613 - DNA, 1783 bp, Heterodera glycines
ttccgattggtcggttgaggaacttttggtggcgcagggaatgcgctgttctctgatcagatgcgtggacactgatcagcactcaatttgtcttgccaagtttgcctgcacttcgccaacactgtcggccagtgccaatttgacatttgccggcgttgaagggtatttccgggtcttgggatgttccaaggtcacaacacactccatttcgtactcatttttactttatgggagcaattcccgaatttcactctgtcgctgtggcctgacatattgctgctctgcgttttctccctttttcatttcgtttgtttattttatgggtgccacccactccactctcgttctgatcacttccactggctcttcttccattcaaattgttggccaatgggacgacggtcccgcgctcaactgtctgttgaacggcgtggaaacgacggccgaccaaatcgccgcatggctgcgatgctccgttagatccatcaaagggcccatttcgttgccaattgcctctttggtaatttacttttttcgccttttgatcccccccccccaagggaatgggcctttcgggcgcggaggacgaaggcaccaacaaacggctgatggcttatatgaaggcgcaacacggagacttgacacacaattttctgcttaccagcgattcaattgccgcagctgcaacttcgttcgacaaaggtcgtaaagcatatgcaactttcactgctttttcgttgttgttactgcttttattttttgtcatttggtagccattcaaattacaaaattttttattttccggtggcattgttttgatcgctggcacgggctcggcctgccgtctcctcaaggcttggacaaatctctgaaatgtaacctttcatttgttgataaatttaggaaaatggcgaagtgtttggaggttttctgttgttttacgcttttttgatatttttttaagttggcggttgggggcatttaatcggcgacggaggcggcggtttttggatcacaatgcggtgggataaaacatgtctttttgatgatttatgaatacacataacaatcattttcactgttccagtgctattaaacgaattttcgatgttgaagatggacttttgtggagctccgataccgataatgaaaaaacttcggcttttgtcgactcagtcaaaaagactttgttggaacacttcgccgtggactcgaaattgggcttgctggacattctgtacagcccaaagttcaacaaatctcgcattgccgctttttgcaaggaattagctgaaggtgaatagtgcaaattccgctacatttcccttattttaagaataaattcagttgccactggtggcgatgcttttgctgtcgaactgtttagcgatgctggcaaggctttagcgcaacatttggtggccatttcacggcattgtgacgacaaaatgttaagggaattgcccgttttgctggtcgggtccgtcttcaagagttggcattttatgagacttggttttgagcgatgtataaaagagtcaaatgacgccgtgacggatttgaatagacggatcaatcgagtgatgcttttccaattggagtgttcagcttcggttgggtgagttgttgctttttctttgttatggtcaactataaacgcatcttctttctaagagctgcgattctaagtgttaagcaaacaaacgatgggaaaatggacctttgtgaccttaaaggaatacaatcgaagaaactttttgatgaacttcaattatacgagtaa

SEQ ID NO: 80614 - DNA, 715 bp, Heterodera glycines
atgatcacaaattttggttcctgttcctctgttaaacacaaagttggacctacaacgaagcgtaaaaatgtgcaagtggtcgtcagaacacgtcctctcagtgaaatggaacggaacgatcggtgtaaaaatattgtttcatgtgattccgtctccaaagtcgtttcgttgaaaacaaacacatgcgacaaatacagcactggtcagcgccaatttggagtgttcgataaggtcttgataaactcgaattgaatatttatcattaacttataaaaaggcagcttttaggtatatggccacgaatcaacgcagatccaagtctatggtgatgtggttgctccattgatgaaagaagttttgaatggctacaactgtacagtgtttgcgtgagttatttaaataatgttactttttgagggcactttttaccaaaaaaaaaattctcagatatggccagaccggaagtggcaaaacctatacaatggaaggccgccacgacgaaagtggagctttttcttgggattcggacccgacctctggcattattccgagagcactgcatcaaatattcacagagctcagcaacgaagtctgtctaatggagaaaagagtgtaatatttgcgttgcaattatttcctttttttgcaggacatcgatttcaccgttagtgtctctaatattgagctttttagtgatcagattaaagaaagataa

SEQ ID NO: 80615 - DNA, 476 bp, Heterodera glycines
atgcgtgattacaaaattgtcgttttgggcagcggaggcgtgggaaagtctgcgctgacagtgcaatttgtacaggtgggcttcgcaaattctggaaaatatttttgaaatataaaaattattttaagggaattttcgttgagaaatacgacccaacaattgaagacagttaccggaaacaggtcattgataggatagacggatgacaaaagcgatcgagaaaatattactaaaattcagttggagttcgacggtcagcagtgtatgctcgaaattttagacaccgccggcaccgaacaggtgttttttggccgttttcaaaattcttaagtgagattcagttcacggcaatgcgcgacctttacatgaaaaacggccagggcttcgtgttggtctactccatcactgcacagtcgaccttcaacgacttgatggatctgcgtgatcagattctacgcgtaaaggacacggacgat

SEQ ID NO: 80616 - DNA, 108 bp, Heterodera glycines
ttcattttcggttattttcgccagtgcgatctctttccctttttgttgtttattttgcgatggatttaattgatttcattccccgtgttgttgaaatagggtttttta

SEQ ID NO: 80617 - DNA, 510 bp, Heterodera glycines
atgtatcgccgtgtcttttgttattcttcggctcctttggccggtgcccttggcgcatacgctggtgtgacgatggcaaaccaaaattctccatcgacagaaaaaaacacaagcgaagttcagcagaaagtcgcaaagcaagcagtcgtaaaaagtggaactcacaattctcagcctaaagatgttcaatcgcttggcaccggtgaaataacgcgatgggactataattgggacaagtttgagccgattgaatgtggtcaatatttgtatattttagaagagaccctttttctatggttattggaaagggatacgaagcggcggacgaagaaaagaaaaaggaaattcttgccaaggtcagtaatttcttttattttgactcgtattttttatacaaacatttgttaagtttgttccgaccgcaacacggaacattttcctgatcagacacggacaatacgaattggattcaaagacgaaggagcttaccgctctcggtatctttgagcg

SEQ ID NO: 80618 - DNA, 1515 bp, Heterodera glycines
atgccattttttgctccggccggaagatctctgcagactttgctatttgcttttataattgggatactcaacaatttttatgtaaattaaaaattaaatttaaataaaattaaaaaattaatttcagcaagcctattcttcttactattccatttcggctgccaaaagtttgcaaaattttctgaacgtttcgtacgctgcgcgtggcgttgaactttccgaagtaaaacaaattgactttatacattttttatattcaatttacaaataatttatacattttttatatttcaattttcaggggaaattattgtggctttggagtttcaatttgaattcgctttatatcggaaatattctcggaaccgtttttacttcatggctttgcgaacaatttggcaggaaaagtgagctcaaaatgaaatgaacaaaaacaattgcaaaataaattaagaaattttaaataataattaattcattaattaatatttaaaaatatattttaaaaaaatgaatttataaaaattaattgaattaattgtgtgcctttagtgattttgttgctctccaactgtggcattttcggtgccagctttttctccactttggccattgtctttttgctgcccgaactttttctcatttcccgcattttcggtgccattctttcatctttgaacttttgcgcatttgcactttttgttacagtaataatttaaaaataatttctaaatttatttattttttgtgtcattttttcttttccctccaaaggaattcccatcgtcaaaactccgcggattggtcatttttgtcagtggcgtctgttataatgtggtggcaaacattggcatgcttctcggcatggatgtgcttttgggacaaaatttggaaattttaatcggtaaaattaacgaaaggaaaataatagaattttcccaatttaaggatttggcatggtgccaagctttttcggcattttgaccagcattgcgttggaagaaacgccaaaatttctgctgttaaaccgcgaaaacacagaaagggcgctgaaagcattgcaattttaccagggcaagcaaaacaaaaattggaaattgaaagtgcaattaatgaaattttaactaaaaaatggctttggcactgatcattaaaattctctaattagcgcattttaattaaaaatgcctttgccactcattaaaaccattggaatttccttcaggcgattccgtcgatcagaaaatgacactggcggagattgtgaaggaaaagcagcagaacgaagaaaaagagcgaccaatgcttcaaatgttgagagaactgttcacacagcggcatttgaggcattgaaagccgttcttcttttttgggcttaattgcctcattttcttttcggttggccactttgctcggcatttgttccctccaattgaccattggcatttggcccgtcctcacaacactttttgctgatcatttcccactcaatgaagcgcaggcgaacaaaataaa

SEQ ID NO: 80619 - DNA, 1013 bp, Heterodera glycines
atgtccaaggagttgtgctatcgctgtggtaaacccgtctatccgacggataaagtgggcccattgaaggacggggccttcttccaccagggatgcttcaagtggtagggagcaaagtgagccaattagcaacatcaaaacgttcagttatttgtgtggcacgcgtctcgccttgaaaacgtactgcaacaacagaaagtggggatagattaaaagattaattaatcttctgatcaataataggcaattaattaacaacacatgtccaattaacttgcaaattgggctttccgcagggcaaacgacgaccgcgaagtgtactgtcgcaaccacgtgccaaacgccacaccgcacgatcccacgctgccgttgccgccttccccgtcaaacggagtcgaacccaacgcgtgtcaccaacaacagcagatgcggcgccatcggcacaacgcggacgcaggactccatgacatgaaaattgcggtaaattttgaaaattggaagacgaatcaatgttttaatctaattaattaattatatttttaattaaatttaatataaactgaatttaaatatatgccatttaaatcatatgaaaatttgaatggttaagcacgcaatgaaagtgacgcaagcagttaaaccgtatccgaagatcaaacacggaggagccaaatacattgtggactacgacacacagacgcggctggaactgctgcatcggcaggacgaggacaaactgtaccaagaatttgatgaacaccgccaaaaggtggtggaatacggaaaacagagggggagaaaaaagaggacaaattggaaatttggaaaattttaaggaaatccaacagtttgaagaggagacgcgcgaagagtgggaaaaggctttggccgaattcgcacgtcgctacgaacaaaggcacgccacggcccgggagaaggaacagctgctgcacgacttgacactgcgcaaagagcggaaactcgaagtcaaacggaagaaccacagactttga

SEQ ID NO: 80620 - DNA, 725 bp, Heterodera glycines
atggactcgctgatttttcattacaatttgcgttcctttgacaccgaagacgccgaattggacggaggactcagtctgaagaggtgggcaagatgagaagcccttgtggtcatcgtcgtaatttacccaagtgccatgttgaggttcgtgatgcaatcgtcgctggacgactccgtcattttccgcgtccacgtgcccaccacgcggcctcttctgctggacatttttgccaattgcgtgtcgtcggagcattatctgaccggacagccgattaagttcaaaagtgtttgcaagttcaaggtgctgctggtgttgggcaatgcccgtccgttctgtcggctgtacgcgttgcgctgttcagattgagtgcgactctcttcggcatattatggtgcctttgcccgagtgcgccagcggcgagtggggcccctcaaaggctttccgactgtttgggctcgtcccgcgcacgcacgaagagccgatcatcaactgtgaccaatattgcgaaatccgtttcaagttttcggcattttttgcgcaaaaaaacggcgattttcagagtgacaaagccactgactgaaatggtggcaaatcttcatcggaatgggatggaaagtcggcacttgcaaaagtgcgtgcactgttcgctggacgatgaagaagtggtgatcgaattggcatttccggacgaaggccaatacggactggacatttacacgaggtga

SEQ ID NO: 80621 - DNA, 585 bp, Heterodera glycines
atgaaaatgtacaataaattgaaactgaaattcaaatcggacacaaaaggaatagtcaaaacggtggacccaaagcgcgaagaacaggtcatttaataatgtacaagtaaaaagcaatttaaaaggacgaacattcagacaattgcacttttggggcgcttccaaacgacgttggaaaggacaaccgttaaagacattttattcgacaaaaaagtggacatgagcgatcagaagagccgtgaacagatcattttggcaacttcagaggagcaggggaaaatcgacttggacgcagcggacattcagggggacgaatggtgggacatcggacagagacaaacccttgaagaccatggccatcttttaaaccattcatttggattttatttaaggatggaccatgaattggtggcacccgaggacacatcgggcgtaacaaaggccaaagatgctaatatgaaggatagcaatatggaatggtatccatctgatgacccacggaatctgctgaatgttcgccggaggacccaaggcgggacaatgccggatttgtttaaaagtgccgaaccgatggcattgccataa

SEQ ID NO: 80622 - DNA, 2630 bp, Heterodera glycines
gctcaatttgatcgcgtcgtcaaggaaatccgtacaacagaaatgcagatggacagtctacgagacttatccaacgcttggattgaacttctcgcccgcctgaccggagacaacaaagacaacggcgaaaaagaatacatcaaattcgacaaaaatgagaaaatcgccgaacgatacgacgcagcatcaaccaaacttcgggatttgcgagatctcgaagcaacactcagtgccgcagccaaactgcacagaggcagagccgacagggaagcaaaggcggatcaattggccaatccgcagcaacaaccgcccatgccaccagcaatggcagcaccaatgacaatgccaacattcacagcaccgctctaccaattccaaccaattcaactggataaatttttcggccaaaagcgaaaatggcccgaattctacgaatccttcaaatcggcaatcggcagtcaatcaatcagtaaagcgcagaagctgaacttactccgcaatctgctgggtggagaagcgcgagaactcatagcgggcttccggctggaagacgcaaactacgagacggtccttcagctgttaaaggacacgtacggagctccggaggaacacatcagaagtcttcacttcgaactggccaatctcaagccgtgccgaagcctccgtgagaccaaagactttctgcttcaacttgagcggcttacaagggagctgaacaatgccggagaggacatcgagggaccgcaggtgttcctcatgctggagaagaagctgactccaccattcctacgaagcatcctcacaaagaaaggagaggatccggcaaactggacgacaaccaaattccgagatgtgctaaccgaagcagtccggaaagaagtccaaatccaagaagtgatgggagaatatggccatcactacgtccaaccaaaagcagaagtcgtctcagcagcacctgtacaagcactgagaacaccaaaccaaaggtcacgaaggcctaaccaaccaatggcactgcgtgatatgacatttatcgcctcatcactggacgagggtcacaaacatcaagggtatgtaagccaacagcacacacaacaagcaaagaaacactgccaacaaatgcgaaaccaagtacaaagcctcaaaaagggtccgccatacccctgtattttctgcaacagcaatcattggcatgacgaatgccaaaacgtcgacacactcaaccaacggatcagcatcgtcagagaaaagaagctgtgcttcaagtgcatgaagccaaaccaccgcgcatcaaattgcgctcgaccatctaagtgctatcactgcaaacgtcggcatcccacggcactctgccgagatcagtacaaagccaagaatggcatcaacacgcctagcacctcttgcagtgaagagaagccaaatgccaacgatggcaagcgatcaacagtgatcgaacaacaacaaatgtgtaatgccatccaaaggaaggaaaccagagcgttgctaatgacgacaaaggcaacgatcttcaatccgtcacggccatccctcagcatgatgggaaccatcttcattgacccgggaagccaccgatcattcatctcgagcagtgcagctgaacaattggatctgaacgtcctcagcacggaagaatgctacttgtccagcttcggtgaacgagaaccgaagcgatacataagcgaccgcgtcgcaatcggcattttatgccccgaccaggacaggttcattttcaacctgaacgctttgaagttcctgctgaatgatttgccggtactacaactaaacgcattggataatgacgaacttcaacaaaagaagctttccctgccgaatgagtcacggcaaccggacattctcatcggaatggacgtttggcaccagctgaatgttcaaccaattgaacaactgccaagcggatttacgatttgccaatcgaaaatcggcaatatcatcagtggaacagggcgaatcgagctcaagcaaccgtccaacatctctttcgtcctaatggtcaacaacgatgaatcgccacaaagcagtaaagcggctcagcagaaaaacattcaacaaaaagaaaaggacgaactgagacggcatcaacgcaacaaactcttgtccaacattgcaacattgcgatcaagacggaagagagaatcggctcccatcagctcaaaatcaatcgtgattgatctttcatcagacagcgacgcatccggcattgagatcatacaaaatccagtcagggatagacaagccaaatcaccaaatgagcattcaacggcaccaattcctatggcagtgcaacggctaacgccaacaaggaagagttcatcagttgccaagcgaccagcattttcttccagcaaacaaacaaaaggaaaagcagcgaatcccgcacaaacaagccaaacaaatgaactcaacagaaaaatgaaagccttgtcgccaaccgcaagtggatcaggcgccaaccatcattgcgtcgctacattggccagaagctcggactcaacaacagtaattgataagggcagtcaacagaattgcctaaacatgagctcggcaacaatcagtaagacaccatgccaacagcactcgtccgagaagac

SEQ ID NO: 80623 - DNA, 86 bp, Heterodera glycines
tgaagcgggaccgggccgggaattcccggtcatccgaggtcccggttcccggtcccggattttgaaaaactcaggtcccggtcccg

SEQ ID NO: 80624 - DNA, 421 bp, Heterodera glycines
aagcatttccaactctctttttctattcaaatggcattcaaattggcattttttttcatcgcacccgtgctatgcttgtcaattttaatgatcggccaaatgccatgccaaactgatgccgttgctgttcatcccgctgttcgaacagcggtgagacttgccaatacaaaaggcggacagattgcacttggaattgtggcgcctagtgccctcccaggtcagtcgaataaaatgacatgaatgtcttatggtatctcatcaaatgcccgcgacatattagaacaaaaagtcaaaaattcaatttcaaatagaattcgacactgtttgtccaatggccctttggtgttcttttttaaaattgtccaaggcctttatttttgtaccccacaaagggttacggtatttttgataaaaaaataaa

SEQ ID NO: 80625 - DNA, 1388 bp, Heterodera glycines
atgatcaaaaaagaagaagccgataaaattgccgaagatcctggaaacgtgccaaaagtgatcaaaacggaagaaaaagcggacaaaataactgaaaaaattacggaaagtccgccagaaacactggaagaagatgaagccgactttgatcaagaagatgacaagcggaaagcagcagaaggtgtagataaaatcaaactgatggtgatcaatgaatatgaccgaatgaaaaatgaatacaaaaagaaaaaggggatcaaagatggaaaagaccgttataaaatcgaacaaaaaattgccattgaattgggctcaaatcgacgaaaaatttaccaatggaaaagagaaattaatcggatgatgaaaaaagacgagggcgatgaaagaccaacaaaagcggaagagcagaaggaaaatgagagaagacgagagctgatcaacaaatttgaccaaacaaaaaaggaatgccaattgagaatcggatattggagcgaaaagcggcacaaaatcgaaggtgaaatcagcgacaatgggaggggtcgggaccagcgctgggcgtaactggattttcaattaaggaaactcgtcatccgtaattacggcgaattgatcaattacagattctgtaatccgtcatgacaggggtcaaaaaaggccgcaatttcccgtaatccgttattacgcccagccctgctggtcgggacagagggggacacgcagggatttgagggacgcattccaaaatgcgccaacttttgatatgtattttcataaatttcactcgcacaagagatgtctctcatccttggtaaaaaaaaataaccaatctaattagctaattatatccggctcaaaagtgtaaaaaataatcctaattgatttgaattctttttaatcatttctaggaagaattgccaacgcgttgggcacaacctgtaataatatttacgaatggaaaaaggaattcagcaacaaaaacaacacaagaaaacgacaacagcagaatgaaaatgaaataaaaatgagcatagtgaaaaaatttgaaaaaattacaaataaaaatgaaaatgacaatgacaatgaaaatcgcattaaaatggaatgcgaaattgccaacaaatttggcaccacccgtgaacagatttacgaatggaaaagggaagaaaatctgaagatggatgaagtaagccaaagtgaaaaaatgcgaattgtgaaagcatttgacaaaatgaaaaaaagcaaaaaccaaactgagaatgaaattgccatgaaattggggacaaatcggaggaaaatttacgaatggaaaagggaaatgcgccaaaaagaaacgggtgaaagtggtgaaaatgaattgggaaaattaggtgaacagaaataaaaataaa

SEQ ID NO: 80626 - DNA, 641 bp, Heterodera glycines
atgacaaagataaagcagttcaacattggcattcacgtcacggacaacaccggcaaatataaagtgaaatttgacacggatggcgaagtgacagattgccagtacgaaagtccggaaatgccaacatggactgtccaatatatcacggtgagtgttgaattttcagcgttaattaccatcatttagtaaagttctctaaattatgaagttgtaaaattaaaaaattaaaataattaattaagccaagattaaagttatggaaatgaaacttgtgattaattcgcttgaatttttaaaatgttctttaaatttaaaatgttcgtaataaataatatttttattattttttgatattctttcggcataactaatttttttttttatatgtcatctatgttttttttatttcaggttttacttacaaatgaccctcagcagttaattaagccggaaatcagttgtattccgcaaaagcgctgcatgaaaatgagagatgttgatgacctattagagaagagaacaagtggttgaaaagcagcttcagccattagcataatgtcacattaatactaattaatgcataaatttgactattcaaatgtttattaaaagtactgataactatggaaaccctaaataaa

SEQ ID NO: 80627 - DNA, 2363 bp, Heterodera glycines
atgggaagtatgataaatgaaacaaaaaaaaaaaatttagtggccttattttttttcttaacagactgtactactttttcacattgcattaagaaaaaagcaaatttgaacattgtcgcatcattggatacggtacttaactacggtgacgaaatttggatggaaatgatcatcagtgaaacaaccaaaaaattctacattcgattgatgcacgaatcagtgaaacccagcacaaaaagtcagttcaattcagggttgattctgttagccagaaaataaagaatattataaaatcggtatttcctttggacttgagtcgatacacaattaacttaataattttttaaacaatttagtcccggactcgctcaattcggccccgcatggttcgggtccagccaagtcttcgatctataacttttttttttgttaacccaatcaacaatcttggtatcattcgaaagctctttacataactctattaaccttacaaaaagcaaaaagatttccaagcctggaaaaaattaaaaaaatttattaagaaaaaacttcaaaaattcgacttttcgaaattttcatgtataactttttttgaaattgtctaatcgcgaagcaatattttagaaaaagcttctaaacatattaagctttcgaatgatacaaaattcgtttgttttggttggcaaagaaaaaagttatagtcaaaaaattggctggggccaaactgaggtaaaccgtttagtccatatttatttatcctctttcggctggcaaaaattttggaagctttaaatgggcattggttaatccatttaatttgtcattttcagttggtgacattttgctgttattggaattcgatctttcaaagcctgatattagctgcaggaattatctgcacgctgtgagataatatttaaataattttttttttacaaattctgtaatatagagttgaaaaattttgtagaaacatctgtaaaatttacagttgtttgttgtccttttttgaaattttacagtaatataggaaattgtaagcgaaaagcttgtcatccaatttgttgtcacaaatgaatttcccacttttacctacaaaaaaccgaattatatgcaaacaatgtcagtttattaatttaatacaatggcaatttcgtatacgaaatgccgacttgttaaataaatacagtaaccaacttgtaacattcacttacaaatgaatacagtaaccagctcgtgccaaatgtcagcttattaataactgaacagagaaacaaaaccgtatcagacatatagcaacaatcaaatgctgagtactgtatcatgtattacagaaccaaaacttttcaattggtaataatggcacgcacaagctgaaccaatatggccaacattttgatttactgatcaatgcgacggccaagcattttgaaatcagaattgatcaagtcggttttcaactggattgcaaatatggaattccgaaagatttctcaaaagatgaacgcttcatatacccaccatgggcagtggataaaattcaagtaaaattggaggtgctatgacgttacgcaaaaaccatcaaaaaatatatatattgctaacaacgtagtgcaaaaagcaactcaatttttaattcttaatatcattcaatggccctaagtgtttctattatcatgcaaaatttcaaaaaatttgttaaatttgaagaaagttatgaccaaaaatgttcaaaaaaaaaacttggttttttgggtttctcaggtcataactttttttaaacttaatgaatttttttgtttgcagcatatttgaaaacacttactatcgaaagataccaaggtttaagaatttggttcattttgggggaagttatgaataattttctgtcaaaaattttcattttgatggttttttgtagcgttgcacgggaccaagactggtactgaaaaaaaggtacacatgagtacccaagtcccggttttgactgggaccgggactagtcccgggttttttccggttttgcgagccaaaaaggcccggtttttcaacccgaaaagtcccggtaccggtttttttttacaattaccgctctactctagttttttgagtaacgacccggcaccatcgattgtttcataaattaattctggcataggttacccgggcgaggaaagttggcaaccatcggaaaatatttattcgcaagaattggtggctgattttattgagtattctacggtaatgtgcgctgtacatgcattgtccggcaaagaatcagtgcccgagcatattgcagaagaactgcgcgaaaatgagaaattcaagaaatgtatgaaaataattaaaaattaaaaaataaa

SEQ ID NO: 80628 - DNA, 1069 bp, Heterodera glycines
atgaaatttacatcctattctgttgaggtaagtaaacaggctattataataaccaggcggcaggtcgtccatattttcaatgtaaaaattttcaaaaaaattaatactctttcttttttgctcaccaatttttaaaacaaatcattcaatttaataattaatttgaagaaaaaataaataaaatttctcaaaaaaaaaaaaatttcggcagcgaatcttttgtaatttccaaaataatagacaatttcgcgaaaattattgaattgcaaaaattttatcagaaacggtaccggtttttacagtacagaatcagtaccggttaaagtgaaaataaccaagtcgtgtgctacaactaaatgaaacaaaattgtgaaaactattttttattacaagtttatgtgatatttattttatttattttttaaaatagtttattttatttttagaaggcagaaccacctgaaactttcaatttatatttaactcgactgacggacattaaaatcattgcgcaggaaggctaccaatttagtgttacttttaatgagaacaaaaaaacatattcattgcctacaattgtgccaatttgggccgtcaattttattcgggtaaatgcaaaaaataaataaatgaaaaaattgaaaaatatgccaattttttacaggtaaagggtgagcacatcaggttgctggaccggccatatttaccaccgaaaacagaaaagcaggtaatttttcaaatttttgccagaaaaaatttgaaaaacccaaatgaaaattcacttttttcaaattttaaagccaattccattacatatgtttaataaaatccacaagtttttttttcatattcattattgcagtctgtaaaggaattataaagcctcaatttttttttcttcatttatcatagtggactttttgatcagcacaaaaagttatgcttacatgaatttttccagatttttatgatgtctttgaaaaaagttttttgtgttttatgaagtagcctgataatttctttacagcaaatttgggcaaaattttggaattaaattcataaaaataaa

SEQ ID NO: 80629 - DNA, 429 bp, Heterodera glycines
ctgtttcccgaccaaatcaggcccgcaaattgagtacgtgtctgtacaacgaattgttgccgccggggaacaacgcatggcggcacaagcaagcggctttgagcgcgcaatgggcccagcaaataaaccggtggttcaggtgggaaacatcgaaattttagttatttttattttttattttattctgattattaaaaataaaaaattgccataataaaagaaactgtttcgtaactttatttattttttttgtagatatttttattagaaattatgttaataaaattaattgtattttaaagtcttatttttttgaattttgtcagcaattttattattgaaagtaaagaaatttaataaaaagttttttttaatagttaaaatatatttttttaaattattaaattattttaagaataattaaataaa

SEQ ID NO: 80630 - DNA, 658 bp, Heterodera glycines
aaatgtgctacaaaaatgttttattatttattgtaactacagtagcaatttttgagacgtcatttggagctgaaaacaatgcaacacaaccacaaaaaaagcaggttgagtttaaattaaaaatcgaaataaataatttttaaaaataattttataaaattaactaaaaaataatacatgactgcgattatatgaaaaaattgcagaaattggttaagattttacattttatacaatgtctccttaactttccaaaaaaaaaagtttacgtcattgactctctccacttatggccgcctaaaaaagctaaattaattggataattaattaattacctttggtcaataattgattcgaatttttaatttaattaataattttttcaatttttaattattattgttttttatttgattattaattggttattattaataaatttacacagaatttcactttttctattttaataattaaataaaaaataattaaggaattgacttttgaaaagacgatggaggaaatgatcatctcggcaaaaacgggcaaatttgtgcggcaatgttcttgcgatgaacaggagccatgtctgaaggacattttgacggattttcaagcctgtttcgagacatgctgggaacagaaaaactcgggaaaa

SEQ ID NO: 80631 - DNA, 110 bp, Heterodera glycines
atgcacttcgatgatccgttagtgggccgactggtccatggattcaattgggagttggcttggccttgtccggtcggatccatgttcttccgtccggtctctgctggccg

SEQ ID NO: 80632 - DNA, 137 bp, Heterodera glycines
gcggcctaacaagctaaaaaacgggcgcgaagcgccgtatgagttcaacgaatttaaaaaacgggcgcgaagcgcccgtccaaggccaacaaaaattgaaaaaccggcgcgaagcgcccgactgaggccgcgaagcg

SEQ ID NO: 80633 - DNA, 2076 bp, Heterodera glycines
atgctccaattccgcgaccatatcacaatcaatgggaccataaccaaaaatcgtcctcaaattatcattctgttgctcaacgaggcattggaatcgtacaactccggtacggtagtaaaattcgtagagaacggggggggtggtgtactgatgatacgaatagcggcactttcacgaaagaaagtgtctgccgatggcactttcattcgccgttctttttgctttcccccccccccccccctcgagagcggtatttatttgtaactttttaaaatagctatttttctataattttagtagtttactatttatgtgccatctcattttagtggcgcccagcgttatttaccatttgctgaatggcacttcaaatatgggtgagagatacatttttaatttgcttttaactttactcgaccatcaattttagtgggcaccatcgtcgtccgtgccattttcaccaccgatttggacggcaacgtcgctattcatttttcttatgtaaatttgaagggtgccggatcgttacttcaaaaaacatcaaaataagaatttttgaccaaaaattattcaaaactttgcccaaaatgaatcatcaaatataaaaaatttggttgcttttgtgcaaatttagatgaaaaattattttattttgatggtttttgagtaaccttatagcaccatttgaagaacaattcatttcaaccttataaattagtcaattaacaaatttttaaagaatgaagaagtcgaagagcatcatttgaaatcggcgctgaccgaaggacaaaatttccatctgaaaatcataatgcgaagacggcccatgttccatttggagggcttcggcaaattcatgttcggcatcgaaacaatgccaatgtgggcaatccaatacattcgggtggatgaaaatttgaaattttcgaaaaaaattgaaaataatttaagatcgaaggcgatttgaaactgcacgaacagccacgcattgaattcttcgaaaagaaaggacatcacaaatgaacagagagagaatggaatgattgggcatagacggcacttttatatatgcgcaccatttttgattaaactttttcattcgattttttgaaattttcaaggaaatttttagaaataattggcaaaactgcaagatatttgtataaaacagggctcggatcttaccaactcactttccaagtgcataacgggggaaatgtgtgaaatccaagtacatataaaattttatcaacatgcaattaaaaaacaagtccagacatttgcgcctatgtccaaaatcgggttaaaacttacattttttcaatcttatatgtctttaaacagcgttaaatttaagaaaacttattttgttggtttattagggtcaaaaattattttgcttaaaagatttattattttttcaaaatttgctaatgatcaaattattgcacacaatcactttcgatcgcttatttaaagctgtttacatctgggattgaaaaaatgtaagtttaaaccgcttttggacatggcgcaaatgttgggtaaccttaacaacggtgatttttttttacacaaatggtttatattgttccgcggaaagaattttttgcaaaattttttttatttccttcagatagagaaggagaagctcccccgagaggaaggaagattaatggatcaattgaggcgacaattgatcggatatgatcgagcaaattgaaaccgaccaaaatttttacctcaaaagtttccccagctcgtccattttttattttcatatgtaaaaataccggtttccaggtacaatttggaaataagtacagttaacatttcccaaccatgtcgaatccgagataattttctctgctaattatttgaaaaaatgtcaaatatttgtaaaaaaatatgtaagtgtcaaaattaattttaagggctaaaatttaaaaaaagggtttttagggtcaaacatctaaaatagaattccaggggccgaatagagacttgaaaaagaaacattttcgctgctacaataatggttttcctggttttctctttggctaaagaacagggaaa

SEQ ID NO: 80634 - DNA, 622 bp, Heterodera glycines
atggtggcagtttttaagaaacgacccagcacgtatttaaggcatgttcttgacgtcgtcgtccccgccgggcacgggcatcggcattctgttcctgacggcacttctctgccactgctgctgctgcccgtccatgtttgtttggtcgctgtgctaacagtgccgttcggccacctgttggtccgatggcttggcaaaatgcttctgcgcccaaaactatcgtcgcttttgttgctcacaatcagcagcggcagtggcggtggcacaaaacatttgacaaaaaatacgacgccggcgacggccgcgacgaggacaaataagccgaaattgctgggcatcactaagtcaggagcagaggacgataattggggcaaagtgacgcaatcggaccccaaagacaaccgattaaaggtctcaacaattagtgccattctttgctttatattaccggatttgcgggacgaaaaaaatattttcgaaagggtttttttcaaaatttcagaccagcgagaaaaagctggaattgttttctggtttgtgctaaaaaatggcacatattttttgcaccattttggaatttaaaatctttcaaaaccagttttctcgacggaggcgctcaaga

SEQ ID NO: 80635 - DNA, 1750 bp, Heterodera glycines
atgaaatcattggtgaaaatgtcaccattggcctgttttgaatacaatgggcatagttttaccttttttgaagacagcgaatctggtgagactactatcttccgtggtcaccagcataagattgtgcaacgactgtccaaacatggacgggttgtgtttgatcacctatcgggtcgattgtttctgatcgataagtatcagaggcggatcagcgaaatagagcttgaatacctggagcattggtggcttcgaaaaaaccaatcttccgcacatacgatcttgaagagcaactttgtcgcttttcttccaccagataaaagcgactttactttggtggacaaccatgtgtttgtgatcagagaccagcgcatctataaatttcacattggcgagtatgcaaaagggaatcgtgcgctaacttttgtaaccaattcaaatgatgtccgctttaattatctaatttataaacccaaagaccaaaatgttagccgcggtgtttttgcccatctacgcatgtcggacgcctggatgccgatatcgtacctgttcaatctgttcctaattgtactgtgcacatacatacttaaacagctacggcgagtaaaccaaaagagtccgcttaacgtgtccgatagcgccgattattacagcagcccgttcattgacgacgcttattcgtcccaacatcaacaattgctgaacataccgtatgaaactgcaacatcgagtgatcaaagtggtggagcccgtagtcggagtatttaaagaacgattttttgttgtttggattcagttggccatttgtttcctaaattttaagaaaagctattgtcattttacataattgtcacaatatatttacctgcttattgcatgcaaagggcaatccgttatctgatcgacagttacgggctgagcagtgtagacgatctgtacacctgcttgaaagaagaaattaaaagtgggcctgaaggtgggaattgtctctatcccaacccgctttgtgctgtggactgtgtacacgttgcaaacgccgatcatccgaaccaacctgtgcatattgacggctcgcttgaattgattgctgacgttgagctgtactcaacatgttatccgaagaggaagttcgagggaatagtatggtaagttttctaaaaataaaaacattaatatttccatttgcatttttaaggagcgaacctctgtatgtggagctgaaggacctgaagatttgtccgggcgactcgccgctgtgtctttcacgcctttgcgaactagcgcgcagcagcagcaacaacaacaacaacaacaacatggacctgatcgtggacgagttggatttggtcaactattggagcgacgacgaacgcgaaaacgagactgcaacttggtgagagtgctgtgccgattcaataactgtggtccctatcgactgaccaagcaactacagaaacgacgaactgagaaccttgcctatctgagccaattggacattgagactgtccaccttaggagaaatattaaaattatccctgatgccttgtgtcccaacggtgcaaatcaggtgtttgcataccgtggattcctaggaatcacggttcagcaacacctttacactcgccatcgtgtcatgttaaagtacccaagccttccttgtgttgttcagtttggtggtggtcaccaccgcgatatttttcccattgaattattacgtgtcgcaagtgccgaaatccaaagcgaaagaggataa

SEQ ID NO: 80636 - DNA, 906 bp, Heterodera glycines
atggttatggtgccagagagtgagtatttggccctcattaatctactgaaaggaaacagcgccgtatctcctcctctaggcgacccgttacagggcgagaaaacgctgcttgatgtacagattcaaaagaatttggttgatccaaaaacgaacgcagaaataaaaatgaagcgtcactcatggttgtacaaacgtagacaccaactaaaagatattattgagaacaaacctcaaaaagtaattgttgagagtggctcagttacagcaccaaacgttgcgccgtatatgggcattcagaaacaacaaacaccgtcgcatgtgagcacaccacaccgcaactcggcttcaattcaatcaattggtgcagtaagtaagagcaacactgatgtagaagaggacacggacttttcaactgcttctgatcagtttgagcctgctgctgatgctgctactacttcgtcaaagaaaacgccgcatcaaaagacgccaacggtttctttaaggaccagcccgaaaaatttcccaaaaatgatgggcattatcgggaaggatcacaaaaaattcggtgtcaacgcaagcagcggagaaattttgactaatttcaataaacccgtttcaggctctcatttcaccgaatcgttaaagcatttgacaggtcagcgcgaagatgtgcccagaggacatcgcttcttcattcaacgcatctcaaaagacccggaaatgatgaaactgcttcaaaaaataccacaaacgggggaaggccggcggcgtagcacagtgaagaaaatgggaaagaaaaaattagtgcttgtcaatatgatgaattcatcgtctataaaaaccgcaggattacaccgaacggaaccaaaacgcaaatttaaacctgaattatgggcaagactatag

SEQ ID NO: 80637 - DNA, 722 bp, Heterodera glycines
atgctaatcgcaccgcctcctgtaaaaatactctattgttattccgagatgaacgattctgtgatcgggttaatgaaacaaggaattgagacatataatggggtaccgacccaaacgttggttcaaagtatgcccaaacccttacttttaatcctggacgacctgatgttgagtgtaaataacgattttttggatttattgttcacccgaggctcccataactgggatgtaagtgttatttttgtaacacaaagtctctacggacgcaatattcgtaccgcaagagccaacagccattatttggttttaacccggaatccttctggtcaacttcaggtcagaacggtgggctctcaattgtttccgaagaggctaaactattttatggaggcatacaacgatgcaaccagcgaaccattcagctatttggttataaatatgcatcctaatgcgcccgagtctgaacgtttaacaactaaaatcttcccggatgaacagcgtgaggtgtacctaccaattgaataaagaaagggtataaaaggttgagaaaatctgtaattttcactacaaatgtatgaattcagtccatatataagtgaaaacgcagaattttttaaaaaaatcgcctccacgaaatcggaaaaaaagaaaaacatccttctgcgagacgcaacagccgaacaaatattaggacttgttgaaatttgtgcaaacatattaaa

SEQ ID NO: 80638 - DNA, 845 bp, Heterodera glycines
atgatggatggacttttgaaagtaaaagtgatcccaccgaaaattcttttgtaccccctcctccccctgcacatcgatgacatgctcctcttccccaattgttgggcttgtgcaaaaagggccaagaatgagtttgtgatgacaaaagatgtaaagaaatgtaaccatcgtccagcgcagagagcatttttggggacattcacctcaattgagttgcggaaggctttagagctaggatatagaattgtgggattctatcgagcgtatcactttgaacaatttgacagtcaactgtttaaaggatatgtgcgtatgtttttgaagataaaggttgaggcatcggggtggccggcggaggtgaagagtgaggaggaaaagagagcattcctcaagatgtataaggcaaaatatgacattaatttggattacgataaaattggactcaatcccgggttaagaatgattgcgaaattggtgagaaattattttaaaaaatcgaaaaattgtttaatttaagggattaaacagtttgtggggcaaattttcaatgcgcaataccctttcaaatacggaaattgtgggcagcatggaacgctggatggaattgggaagagataatacaattgaatttgggcgcccagtaaaaataagcgaagaaatatcacgggtggtgtaccggaaaaaggaggagttcatcagggagcataaagtttcaaatattgttttgtcattgtggaccactagcgcagcaaggataaaactgtacgagtacatggagcaggtctacagggaggaagggtctaagctgctgtattgcgatacaggtgggcaggaataaaaagaaa

SEQ ID NO: 80639 - DNA, 548 bp, Heterodera glycines
atgactcgagagtatgcggacagcgaaattttggagtttgtgtccgcgggcccgaaacagtacgccttgaaacttagaagaaagaaggatggtgtgatttggcacaaaaccaaaatcagagggatgacattggatagacgaaacgaatttaaatatgaattgttcaaagagatggtgctggactacaaagaaggggtaaagaaagtttttcactacccggagaagatcgggccaacaaacgacttccgggttctctcaaaaaatgtgcaaaaagaatatacgccggtgcagaaaaaaggaattattgacgatcactttaatgttttaccctttggatattattgataattttttggataattttgtccatgtttataacatttaatattttaaattaatcaaatttgtttccttttttagaatgtcaaagaaaaatttccaagaaacttcaaaagaaatccgccgctcgaaaaatacaaaaaattatttcaaaaacagttttaatttagaaaaaagtttcgaagaagtggagagtcacataaaggaaa

SEQ ID NO: 80640 - DNA, 452 bp, Heterodera glycines
atgcaaacaatcgctggaattaaaaatttcgagattgttgatggtgtaagagtttttgttgtgagagcgagaattgagaatgtgacggaggcggagtacagggtttgtaataaaaatgaaagaaaatttcagtttgtttaggcatgcactttatgcgtaaaggggcttgttcttgcggggctgagaaaaagatgacatcttatttgaaggtgtctgtggcagatgatacagggcttttggaaaatgtgggatttttcggtgtgcgtgggaaacagaatgggatggtaacgcaacgcttttttaaaaatccatatacattaaatttaggatgaggtcaaaagtttggcaggcgccgtgtgcactatgaaagtcggggcgagggtgaaagaattcggagggaagaagggaatttattactctttgattgatattgttagcctttaaatctataa

SEQ ID NO: 80641 - DNA, 687 bp, Heterodera glycines
atgcaaacaatcgctggaattaaaaatttcgagattgttgatggtggaagagtttttgttgtgagagcgagaattgagaatgtgatgcaggcggagtacagggtttgtaataaaaatgaaagaaaatttcagtttgtttaggcatgcactttatgccgtaaaggggcttgttcttgcggggctgagaaaaagatgacaccttatttgaaggtgtctgtggcagatgatactgggattctggaaaatgtggcattttttggtgtgcgtgggaagcagaacgggatggtaccccaatgttttttaaaaaattcgtatacaatataatttaggatgaggtgaaaagtttgtcgggggctgtgtgcactatgaaaatcggggcgagggtgaaagaattcggagggaagaaggggatttattactctttgattgatattgtcagcctttaaatctataaataaacttgttaattttttcaaataaaaatgttttacttaaaattatttctagtttggttcttgttggtcggaacggaaagttgttgcctttcaaaagaagaaaaagagcaatttaccagtgcccgaagaactgtagaaggcgtatttagagatataattagattagataacgaagcaaaagaattttctttttctgcacataataccatgggtgaagcccaaaatattaaaa

SEQ ID NO: 80642 - DNA, 485 bp, Heterodera glycines
  unsure (1)..(485): unsure at all n locations
atgaattttcataaatcggaaaaagctaatgccattttattggaggcagctaaaagagagacggagagagcatggaaggatgttgttgcactagaggaagaggttagcgattttgccaaatcttctcgggaaactcttaatcgtgcgataaaatcccgagagaaagccccatacgctaatggtgttcgggagttttacataaaaatatccgactcaatctgggaaattttcacaatcttggacaaaattaatgtagagtcagaaaaggcagaagctgtatggagggaattggaaaaatgcaaagacttcgaactggcaactaaatttgaggaaaaatcaataaacgcattaaccgaagcccataggttgcatttcgaatcccgaagagtgcataataaaataagagcgtatgaaagtagacttcaaaatattgtctgggaatttattggactaaggggggagatataaaaagaaatnttttttta

SEQ ID NO: 80643 - DNA, 542 bp, Heterodera glycines
atgcgcaggtcggaaaaggggagatcggcttttccatgccccagagaaaatggacgaaagtggaagttggccgagaagttcaggtcaaagcggaaacatttctcaaggcaaaccaatgaatggcatttgctaattttagattcagccgttttcgttcacttctgatcaacggattatcacttcaatttcactaattgtcgatttccaaaagaagccgtaaagcccaggggaggcgaattaattagtccaatttgtctttttctttcaggtcaaacccatctgaaccattggacacaaatgcaatggcccagaaatttttaatgcaattcgccaacacgttatttaccgtcaaccaggaatttcccatggaatatgtgcagcagaagcggggcaccggaagaagaaaattgcctccgggaaaagtaaatctgatggacagcataaggatggcgactacgtacacactgaaattggtggtggaacggatggaaggcgccgtcaatctgaacacggcaccggaggaggttctgatattcaattaa

SEQ ID NO: 80644 - DNA, 1104 bp, Heterodera glycines
atgacatatttgttgtcgatttgtccacagcaattcatcgagacgcatggaacggccagaaatactgtaagaagcgctacaaacgacacgaaatgcatcttcccctttagcaattatttaaaattaaaattgtaattagagaaaattttatattttttatcaaggcatatccggctaatttatagtgagtgaatttggtgtttttaaaaacaaataaacaacaaaatcgcatccgttgtaatattaattaaatttgaatatgtttctacataaaattaaatgtttagatgttttttacatttatattccctataaaatgcatacagctgaaagaaattggaatcgaaaatataaaatgtcggtgttgcttctattgatgcaaggtcgaatctaaaaataccaatggggcgaacctaaaaaagcagcactaatattaataaatttaaatgtaattgttgtttgatatgtaagcaatttttatggaaaaataaaacattattcggtccacattaaaacgtaatacttaatatttttgaattttttgaagagcaacataatttaaagtttttttatatatttcgatagtccaaaattttatattatctttttaatttgcaaaaaaataggtaggatttaagttcttgaatatcaattttttgtagatcattttgtgaatttttcttaaatataaagaggaccacttgagctaccacttgccactagagctgagcgagaccgggatggtactgaaaaaaacgtacaaatgagtacctaagtcccggttttgcccaaaattcccgatcccgctcagctctacttgccaccaatcttaattattatgatttattatcctacaaatatttaaatatattattatttttattattattgaattttaggtccgtcatgcagatttgaattgattgacaataagataacaatataattgagatattacacataaattttcattcatcccaattcatagcatttattatttctaaagagggacccatttttaggcagatgccttttttgcatatttcgccttttttggtgcctatttttacgactttcagaaaattctttacaaaatacaataaa

SEQ ID NO: 80645 - DNA, 773 bp, Heterodera glycines
atgaaatgcactgcgtcttttagaaaaagcaaagaaaatgagctcaaatctgtcgtgggatattgcgaagaacactgcgattccgaaagtgcattcatttgccctttcaattttatgaaaaatgagacgaagcaaaggccgaccgatggggacgacccatcggtgtttcgaattctgtcaacagtcagcgcaattggaagggtcaaactgtccgaattgcctttgctgtgttcgtcacaggtaatttcatttataacggctagacattacgtcttttttattttctattttatttttttcgcaagtatttatttaaaaaataatttggatcgaaaattccatttataggcacaaaattcgtcaaaaagtgttgccgactatcaaaagcttacccgacaattgattctgtcagggcttctcagaatgtgtcttcagttcaattctttcatgaaatgcaccgctttcgtttcgttgtctttcaaagggtaccaacagatggaagtgacgaaacaaatcgaattggccgaatttgagaaaagagcattggaaatgaatttggcagctcacaatctgtcggacttacaatttcaattaacggaagaaagcgcagcatttgacgaattggaaagtgacgaattgtaaggagaccttagtgggacgaaagcggggtaaacgaaaattttcagcaattattttttgcctcaaaaatttagaatggggtcttggcccccctaggaccgtatccccctccaattagaaaaaaatataataaa

SEQ ID NO: 80646 - DNA, 750 bp, Heterodera glycines
atgcccgaaccattcccaatgtccgacaaaaggccatggactgtttgcttgaagttcgacttggacttgggaataacacggtaattgaggtttggcctgtagagatcagatttgaacctaaaggttgttaagaaaaaataagttaatatttactcataatcaaattaagttggcgagaatttataggaatttttagacattttacaaatgtaatgcaatttgctaaccaaccaaagagcactttcacagtccatgcccaaatattggaatgcttttcggcaatcgccttcagaggtggacgcagttaaagccattatcggcactttcttctcggcattttccctgaatttcttcatgaggtcgcccagctgaaggaagtcgggacggaaagaattgccccattgggtgacacaatgcgcttcatcgaccacaaaacgagccaataaattcatgcgatgcaaatacctcagatatttaaggaattgtcgattttttaccgcctaaaattggttacttgatgagttaaatcaaataatgcacatttaattaccctttcgggggtaacataaagcaatttgaaggtgggaattcgattaatgtatacatctcttgccattcgttcggcatcaaaaacagcgcacggaattgttgtctttccattgaaaaagataagtattaaatttcgatcaataaaaatgtcaatattacagtgccattcctcaatttcatcgtttggtcccgaataagtga

SEQ ID NO: 80647 - DNA, 1135 bp, Heterodera glycines
gacagaggtgtaactgtggtgatttcgccattaatttcacttattcgggaccaaacgatgaaattgaggaatggcactgtaatattgacatttttattgatcgaaatttaatacttatctttttcaatggaaagacaacaattccgtgcgctgtttttgatgccgaacgaatggcaagagatgtatacattaatcgaattcccaccttcaaattgctttatgttacccccgaaagggtaattaaatgtgcattatttgatttaactcatcaagtaaccaattttaggcggtaaaaaatcgacaattccttaaatatctgaggtatttgcatcgcatgaatttattggctcgttttgtggtcgatgaagcgcattgtgtcacccaatggggcaattctttccgtcccgacttccttcagctgggcgacctcatgaagaaattcagggaaaatgccgagaagaaagtgccgataatggctttaactgcgtccacctctgaaggcgattgccgaaaagcattccaatatttgggcatggactgtgaaagtgctctttggttggttagcaaattgcattacatttgtaaaatgtctaaaaattcctataaattctcgccaacttaatttgattatgagtaaatattaacttattttttcttaacaacctttaggttcaaatctgatctctacaggccaaacctcaattaccgtgttattcccaagtccaagtcgaacttcaagcaaacagtccatggccttttgtcggacattgggaatggttcgggcattgtctattgtcttacggagtgggcttttcctttttgttcataaaaatcacatgtgtttaagaaatgaatgtaaagcgaccgctgctctgctcggaaacattgcgaaaccgtatttttccggtttatccgagagactcaaaagactttaccaagacaagtggatggatgggcgccttcgtgtgctctgtgccacttccggtaaattctacatttttccagagaaattttcgggggacggggggaaattccctcaatattctaattttgtaaatgtttttagcgtttggaatgggcattgacaaaagggacgttcgtttcgtcattcaccgctcaatgccgcgatcattga

SEQ ID NO: 80648 - DNA, 931 bp, Heterodera glycines
atgccattgacagtagaggaagaggacgccaaattggcactgacagcggacgatttgcgagtgcaaatgaccgatggaatggttggatgtatcggccgaattagcatggacggaacggagttgccgaagacgggccaaggcttcagaatgttcaacgcagccattggatgtgaagagaggacattgggaccatgcttaaggtggacaaatggccgaaagggaaaaaagacggacaaattccaaaattatgatgaaaaataaacacaattagttaattagctaattaattagtgctccctgccaaaacggtggtcaatgcgttccctctgtttcgtcccccgccatcggtgacttttccccctccaaaaatggttcctcgccgttgttcacttgccattgtcctcaacgcttcaccggttcccgttgtgaaattgatttgaatgcatgtgcgtcaaagccgtgtcccggtggaattccatgtcacaatttgtacggcgatttccattgttcgtgccctcccggactcaccggaaaagttggacattttgaataaccaaattagcagagtataattattaaagacatgccaacttcgtggcgattgggacccttgtgtgacggcgtcgtgcggaccaaacggcaaatgcgtgcggcagccgcaaaggaattctttcgtttgccaatggtacgcctccctttcctcattttgaccattttcaatttcagtgccaatggatttagcgggggtttgtgcacggacattgtgccaacggaattggcatcggaagagagggaagcgggggagggcgacgtatcccccggagggtcggacttcccttgggcggcgatcaccgcgccccaattggcccttttggtggccatttgcctgctgactttgttttgcacggcatttatggtgaattattcgaaa

SEQ ID NO: 80649 - DNA, 872 bp, Heterodera glycines
atgccaattggcgagcgaaaaaacaccgcagaggaagacaaaatgaaaggggtcgaattggcaaaggtatttgtacacagcacaagccaaataatgatgccaatttgaccacagactccgccattgccgccgcctcgcgattcgtccgaaagacaaaacggggaacaaaatcagcaaaacggacagaaacaaaatgaaagttatcgacgaaaggtaaatgaatgggagagagggggagggagggggagagagacaacgggagagaggggagagagagagagaaaaggaagaggggagagagagagagaaaaggaagaggggagagagagaaagagaagatttataaagccatttcaattttcagattgatcgcgcatgttcagcagccgcagatacacaaaagcaaaaagcgacttcatcaaagaaagggacagcgaataaaacgacgcgggacgacgggagaagcgacggaaagggaaaggacgagggaaagtcgacggactatttgaccatgaagccggtgcacagggcgaagccgttcagactgatcccaaaagcgagcagaggaggaggaggaggtgatggacacgacgcccccggggcaaagcaccgccccttttttaaaattcaaaaattgttttatttttacagaaaatccgccacctccgccaatgcaccgaacgccgttgctgaacatgcgagggagaagaagcaatggaacaaatatggagcattatgacagcccatcagacgcattggattatgcggacggatatgaggaaaacaatgacggggagcaagacaatggaagaggagaagagagaagaggaggaggggaggaggaggagaaagagaaaacatccaaaagataa

SEQ ID NO: 80650 - DNA, 676 bp, Heterodera glycines
  unsure (1)..(676): unsure at all n locations
atgggcttttttaattttctccttgtcattattgttctttcaaatgtttgtatttgtaaaggcaaaaataatgtggaattcatgttattgccctcattggtcggcgacttcaaataccgggtttgtattcagcaaatttgattaattttaattaggaatggagtttaattatgtttgtcctttttcgccatttttgccattattaaataattttttctggatttttcatcactcaaatttaaaatcctaaaaagtaaaaataaatgttaaaattaacgacataaatctacttaaatttacttttattctattcgcattttttttaggtttcagtacaatttgacaatgaaaaatttgtggtgaactatggaaacaaacagccgaaaacgaaatctgaattagtccaactttatttcggaacggaagcgcttaaagctgaaatttacacttttcatatagaaatggttgatacaaaacatattgttgggttttccatctgggtaagagccaaagtttaagtgaaaagaggaaagaggaaaaatcaaatgaattttttaatattttacgaattaaatcgaatttacagccaaataattattcaaaacaattaattgctgacgaaatcaccaagaaaccattncgttatttttgggaattatttncaagtggaaattga

SEQ ID NO: 80651 - DNA, 1903 bp, Heterodera glycines
tttggtgggcctggccttctccaagaagggattagtgtcaccaatggcggaacacatcgaatttattttccaaattatttttatttgaatatttcaccaaaaatatcggcaaaaactgacaaattttattgggtggaagtaaattgtcatgacgccagcagagaagcagagaaatacagcacatacacgcagaaaagtgcgttaattgtcttaaattgtgcacaaaattgtgcggaatatgaaattttggtgcggaaattggacaaaaaatgtctgacaaatgccatgaaaaaggtaaaaggtttattaaaccattttgtaatcactcatcaatttagtaaagtgattaggaagttttttgtttaatttgagaaatttggtcattgactttcatttaatttagaaattaaatctgtacaatgaaaaagcgaaaaaaggacaaatcgcagtcaaaattttaaacggcgaagaatatgagttcgtttttcagcaggcttctccgtttttgaagcgagtttctgacaatagtaataatcagaggaacacgaataaacagcaggtgaatgatgaaaataattaacaaaataaaataaaaaataataataattcagaaattggacattaaaatttatgagaaaccgataaataatacggaggaaataaatgaacaacagcaggaggtggggagaacaaagcgattattgacgatttgccaatttacagaaaattgagccaattttgaccattcttccaaatgaatctggggaaaaagacgagaaagtttgaaataattaaatctataattaatttattgaaatttatatttaattaattgtaaatccacatttgaagcgatttgaggagatttccgcaaaagtccacgctgttctaaatgatttttcagaaataaaaaaggaaaatgcaacagtaaaacatttttgatttttaatttattacctatatatgttttagaaatttgtgcaagtgtttacttttatgaaaaatgaaatgtcaaatatgagaaaacaggacgaaaaagtaaaaggggaaggaaaactaagcaaagaaaagaccaggacggattagcaattagcagctgattagtgataactgataagggggaccaattgggcaatccgtcgtggaatttttgatgaaaattttattttattatttttttgtctgccgtttctaaaggtgaaaaaattaaattttaaaattacagaaatttgaagaaattattaagaaaatgaaagaacttcaaaagcaaatagaagaatcgacgacaaataaaaatgaagcggaagtaataattccatttgttttgattgttttttgcgataattattttaaaagaaaaagaaaaaaacattttcagaattcttcgctttcgcaaattaccgctgcgaatgttagcaatgaaacggtggcaattgtcaaattggaatatgagaaagtaaaaagaaaaattgtaattatgaaaatgaataattattttatagaaattcgaactaatgtccgtggaaatgggccaacttaaggaacaaatcacttcgatgaaacaccaaattggccaaaacgagtcaaattttgtaaggacaattgaggaaatcaaaagatttatggaggaacaattcaaagacgaatgaaacaaatggaatgaattgaatgatggattgagtgattagtgaatgattagtgaatggtcggtcatttggggagggattgtttggcctttttggaattttttattgtttttttattaatgcatacgttgttatttttaaaagaacaggataaaattgatacgcgtacaaaaaacaaacaattattatttaggaattttcaaatttgaccccaaaataatcaacaaaaaaactggcaatttttgatgaattattta

SEQ ID NO: 80652 - DNA, 1450 bp, Heterodera glycines
atgtcatctctagccccgtttaacgagctgaacataataacgggcgatcgtcgtgtaattttgaatttattttaattaataaattcagcaaaatttattaaaggtgcgccaattgattgctaagattgagagagaacgggcaaagaatgaagcggtgagtacgtaatgaaaaaatgcctaataatcattaattttatctcaatttattaatatgccattccccatttcttagaattgtttaaaaaatgcgatcatgttctgcttcataatttgcgcgtttggcattggcttgactttgtttgaaatcgggagtcgagcgtttggcaccgcagcgtcggcattgagcttcgggctttccattggattgtgcattagcgattcgcttttcccacaatccgtgccatccattacggtaaagctttttaagaagggcgttggatttccgatgaaattttagaattttggggttgttctgcaattaatttctcctttgtcccgtcgttagatggaaaatgttatgaatttattccattaaatttttctttagaccataccgaaaaacttttgataggatttttggatccaatgacaatgattgttaaagaaaatagtgaaatccaaacatgcaatgagggacaatttaaaacccttttactgaacaataagctcataaaaataaaccaattaactggcaaatatacttttattggagaaccaactatttataaaatcgatcaaaaaatatggggtgaggaaaatttacctatttttcctttacaaattttcaaacaattaattttaacaaatttaacgaacaaacaaattgacatgctggaaatgcttcatgcattccgtactagccgaattattgacaatagaccaaatgaagaccgaaaaatttggaattcaaaccaatttcaagcatttacctttcaaaatttaattactgaaattgattggtggaaatatgtaattcgatcagtcgttttagtcattataattaattgggtctacaaaatttataaatggaaacaaaaaatcatgatcagaaaagaaattgaaaagaggaatagtcaaaactttcagcaacaaactggtgccattcaaattccactggccgctctgaaacaacgtttcgttgggggagtgtcggcgcccacgaccgacgcagccgagatgccagagaatgccgaaagaattaaatgccaaaaacagaagagacggaggaaataatttttgaacaaatttgcatttaattatttattaatttaaatttcattctccattttattattatcatccatatctttcatcctttgcctttgcgatcactttattcatttatggaaaagtcgttggagacaagaagaaaaagagcgatagggaatttcacagagtttaacaaaaagcggaaaatgtccgtgagcgaaaaaagggggaaagatgaaaa

SEQ ID NO: 80653 - DNA, 271 bp, Heterodera glycines
atttttttaatgagaaataagagttttggggcgcggcggtgccgataggcgccgccgggggaaaattggaaattttgatcatttataaacaggttttccctgaaaattagccaatttataggtaaaattttgaaaaattttatgggaatttaatccaattcttaggggtgtaaaagtcgcgtttcgcgccaaaaagcgaaatgcgaaacgccaaaaaatgcgaataatgcgaaaggcgaaatgcgaaaagcgaaacctaggcacatccctg

SEQ ID NO: 80654 - DNA, 1077 bp, Heterodera glycines
atgaacgtcactccaatgcccttcgaaacggaaagcgacggatttttcatccaagaacatgtttcggtatgaaggaaaagcatcggaaagtggaataatcgagcagagaaatatttagataaaaattttgcatatttccattaaaaaaactattcaagctaaaatatgaaagtcaaaaataagactaatctttggcctagacttcggcttacacataagctgagcttgttagttttagctagccttagtctttgcttagaccgtcctagctaagtcaactgaaggcccaagtaaaggcctctggactttggctaaagcataagctaggcttatgccgttagctcagaccgttttaggtccgttgtttagatctatggccactgatacattaatactaactgatgcgatttgtcaacattttccgctttttaggagtattccttccttggctatctcaacggtatgaaatcgcttacttctgttattttcttgctcttgtcgcttttggtcaatttgtcaacgctaattgcctatagaagaagcaaaaaagtgcaccaacaaaattctcaaaacggaagtgacgtcattgagaagaaattgctaatttacgcccttctcacttttgctggccacgcttttgtctcagtttttttggttaaacatattaaattcaaaatatttttaattttatatttttagattattatgggcaccggagttttctatgactatccatcgattgtctacacccaatatccgtggatcaacgacttgtgcactttggtgttgtccagttggatgttgttgttcaccagcagcattttccgccaccaatttgtcaaggacttttgtccaaaatgcatttggccaatgccaacaaacacttttcagacgccagtgacacatttaacacaacaaaatcaaaatgattgccgtttatttgaaaagccatgagcccaaccaatcgaagctgatggacgtacatcaaatagaaattgaggggaaaacatttccaaaacaaggacaaaacattaggaagcagttcagcaaattcggaattataaaacgaatgatgga

SEQ ID NO: 80655 - DNA, 151 bp, Heterodera glycines
atgtccaaggtctcgtgccaagacaacaacaactggttggccgccttttcgaagccgctatttacaacgggaagtgacgcgtacatgccgctgaaagacttcggattcaacccgaacagtttggaaacggatttgtgggcaaaacgccaaa

SEQ ID NO: 80656 - DNA, 368 bp, Heterodera glycines
atgcgacgattcgtcaactcagccaaatgtcaacgattcgtcaactcaatgattcgtcaactcgacgattcgtcaacccagccaaaatgtgacgattcgtcaactcagccaaatgtcaacgattcgtcaacccagccaaaatgtgacgattcgtcaactcagccaaatgtcaacgattcgtcaactcagccaaaatgcgacgattcgtcaactcatccaaaaatagttttaaaaagcagtttcaagagcttttaatggcgcttagcacaattatagcattcttttaggctaatttagaaacaagaacacataaaatcacgatccttccgatgaaatattcaatcaaaaacttgcataaacaaatttta

SEQ ID NO: 80657 - DNA, 2188 bp, Heterodera glycines
  unsure (1)..(2188): unsure at all n locations
atggaagtgccaaccgttggagaggaccacgaggacttggaagaggatgcggtgagatatatcgtattgaaaaaggaagaggggggggggggggagaatttccagatttcgtgatcagaaattagccgcgattcggggtgggatggggaccaaaaacgggatgattttctcgactcggacatcactcgcgatgctcggtctaccctgtttaaagtgccantacataaaatatgccatttcaaaacgaccattattggaaaattttattttttatattttctcgaaattaagactcgaatcagtgccctctacatgggcattgaccacttcctccatccccccccccccgcctcccgccttctctctttcttcctctccctttttcaaattcccttctttctcccatcctcttgctctccctcgattctctaaattaatattcggatttttaaattggatttgtgccgttcggtgactaccaaaggtggcattcccatgacccgaatgagaccgaacaatgtttcattgttcttaatcaacggcacggcagaaaagccgtccactcagaaggacaggtggcgatcactgatcgtcattcactctctcccaaaaaatgaaaatgcttccaaatgaattactttacgaaattgttcacagtcttccgtttgacatccgctgggccacctccgtccgtgtgtcggcttcctttgattattgggtcattaggcgccaatcaatttggctaatcattgagcataagcgtttaatgattttgaaaaaaaaggtctgagacattgactttttgctccatggcttatgcaaaatttgtaaaaaaaactccaataaacaccacgagaaaaaggcacacagattggcatactttttatttggacatttagctaatttatacaaaaattttcaaagtcgtgtgcccggcagtgccgaggcatttgttgttaagaaaatcggtataataattttttcaaattaaggtgggaatgctaattgttgagggccaaaatctgcgcaacctcgtccgccgattgagtccggacaaaatttcttccgttgtgcgtctgttgaccgcccatttcgctgttggacgtgacttcggattgcagttcgtcaacccgaacgcgttcacaccggcgcaactcgccatccgacaaatcaatgcgctcattaacaacattgaccacagtaacggaacagccgtggccaatgcgggtcattgtgagtaaaaacttaaaaattacattttatattaactgtaggatttgaattaaaattattaaataatcaaaatttcatttccattttggaagtttcattttttatattttggttttattccattttaggcctttttatttaaattcatgtttaacattatgtcataatagtatcttttttgatcaaaaattgttggattcgatggaatttgagttttgggaaattttgcatcaaatcttatcttgtttagtctcaaatccggcataaaattaatcaaaacttttttggggcactgtatcattttcatctttttcagtcttacacgagttggtgaatgcatttgagtgaagttcggtcgacggctgctgagcagtgatttggcttttgctttttcctctgttttatgacaggtcactgagtgccgcgagaattgccaatttttcttttcgggaaaaattacatgaattttggaattccattcccaagaattttgacatgacaaaatacctaaattcatttctttgtgcttggaaatattttttctaaaacggctaagccaaaaaacaaagttggcaaaagcacaaaaatttatccgctttttcaaagtcttctttcatcattttttcttctttgtccgattcttcggtcaaaatttgttggatttgttcacttaatcaaatttacatccatttggccgccattccatcactattatttgttgaatttccaaccttttgtcaaacgctgaacatttctaatgccttttccaattttctaatatttttctctgctgatcaaccactcttacagaattttgtcgaatttacaatcattgccaaattttctctcaaattatgccctccttttttcaaatgcttaatacatatgcatttttaaatcatcataaattcccgtttttgttgccattgcttttaattgtaatcctttgtttcaa

SEQ ID NO: 80658 - DNA, 1750 bp, Heterodera glycines
atgtgccgagccagacaaaatccgattccgattaaatcgccgattccgattatggccaaaaatccgattaattgcgattccgattacgattatccgattccgattatggcccaaaatccgattaattgcgattccgattacgattccgattcggcacatccctggtatgtatccatcgccagaattttactgatacaataatttgccaaaaataaagaagaaactatcgttaattattttaacgcttcgcctaatagtttcaccttccttcatcaataacaattaactcgaaaaataaaatgaatcaaaaattttttgtgaaataattatagcggccaaaagaatacatttttctacgggcggcgaactggtcgcaacgaaaaaccacgggcgaaccgtccgtgttcccgagatcaaccaagtggttgcccgtgtgttttcatgttcggcagggtgagcaccgcttttcccaaccccccccccccccaattagtgttcctaattgggcaattatagcatagtttacctcaaatttttcttagtttccaaccaatttttaataatttgtctcaatgtgtagcctaactacatggagacgggcattttattgtagtttttgtaaaaaatttgaattttttttatttgaaaatttaaacaaattagtttttggaatgaaaagattggaatgcgaaaatcaaagaattctaatgcatttcctaacaatcttttctgcaaaattattgtctcccgtccaaaatgtaaacatttttcgacggaaagggagaaaaacgtatcaattcgcattttttacgaattttgatgaaaattcactaaattaaatgatagcaaacgtcatattaaataattatttttccacatttttattttattttcagattatttacgccttcaagtcacaagtgggagatgagaattggaacaattttgtcgctcaaattccggaaccgttgaagcaaaggctgggcacacagtaccaattgtgatcattgacgagccccgctgcacgccactcacagacagaaccattctcaaaattcattccaaatttccggggacggacgaaattcggaatttaatcccccgccataccggaaattaaaatccggaaaacatgggcctttcgacctttctcgaaaacggagtcagtcaaaaagcacacaccaattttggtaacggaatgctaatttaaaattgtaattttggaaatgcaaaaccattaatggaataccgcaatttaacggctacaaaatatgagaaagttgacggaaaagtgccgaaactacttttggcaattattctagaaaggtatcccaaattcaaattcgtgcattgttggaatgggtcttggttttttcgtccgtctcccctccccagccacacacataccatcatcacactttgtgttaccgctttttttgttgttgctctgatcagcttggatcattttgcatccgttgtcgctcatcattttttatttcatttgtccattcttttcgttttcatttgtttttcgtctatttattatttttttattttattacatttttttgtttttgtcccttgtcccttgtcctttctcagacttttttttctgttcactcatttcacattttgtactttgtttttgttttatttgttctccgtttcctttttgttttgttgttgttaaatttggcgagcgacaaaattatttatgcaaaaaaaaagaaatcgcattggattcaataaa

SEQ ID NO: 80659 - DNA, 189 bp, Heterodera glycines
atgaaaagtaattaaaagtattcaaaaaattgaatgaacaaaaaacataaattattaaacaaatattaaagtttatttatcgagagtctcggacctcgagaaaagtctcgtgttttttcgatttcggtcttcaagactgagacttttttgcatccctaaagattggcttttagtgaaaaaaacaaaaaa

SEQ ID NO: 80660 - DNA, 3100 bp, Heterodera glycines
atgaacaatattatgagacagagggacgcagctattgagcttttacataattgtggaattgatattaacgaatatagctatggtgtggagcaattgccgaatgttcagaaatattgggtgggttaaatgaaaaaatgcaaaattaataaatttttcaggatgagatttaccccggaaagtaccgggttgtggcgtttgaaaaatctgcggatccgcggaaatcgatccgtgttttgtggaaggcccctatgggacgagagaaggtcgtaccgatatttttggagaatggtcactgggatggtctgaagaattacgtctgtttttttaatcgtgggagaaaattttgtattgattgtgagtgcttttttgacaaggatgtcaaacatactttcgattgccgggcgagatgttattattgcaatagagtggggggaatgccatgtgaaaaggagagtggagtgaagattgaatgcccaaagtgtcaccgttacttttacaattgggagtgttataattatcatcagggacatcagacttgcaaattatggaaacgttgtgtgatttgtgacaagacatatttatttaacacgaagaagggacatgaatgcggtgagacttattgccagctttgtagtgtgagccatgaccccaagcgggggtgttatattatgccgatcgaggagaaagaggaaaaagatgtctacagaattgtagtttgggtaagttctacaaataaaatcaacaataataagtctaactccaggattcggagacttcgcaggattctatttacaagggggaccagaaggagcatgttattaattatatttcggtgagagttacgtgtacggaatgctgtgatgacaaaaacaggacgaattgcaaaatttgtggggaggagaggatcaaggattggagcgaggcggagggacatgagccgaccaaggattttgtggagtggattttaactgcttttacgaattacgatacgtacatatttgcacataacgccggacgttttgacggtaatgaaaaaaattaatctaaatttttaaatcctaaatttttaggtcattttgtttttaattacctctgccgtaccgggaagaacccgctaccgctcatcaatggattgaaaatttatgaatttaaagtgcaaaactcgaagaaacattcaaagctgatttggagagactcatgtttattgatgccggtgaagcttgagtcgctgaaggcgacatttaatttggactgtgaggacaagccctttttcccatattattacaacaagaaagaaaattatggaatacgattggaacatctgccaccgatggaggactattcgccgggatctatgaacaaggataaatttataaaattcgaaaaatggtaagaaaagaaggacaaaattaacaataaataattttttcaggtacaacgaaaacaaggagacacctttttatttggatgatgaattgaaaaattattgccgaaacgacacggagattttattgctgtcaattattgagtttagaaggatattgattaacgacattacgaaaggatttgacccactaccgaggagttgtacgaatgcgggggttgcgatgaatatttttaaggcaatgtttttattgacggagcagttatcgattgtgccggagaagggatatgagcggtgtgatcgcgccagtgtgatggcaataaagtatttggagtggcggagccagcgggatggaattgagatacggcacgcggggaacggacgagaagttaaaattgggaattacaaattggatggatttattgggaatgaaggagctagggacaagtgcattgaagtgatgggatgttacatacatggatgtttgaattgttatgacccggcggcggaactgattggaggaaggacggcccaggaattgaacgatgagactcaggagagattagtggagctacggaagactttggatgtcgaagaagtttgggtatgtttatttgacatttgaatttataaattctactttttaggggtgtcaaattgagaaggaattgaaaaaggatgaggaaatgaggggcttcttcgacgacagaggaaatgagaaggggccgattgatccgaggatggcatatgcgggagggaggaccggaccgatgaaattgtttgcaaaatcggacgagaagaaaaaaattagcgtttacgatatcgtgagtctgtatccgtctgtgaattacggtacagatttcacgattggtttgtcggagattatcataaagaagatcgatgagatataacgcatagttgattatttcggtttgtaactttcttgaaatattagaattctcttgttttctcgtattattacattatttagactttgtgctttcgaatgataccaaaaagatagggtttgttcgagcatgaacaaagttattgtataaaaaccagggattgtcaattgattggacacataaaactcaattggactcataaagtgcactagagccataatttcttcactttaattttttttgtcccatccgtcgccaaatatttcatcaaaattcggtcggattttgccggagtcaattacaaaaataaataaaaatataataaataaaattaaatgccaccaattcatttttacatataatggaagtatttgtataaaaatattctttaatattgtaattttatttcatcaaatattactaaaaggttttcttattttgttggcattaatatacaaatcgataattcactgatttttaagaaataaaaaatatttaatttttatttataaaatatttttttttttttttgcttattttagccatcgtccattttttcctatttttcaaattacattatagtttcagaatttgccctctttatcgccgaagatctaaattctttattttttaaattcactcaaaagtcacaaacaaattttctcgagttttaaaaaatcaaccaacgctgatcgcccccccccaccccccggttcaccaatgcgaaagggaaaaatccaatttacgaacgaaaaaggcttacaacttttttgttttgtggatttttggattgataaaacataataaa

SEQ ID NO: 80661 - DNA, 74 bp, Heterodera glycines
atgtcttttaaacgcgtgaactccttccaacccaccgtcccattggccaaaaaatgggatttccgatcaatcgg

SEQ ID NO: 80662 - DNA, 698 bp, Heterodera glycines
atgtgtatattacggtatttgaacccccccccccctgaattagaaccctcctttcgagggggttgaaaaatagaacccgggcgggggggggagggggttcaaaatacggtaagtctaattttctaaaaaaaatctctaaaagtaggcgctatttttataattcaaaaattctaaacaaaagtggcagttaagaagagtcgttggggccaacggaaagacaaaatttaataataattaactttaatcacttcactaataatgtttttaactttttctaaaatttcttttccaaaatgtaaaagtgagtattcttattgttttttttttgggtcgccaaaataatttcttatttaagtcatccccgaggtttttgaggcaacggacagtttagtcatgagtctgtaactcgattagggaatgatagccgcataaaaattattagggattcgaacataacataccggagaggtcgaatgactttttattacgccaagaacactgtgaagtgataaaaagtagtatttttatggattggtaaagtaataaaacgataatttttaaaataatattttgacgacagttgaacggtaaaaatatagcttatactcatattccttcagaaactggggcacatttgaggaggaataccttaatggagaaattttcggaagaaaagaaaaacaaacggtttaaataaa

SEQ ID NO: 80663 - DNA, 312 bp, Heterodera glycines
atggtgtccctgtccgtgctcgtatccatcccgtttctgatctcggacgaggtgtgcccaggaagggaccgtgatcagctccgagtgcgtctgatcgccgccacttttgtcacctgtggcattggcacaattttgcagacggcgtttgggatgaggtcaaaaaaatttcgaaaatatttttttttaaatattaatttaattttgaaattaaattatcttctttaacttccaataaaaatgctttttttgaggttggctcttctccaaggcgtcgctttcgcttacattccatcggttggcgttaagccctaa

SEQ ID NO: 80664 - DNA, 1110 bp, Heterodera glycines
actaaaaatgcctcaaatttggcatttttccagataagtttggcatcgtttgctctgtctgtggctttctgttttgccctttatggccacccttttttgaatgccgctttcctttaccatttgtcgcgtgtggacatccgtcacaatttttcgccctattttttaccgctttatttggtgagggacagcccgtcgctcacccaactgatcggactgattgcctttgtgcctcaaattgtttgcatttgcgtttttgctttgtggtgagtaatttagaattgaaaatccttttgtgtcgcaatttggattaacaggccttaataatatgataaaaatcttattgttttgaatgtaagccgaataaattataaaatatttgcttatttccactcttgtttgttttaacttttgtaaaattgggacattaaaaacctatttaaaatcgaacaaatctcagaaattcatttgcttcgctattccaataaaatgattttagatacactggtttttggttgaacttttttttagcctaattaagaaacatttatttgtaaaattttgagtctgatttcttccaatttgttttattttccttgaaatttcttcaggtattctgacgatttgcccttctgttggttcctcacaacgttcgctttcgtctccttcaacaaagtgtccacctcgcaatactttgtgtggtatttgtgctttgtgccgcttctcttcactcgtctaaaggcaggccccgtagaaattaaattgctaattttgtttttattgccacatttctcctaattgagccccccccccccccccgattattggatcaaactctcccatttcctaaacaaattcttaaaacgtgtttctaaaatggcatcattttctcagttttcttggcaaatgtggctcaaactgttcgctctgtggctgtttggccaggcgttttggctgttgcccgcctatctgtatgaattccgtggttgggccaccctcaattgggtttggtttgcttcgctcacttttcttggcatcaacacatttctgatcatccaatttgtgcgcaattattcacccgaagaagagagaatggtggaagttgatcggcaa

SEQ ID NO: 80665 - DNA, 708 bp, Heterodera glycines
atgaaaaaggcccttcaattttaccgttcggctgataaggggcatcgttcattatcatgtatgaagtcgcattttcgatttatcaaaacagaatcagagctgaaaatgctccgaaggtaaattacaaaatttaattgaaaaaaaattaaaagttaagatttgaaacgaatttgaaaagtaaatagcaataattatggcgaacaaaaaatatattcacgattttttttctcaaaaaaattttgcaaaacaatacggttcccccctttggtttttgataaaactcaaaatttgtcaatttttaactagcgctaaattttcttttaaaatgtttttttcagtttattaaatagtatgcaatacgttctatgttaaaaaaacaaattctgcataaaaaaacaaaaaaaaaaaattgaccaaaaaaaacgtgcaaaaaacaaattcaaaaaggccctctttgcaaatagcgcccaaaattttcccctttacttcatattaaaaagtgaattttttgtttagtttcttggtctccgccaaaacttgttgacatcgttgaatgcgaaccttggccggttgaccacgcttaccgagttggagctgtacgataaccaactgactgaaattgccggcctcgaccagttggtcaaccttgtgatgttggacatgagttacaacagaataaccaaaattcaaggtgactttgcattttaa

SEQ ID NO: 80666 - DNA, 1559 bp, Heterodera glycines
atgggccagcaacgtgcggaggaggagggtcgccgactgcctccctttgaccatcattcggtgtgtcgtgcctatttgcttgggtgttgtcctcgcgatttgttgtccgatacgaggctggaatcgatgatgtcctgtcgaaagttgcatgaaccggctcacaagggcgagttcaaccgtgcacaggagaagaaggaccttttctatgacatcgaggttggtttttgattgacatattgaaaaagaaagacaaccttctcaaatgacacgaactctgaaatatagccaggtctgttccggtgtttccttacaattaactgatattttcgccaaattcgcgactgtcactgctgtaaagtccaaaatcttccggtaaaagacctggcaaattggactgtgttagacttaccttgagaggccttggttagtgacctcttaggtaccgcatactaaagacatttggttttaattggaaagagaaactgccacagaaattttcttaagttatcggactcaaaaaattgtcacccacccactcgaaatatgtatgtttgagcgaaatggtaagtcaaactttagacaagtgtcagacaactaaatgtttttgtagcaattttaattgaattgctaattctgtgctgatgtgaatgagggtatctcagtgggcaattccaatgttttcgtatgtcgattttccagcgaatctttttttagtttttaagtgaacaaagccgctttttaggcttttgaggagttggatgatgccattcgcattgtggacgctgacattcgtcgtcttcaggaaaaagtgaagcgagacgcggagcagaacatggacattagtgagcaacaacgggtacgtgtttgtggtggtgaagcctcttcacatttggaagcatagaattctgtgattcagtggaagcattactcattttcagacccagaaagtcttcgagatgaacgagaaaatcggaacggcgctggtccaagtggaggcactcggcaacgaagggcgcatagccgagtctatcgaactttccaaggaggtggacgagttaaagcgtaagaagcgcgagttggagagcgaaatgcgcaacatgaacccggcaatgatgcagcgtttgcgcgtgtgcgaggcatgcggggcccaactgaacatcatggaccacgagtcgcgactgcaggaccattacgggggcaaaatgcacctgggaatggttgagatcagagaccgttttgctgaaatgaaggctcgtgtcctaagcactcaataatttacatgttaaacttaaagaaagcaatcgatcagcgtcggtcggagaaacgacgcgcggatgacaaggaccgggaggagcgtcgtcgtcggtcgggacgtgaggatgatcgcgatcgtaagcgtgagcgcaggtatgtgagagtcttcaacacattttagagcgagcaaaatgcaattaaggacccctgccaattgtcatgtaaatttgttttttttaagcaatgcaatggaattaactcaggctaaagcagactaaaaggttaattttggacataaaattaaa

SEQ ID NO: 80667 - DNA, 1024 bp, Heterodera glycines
atgggcggacgtcacgcaaatttggacacattgagaaaaattgaatgcgtgtgtgcgtttgaaatggtaattaaatacggcaccaatttgaaggggccaaaaacaaaaaaatggcaaaatttatggaaaaaaaatttgctttttttattattagaaaaattaaaaattattttttaattaccaattttaattggaaaatgaattgttgttaaggtagaataaaaaattaattgatttaaattacttttatttgaatgatttaaaaaaagattaattaaaatataattagtgaaaaaataaacaaatttatttatattgtcatgtgaaaattaaatatttttacttctcaatattataattagaaaagtaatttagctgaatggaatattaaattttaatttatgtatttgtcaaagacttttaattcatttttattaaaccgatttaaactcttttaattaataaattaaaaaattttcaaaaaaaattcacagaaaaacattccacggcatggcacaaaatctgcgccatttttggtccccccgtgccaaaatcgatgaattttctgggaaaggatacgcttggagagaggtaataacgaagaattgaataacgccgtgtgctatgaatgagtgcgcaaaaatggccccctcctgccccagggcacgtcgagacccaaatccaattagcggctttttgcctcgggaaaaaggggttattagacaaaagccggcacacacaaattttttggcgggacgtctgacgcgtgccgttaatgaatggactattcaataagttctgtggcataatgtttcaaagggtatggaatgccaatccaaagccgatgatgatgatgggatgccgaaaaacagaaagatagtgaaaatgccaaaatggtgggaatttaaaaatttatagagtgccaatgaaattcttcaaaaaaaaaatcatgggaaattggcagcaaaatgccacagaatgacggatttaaacatttacacaatgccaatggaatgcaaaaata

SEQ ID NO: 80668 - DNA, 672 bp, Heterodera glycines
atgccatgccattcgttggaaaaacggtgtgtaaatggacaacgactcatgccatgctatgccaagcatgtgccgtccgtcgtagagttgcaagcttgcggcggaatgggaacggcattttggaggtgtgccaaaaattgaaattgcgggggcgttttaaaaatttccgaaaaaattaccaggcctaaaaaataaattgctagggtcacaatgtaaaaaaaggctgttaaattaaattaaattattatttttttatataaagaagcctctcgaaaaatataattgatagatgaaaaaaagattaaataaaaaattaaatgaaaatttacaaaaaatggcatttccaaaagttttttgcgcccaaatgatcgaaatgccaagagctcagaaaaagacataaaaaattattaaaaatgctgggcgttttccaaaaacctccaaaaaacaaaacaaaaaatattataagtttgtttaaatttaaccaaatggttaattctatacctaatattttatatatatttgcctgcaaaatttcaaaaaatttcgttttaattttcataaatgttattgcacacaaaaaaaaacggttttttgaaaagatttttggtcatatttttttagaaatttaacgatttttttttgaaattttgcaggctcaaagaaaacacttaa

SEQ ID NO: 80669 - DNA, 2056 bp, Heterodera glycines
atgggaaagaaagagtgcgggatcattttctctactcaggtctcgacttcgccaactcgctccgaagacagcgttgtgacggtcaaaacggtgagttatattttattattgctgagacaaagatttttttttgatatttagcgccaataagcaaacaaacgctgcgttgcatgaggaagatgaaataattttatttaaatttttgaagaaaaaaatcagtaataattttatattaaacagacgatcaaatataatattttatatttcttttaaaaatttttatgattttttttatcattatattatcaataaaatattgggaaaaatatctgtaaattgtaataaatttaggtatgttttttatttggcattggttgaaatagaacagttaaatgatcgtaaattaaaataattgtgttaccaaacatccatcctttgcgttggtcatgtcgtcattctttcaattgttcatctttaaaaaaatatatataattatatgaaataaaagaattcataaaaatcatacctaaataatccaggccaaaattagcaaaatgatgaggataaagcaccaaaccccatatgctgaacgcttgcgttcaaaaagaatgatctgaaatattaaaaaaaagctaaagattgatataaaatattaaaataatatgtacctggccaacgtgaaaatgtcgtacagtaggtttggtgcgtttaaacaaaggaagattcatgggacgtgccatttcgctaaattaaaaaggggcacaaaaaaaaggaaaagggcacaaaaaaagggaaaaggaatatgagaatgacgctagacgttggcgagatatcatcccaagtgttttccgttctcgactgatgacccccttttcgttggtttggtccatcactcgagaacgacaaacatgagggaccatcttctactatgaataaagtaattattgaataaaataaaaacgggcgggtgacagggggggggtgaaggtatataaaagtcgagaaatcggatcattctaattcttgacaatcttaaaaatgagcattaattatagcgccaaaaagcttctcatggacaacattttgcccgccgtagaaatcagccaaacgtccaatggcattacgctgatcagcgagcgaattgcagtgcctcgaacaattccgtatgacatcgttggcaagtgtcgagaatgcaaagccaccgaatgcgagaccgagtggtgcatttcaaaagaaggcgtaacaatttggtgcacccgcttcaaaattaatcctcgtttcgttccgtttgattatgtttatgagttgccaggctatacctttttcaaggttttaaaatattatatgatttttctttaaaaataatattcagattcgtaacaaaggccgagtttttaatgtcgaccacggtttccgctccaatgtttgcacgcggaccgagactcccgtctacaatttaccgcccccaccgcctccgcctcaactaaagccaaagggaaatgagcgaggaacggacgagcaaactacacaaaaattttttgagtctatcacggcagctactacaggattggatgttcctcaaaagaagcatggagaagcaaatgaattttttgatgctcttacggcagcaacaatgggaatggaagtcgacgaaaacaaagagaaaaaagcgcttccacaaccgcagagtaatgcctccgatttcttttctccgatttcggcagctactatgggaattagtggcgaccacctgaagcccaaaccgaaactaagacaacacttgccaagcgcttcggatttcttttctccgatttctgcagctactatgggaattagtggggaccacctcaagcccaaaccaaaaccaagacagcaccagccaaaagcctcggatttcttttcaccgatttctgcagcgacgatgggaatgagtggcgaacagaagaaagacgaaccaaactcaaaccaacaaaagaaagacattccagaatttgcttcggccatttctgccgccaccatggggatgagcaattacgaactacagcagcaacttccg

SEQ ID NO: 80670 - DNA, 224 bp, Heterodera glycines
ctgcagaaatcggtgaaaagaaatccgaggcttttggctggtgctgtcttggttttggtttgggcttgaggtggtccccactaattcccatagtagctgcagaaatcggagaaaagaaatccgaagcgcttggcaagtgttgtcttagtttcggtttgggcttcaggtggtcgccactaattcccatagtagctgccgaaatcggagaaaagaaatcggaggca

SEQ ID NO: 80671 - DNA, 811 bp, Heterodera glycines
atgacggaccagggcaaagagttcactgccgcccccgtgcagcgctttttcaacgaaaaagaggtgcaacaccattgcatgcacacctcaccccagtggcacgccgggattgcggaacgggcaatccgcagcatcaaggtggtggtatagacaagaaaaaacaattgttatttaatttttctattcttaggagcggctgtatcgatacttcacccaccgtggcacccagtgctggaccggtgtgatacagcacttggtgtcggcgctgaatgcgtctccgcatcgtgccctgtctgggctacggccccgggacgtcaattttgccaacgcggagcaaattcgacgccagcaactggagagtagcaagcatgtgcgtgggcgaaatccgcggcctccacgcttcaacgctggagaccgtgtgcgaattgagaagcacaagcatgtgttcaaaaagggctacttgccacgcttcaccgatgaggtgttcactgtggcagaggtgcgagactcacgtacgcctaccacgtataaattgcgcgacgacaccggggagctgctcaccggctggttctacgcacaagacttgtgccttgtgctcccgcccccagccccaccacagcgcccaacacaacaaggggcagaggcatctgctgctgctgccgcagccgccgtcgttggtcccgtttatgacattgaacgggtgctgaaaaggcgacggcaaggacgcaacggcgtggaacattgccttatcaaatggaagggctactccgcagcgcacaacagctggatccctgccacatcaatcatataa

SEQ ID NO: 80672 - DNA, 879 bp, Heterodera glycines
atgaagcacacaacccgcatgctgttagtaccggaggaactgtaccgctccttgttggccaggagctcggctcctgttgccgacgcatcctctgcgaggggcggcttaccgcagcataccacgccaattgagcacacggcaaagcgcatggcgcgcgctgcacacagcggcggcgtcacccagagcacggatggcgtatctccggcatcgaaacaacaacaccttctgaacgatgacaaacggttgatccactaccaacaggagttcaagaggttcaaaaaattgctggaggatgagcaggagcgtccagcgcctgttcgtctcacccaactgcccaccgacgaagcctcgaaggggctgctgcgcgatgcactttccgaggcggcgcgaacaattcaacaacaacaacaacctcaaccaaaacagccggcgccgcaccaacaacaacagcagtcgtcgcactctgattcgtcaccaatgaggcagcctccacgtcgcagacaacgaccagccaaaaggtcaccccgtacgacatcagtctctacggatggcgccgaagctagccgcttcccgtcatcgtcgtctgccgcctccttgttgacacgcactgataatggaggaagaggaggagctgagacgactgagcgtgaagacagccccaacgacgaccgaccccaaaatatggcggcagttggccccgcaaggaaaggacagcgggaagaagcggacgtgcaactgcatccatcaacatcgacagcaactgcagcaccagcagcagcagtagcagcagccttacgcgacactgagcagaggaaacgacaagccattgactatgcgttacgcaacgcgggcacgctgggcatcggagatggacagcag

SEQ ID NO: 80673 - DNA, 53 bp, Heterodera glycines
ggcttttttgcttgccgaatgaggcttttgaaaattttcatctgcgagccctg

SEQ ID NO: 80674 - DNA, 330 bp, Heterodera glycines
ccgggactcaaatgtcccgctcaggccaaaatttttttctatttccgggaaaaaatcgaaatttttccgaaaaaaataccagtcgatagagctcgaaaaactatgttttggaagtggtctccgtttttctgggaaaattcgttaaaaaatcataaaattaaaaaacccgaaaaccgttttttaggcctaactcgaaaaattttgaaaattttcgaaattttaaaatctggaaaaatcgagctttcaaagctctacaataagtccgctggagccacctcgctcagatcaaaccctaatgagttattcgcctggtactgaagtgggaaaaaa

SEQ ID NO: 80675 - DNA, 1015 bp, Heterodera glycines
atgcaatggaaaccggaagtgcgtacaaaagtgattagaagaggtgcaaaagtgattagaagaggtacaactgtgattaaaggaggtacaacagtgattataagaggtgcaacagtgattagaagaggtgcaacagtgattagaagaggtacaaaagtgattaaaagaggtacaaaaagtgattaaaagaggtacaaaaatgattagaagaggtacaactgtgattaaaggaggtacaaaagtgattaaaagaggtacaaaaatgattagaaggaggtacaaatttgattagaagaggtacaaatttgattagaagaggtacaaatttgattaaaaaaggtataactgtgattaaaagtggtacaaaagtgattcaaagaggtatatcagtgattaaaagacgtacaaaagtgattagaagaggtgcaaaagtgcttagaagaggtacaaaagtgattcaaaaacgtacaaaagtgattcaaagaggtacatcagtgattaaaaaacgtacaaaagtgattaaaggaggtacaaaagtgattaaaagaggtacaaaaatgattaaaagaggtacaaaagtgattcaaagaggtatatcagtgattaaaaaacgtacaaaagtgattagaagaggtgcaaaagtgattagaagaggtacaaaagtgattcaaaaacgtacaaaagtgattcaaagaggtacatcagtgattaaaaaacgtacaaaagtgattaaaggaggtacaaaagtgattaaaagaggtacaaaaataattaaaagaggtacaaaagtgattcaaagaggtatatcagtgattaaaggaggtacaaaagtgattaaaagaggtataaaagtaattaaaagaggtacaacagtgattaggagaggtacaacagtgattaaaagaggtataaaagtaattaaaagaggtacaacagtgattaggagaggtacaccatggttaggagaggtactaccattggggaagaggtacaacatggtttgaaattaaataaa

SEQ ID NO: 80676 - DNA, 597 bp, Heterodera glycines
aaattttttgaatattatacaatcgtgctttttgctctctatcaatttattataaaaaaattcacttcccttcgaaattgaaggcagaatgctcatttgaagctacgcaaatataaattaatatttgctataagaaccgactatttagtcaacagaaaacaaataaatcataaaattagaacaaaaaatgattttattttagaatgcacactgaagatgcataataagctaatatattcgaatttattttgaaataactgttcaacagattattagttgtttctaagaaataatgataggaagcttatctgaaatgtgtgctcacccaggttggaatttgtcatttcctgcaataaatgttttcatataaaggtttaaaaaatttgatcgggtttaggaacattcaacaaatgcatagataaattttttgaatattatacaatcgtgctttttgctctctatcaatttattataaaaaaattcacttcccttcgaaattgaaggcagaatgctcatttgaagctacgcaaatataaattaatatttgctataagaactgactatttagtcaacagaaaacaaataaatcataaaatt

SEQ ID NO: 80677 - DNA, 316 bp, Heterodera glycines
atgttgaaaacattcgtcttacggttggatcgggtctatcgtagccgcgtgatggatagttatagccactgtatgggctgttattgttactgtacggattcactgggtaagggttgttgttgatattgttgtcatatgggtacggattgttagtattttgtttgtaacctttaaataacttttgtataatattagtttatttaataaaaaatttaatccagaacttttttgatttgtatgggtataaatgcaaatatcgacatattatattaaaagaagagcttaattagacaaaactaaattcgaaattaataaa

SEQ ID NO: 80678 - DNA, 743 bp, Heterodera glycines
  unsure (1)..(743): unsure at all n locations
atgcacacaaaaaataaattcagtccagtctacagtaatccatcttacccattcaacagcaacaatttatataatggatataacccaagcaacaacaacaacgcgtacaacccttataacaatggatacaatccgtataataatgtaaacaacccaaacaacaacggatataacccgtacagtaacggatttaacccgagcaacaacagatataaccaatataataatggttacaacccatacagtaatggatataatccaatcaacagcggatataatccaatgaacaacggatataatccaagcagtaatggatatagcccaattaacagtggatataatccaataaacaacggatacaacccatacagtaatggatataacagtggatacaatccaatgaacaactataaccagtacagtaatggatacaacccctacagtaatggatataacggtggatacaatccaatgaacaacggatataaccagtacagtaatggatacaacccctacagtaatggatacctgaacaacaacggatacaatcaaaacagcaacggtataaaaataaatgctaatatatttcaattaatatgtttttcaaattgatgacttctcctggttaacaaagcaattaagcttatattgnattttcagattgcttcaccgcgtncatggtacaggaccaaagagcatgcagcgcaatgcaaaggacatgctcaaaccccgtgggtaattaa

SEQ ID NO: 80679 - DNA, 1729 bp, Heterodera glycines
atggcggcggaagcggcacaaaacggcgacgacgcggacaaaacagcaaccggacgaacggacaatccagaaacgacgacaaaaaccatggagggacaagcggaggagcaagaaatggaggacgacacagagcaaaggtgtgggtttttggaaattttgataatttttacatacatgtacaaggggtgtctcagaccaagggccatacgacggacgattgggacagggggggtgtctcgggaccgatttttcatacgaaggtccaaatgttctccggcgacgaccttttttttttttttttgcttttcaaaagcacttattttttgcgacctttgcattgcttttcaaataaaacaatttttatacgccattgcttttattcatgtgaaaattttaaaacacaaaaaatattttattcgtcaaaagcggtgtgcaaagtcaaattggaattggaagaacactccggcgccgtcggtggcaattgcatttgagttgaaggcaaagaaggaagtatttttgtaattaaggcaaattataaaaataattttcacttgagagattgagattaaagggtacctctcgagattttcccgggaatttccggtcctgggtttttttaaatattgctaattttgtcgatttttgtaaaaaaaattttggaaaatttgggtgagggggaggccttggagagggtaccaataaggaaaactgggaaatttcggttaccccacatttgcgccccagccacttgcgcctatgtccaaaattggattctaacttacattttttcaatcccaaatagactaaaccgctttaaaaagcgattgaaagtgattgtatgcaataatttgatcgtcagcaaatttatgaaaaaataataaatttttgaaacaacataattattgttcctaataaaccaaaagaacaagttttcttaaatttaatgctgtttaagacctctaaaattgggaaaatataagtttgagcagcgcgtcatgacgcagaggcttggcaccgcaactttaaaatgtcaaactgttttttcatagacaaatttattgttggtatcatttggtagcccaaagtgttttaataacaaacacaaaatttaaaaagttatattcgcttccaaaaaagatttggtgcacgacgccaaaataacaaaaaaaaagagagtcgattttgccataactttagtaccccaaatgaatttttttcgaattttgcgggttaaagcagtaacaggcaagcgctttaaaagcacacaaccaaattcatttaaattaattgtgccactaaaacattgagaattttaataaatcaaatttttgaaaaaattacaccgaactctcaaaaaaaaaaacttttttttccaattattgtttttttaaatgattcaaaatgcctttcttattttgtttcttttggtttaaggacaacaacaaaaactgtgatgtcgggaggacaacaacgacaacaattggccggccaatcgtcggtggtggcgggggacagcgacgacggcggggaggaggacaatgacaactgcacaacaacaaccaccacccccacttacatcaacacatcatcatgcagcatcattttggatgaccaccagcagcagcagcagcaaagtgatgccgaagaacaggacgaagaagacggagcagaaaacgatggtggaggaaatgccgaggaaaatgcgcaaaatggtgacgggggggaggag

SEQ ID NO: 80680 - DNA, 364 bp, Heterodera glycines
atgtgcatcataatcagctatgatgatgatcagcatggtaaaaacccaaataaattgttaccaatttgaagctaaaactgtaggaattcgtatcggcacagttttagtcatccaaaaattgaatttccaaaatgcaaaaatctcaattttcaccatccataccttcatggtgcccaacagggttttgccagctgctgaccgtccagctgaattggcccaatttgtcgtcaaattgtattggaccctcaaaatggatgcgatggtcgccgccaacatcttccacattgtcactggccaacaaaaattgaatgtcacggacagcgaagttcaagttgatcatctgaaagagcaaccaactaattaa

SEQ ID NO: 80681 - DNA, 1139 bp, Heterodera glycines
atggcattgctagtatcacgtgccactgtgttgtttgcttcatcgtacaccgtgtttgcctaccgtagcacttcgtccttttacaaaatgtgcagtaacaattttgttaggttcattaccgtaatctttacgacaaatgatgcaatgtctgaaaatgaatgctcaaattattttagatttgaatattgtgcgagttttttaattaaaaaatgtttttgtagcgtgtacaactgccaaccatggtctactgtaggcggtgaagagtgcggtaaggtgtacggtatcgccaccgaagaggaccacccaatgagagggccagggcgtgtgtttctgctcaccatgctttcctctggcgctgttcagctgctctcatgcagttctgatctggcacaaccgttccaactgatcgccacgacaaaccatttcccatacaagtgagttggtttgatcaaatgttaatccgatctcaattagaatgtttttttttgatcattattatatgtatatagagatgaacatatttccaaatttgagagatttttagtatctttcgtattttttatgtaattaggaaaccaattggtttcacggattaatgtgttaccatactcaggaatgaattattgtaaaattttgggcatacaaaatctaacatcatcattttctaaaaatgatcgatttgtatgaaaaaaattaattaaagaattcgtcaaatggcatttgcggatgatcgcctgttaattctgacggatgatggattcttcggcaccattgatctgacactccaggtctgtttacactttttaatgatggggacaattgtgttaaaaattttttttattaaaattaacatttttagtttaaatattttcagaaaattagacaatttttttaattaaatttaactaattaattagtaacattaattgcttctaccttaattagttggttgctctttcagatgatcaacttgaacttcgctgtccgtgacattcaatttttgttggccagtgacaatgtggaagatgttggcggcgaccatcgcatccattttgagggtccaatacaatttgacgacaaattgggccaattcagctggacggtcagcagctggcaaaaccctgttgggcaccatgaag

SEQ ID NO: 80682 - DNA, 613 bp, Heterodera glycines
atgccggtaaatgccatcattttgtcgaccgataattaattgaaaaaatttatgaactttctcccttttttagcccgtggctgtgttcttccgcggctatctgcgcgacgggaacgcgtgcactgagcatgtcatttacaacatcattttgtggtgagtgatgccctcgggggctgcgggtaccattttgtattttttcaaccaattttttcaaaatttttttttacctttaccaatttttttatttttgaaagggctgaaaatttttcgtaataccaacagattgctttaattgtagggtttttttttaaatttaatattttaaataattgacatttttatttgggcctatacaaatttaattaatttaaatatattcagattttttattttttttctcccttttcagctttttcctgtgggtgcccggcatggtgcacgccttttggtactgcttcagcgacatgttcagcgggccgaagaaggagggcgccgggtacagcaaaaatgcctgagcagaagagcactggcgagcggacgaacgcagaaatgagcattttttgaaaaatgacgtcatcgatcttattaatttttgacacctaattaagcgata

SEQ ID NO: 80683 - DNA, 466 bp, Heterodera glycines
  unsure (1)..(466): unsure at all n locations
atgcaaaataatagagcatcagaagggctctcgaatgataccaacaatgttagatttggtggaaaaagaaaaaagttatagtccaaaaactgggctggcgccgaaacgaggtggaccccttagaaatgcgttttttaaactataaaaagggaaagtgatccangttgtttcaaatgtcacgcaaaactcatgatagctaaaaatgaacgtcatattctgttcagcgcataaaaatgccctagaaaaaattattaaaaaaaattttagggggggtcacaaaagggataagaaccggtaaaaaaaggttcgtttaatcccataactctaggcagataatttgtagttttacccttagaatttttatatttatttattttctcagttcgacattgtatacgaagccaatttgcacgtagatgatctttttaggcataatcaagaattcctaatgtgccatttttactga

SEQ ID NO: 80684 - DNA, 168 bp, Heterodera glycines
tataaaaacaaaatgagtctaatttaggatttttagggttttcggggtcgctgaatacgaatataccctttatattaccccttgcctaaccttaggcccgtctgaataataaaaaactcaaattcgagacttggacatttcgtgggctggacattttgtgggtcagcg

SEQ ID NO: 80685 - DNA, 654 bp, Heterodera glycines
atggcaaaccgacggagttttttgacgggaactttcacgttaaaaggggtgaaggcattcaattcggaaaatgactttgttcttcgaggaacagtggcgaacaaagagaatggacagtcggcagctgcggcgcctttgaaggcactttcagagagaaagcgcccgaagagactgccaaaaaatctacaaatgaacaacgacgtcgacgggcgtctgtctgaaaaacaaacggataatttgcaacttttggcgccggaggcaatgcgttcgatgaaggaatttttttggcgattgctcatcgaaggacgctataataaattgatgaaaatgacaagagaaattgtattttagaatctgtttttcgcaaaaatactttgcattttaggcttttatcggttcggatcgccacaactcccaaaataaactcaatgaacaacacttcctcagtttggccacttttgctcttgcttttgcccggcacagtcacatttcgtgccaaaatgtgtacgctaccttttccgtggaattctttcacatggtcacttcctacatgacgaactgcttcgagctgatgaaggccgatcgccactccatccgaaaatatgcattttatgctcggcatgccataagaaatttcaaggagatgatgataat

SEQ ID NO: 80686 - DNA, 1221 bp, Heterodera glycines
atggaaatgccaactgagaccaaagaaagggagagggaaatgccggaagttgaaattggcggagaatgtttcgggacggcgaggggtgcggcgccagtggcaactaagacgacggagagcccccaaaagttgggcattcaaatgggcgaagaatggcgcaaccacgtgagatgcacccaattgtactggtccattgcttgctccttttgctttattcacccaattcagctatcaacattttttccaacccgagtaccataagaatttgtgtgaatcgcttttcaatgaatattcgcacgctttaacgaatcgaatttggaatacttttggcgactccgaatgccctggtcaacttttaacactcgccaatcatttatgccaaaatcttagcgaggttttataattaaaaaatctttattactaacaccttatatttgcagttctcaattacaacttcaatgccgaattcaatcaaagaactgttttctgcgcgtaataatgaaataattaattcagcaaatgatggcagtgatttatttggggtaaaatatttttttctgtttttctttatcttctcattgttagcattttaccgcaagtgcaaccaaacaacttcgctatttggagactactgaattacggctggaattggtcaaaattcaacccgagttgagtcacagtttcatcgaatctcttattcaacttctacctgacccagaatgtcttgtaaatgttcaaatagtgcatcaaaacaaaatgccaaaagaaatggattttgaatgcacttacgaaactccaaacaatgccaaaaacagtggacagagtctgaaagtgcaggagaagtcgccggcacgtgggaagaagtcgtcatctcttgtcgacaattgctgtaagctgctgcttgatttggtggatgaaagtggagctgttggagtgtcagaagaagaattgaaggtgggcaaatttgattcttttgtacgacggtgctggtaggctatgcgaatttttataaatattaaatatgcacaaattgtaattaattcggcattttattttacaaataactggaattcataggtccatataaacaccaccggaaaattttggttaatttaaatttaggaacgaatgtctgttcataattttgacgtggagatggtacaacaacaattgaataaactggtggagactgctgacgttgtaatttgcggcattgatgaa

SEQ ID NO: 80687 - DNA, 922 bp, Heterodera glycines
atgggaatttcgtgcagttccgctgcgggtacatcagttcccgtgaccaaagtgactccagtgactgggtcatccaatgggagttcggatggcggtggaggtactacgccgttgcagcgaatccctggaattgcgagtgcattggctgctgcggttgtggctgttcaacagcaacaccataataataataacgttccgccatggccgtccggaactccgcccaacaacgccactcacccatctcttgacactccgccaattcgtcagccattggcacaaagaattttctcgcccgctgtcagcaactcatccagtttgtcaatgagcagcggatcttccaaaagcagcagcggggtttcctcagctacgtccaatgcactgttgcagtcgccgggttccagtggaacaacaatgatgaccggactgaacaacagcgacgttggcaaggagttcagggtaagatctgctgcattaaaaacatacctgtgcaagggggttagtcaaggggggggggtcatgacgtcgaacgtaaggggttaacgggtgtcgaacgtaagaaatcgggggggggggtcaagaggaaaaaaggagagaaaaaagaaaaagaggaaggaaaaaagggagaaaaggcagcgtcgaaatcaaggaaagtgccgtgaattacgttcgactaaccctgaggaatgcgatttgtcgaacgtaaaaaaatggagacttgaaaataaaataatttccacattaaaattttccaattcagctacgttcgacactctttccttacgttcgacgaattctgctgaagaaaattcgtcgaacatgagaggctgaaaaattcctaaaattttgctttcttttttttaagctttcattaaaatttcaatattttttctaaaaaaagtggcttataatcgcaaaaaaccta

SEQ ID NO: 80688 - DNA, 748 bp, Heterodera glycines
ttcattgtctgccgagccatcttctcaacgaaaaaggcattcttccaccggttcgccgatttctgtccaatcgcttgacgagggaatagaaacaaaaacagagagggataaaggcgggaatcaaaagccgcgacagatcaaacaaacacggaaaagcaacgaagtggcacgactattgaacgatctaacggccggaaattgtacggatgagttgaaaaaagaggggacaaacgaaagtaaaaatgggaaaaagagggcccgattggaggaactgaacaatcaaaaagaggggaacgaaacaaaggaaaaagaattcgatcatgaaagtggacctgggcaaaaacattttggaagagacaaatgtgatcaaaaagaacgacacggaacagaaatcgacaatgattattttttggaagaaaaaatggctggcaaatatttaaaaatgaaaagccagaaaacaaatgagcaaactttgtttttggggaagtgggttggacaaaatggtgagtgtgacaaatatttgttgtgtatttagccggcttttaataaatagtagtaatattgcaggttcttggcaatatatggcagagaggagtcaaaaattggcttcccaaggcagcaaacccaatgttcgtggcgatggtactgattcaacaccaacgaaaaaggacggacggacgggcgttgaaaaaggacagaaaaacttgcagtcgcaatttgccaaaatcgaacggaaaaggccgttgag

SEQ ID NO: 80689 - DNA, 1569 bp, Heterodera glycines
gtcagttcgtttggtggcaccgatgagcagcagcaacaacaattccagtgtgacgaagtggaggaggaactgatgcttatgatgaagctcaacgggcacaaaaatggcgtgggtccttcttctgagtccgctacggtttacgagcagattttgaatggaaagaatgggcggagagttgaaaatgaaccagaagtttattcggtgggaatagcactgcaaactgacagaaagcataatggacaaagaattgactcattcagggcaaaacggggttggatttgccgacgatacatttggataaatttgaaacggaagtgaaagcttgtcacacagggcccgacggaggactcacaaaagtaagcgaagacttcgaaaaagcgcggaactcatttgaggtgcaggttcaacccatacgacaaagagccatcgccacaatggctaagttggatgacgaggagttcagtctgtcatcactagtgagaaatatcaaaataaaacaaaggcttttcttcaatctgcacttaaaacattgtaaattcagcaaaattaaggatgaggatgaaaccactgaagcagtacttcctccgagtggtcgctctcgaaaagggaagcggcgagcaaagaattcgctgtcacgaacaccgaatgattcattagacatacttgacagcatcgattcaaaaaagaatcctgaaaagacgaccaccccacgttcctttttgggtcgatacgattggaacaattgggacgaagcgaaggtggaaaaaaagataaatctgtcaaaatgagcaagcaactcaaagtaggccaccaaatgccaattttgacaggcttatggtctgtccacctctctctatgagaagcatccggtcaccggactgtccgctggccatcccatcgccgatgtgttcggcataattgcccgtgaaaacaattgtgcattcgttttaatcttttaaaactcaactgtttggcatattatttagccattctcgcactggctgatggtgtcaattggggcgaaggtgcgcggttggctgcccgatgtgccatccgcggttggcaatatctgtcagaccatccaataattttggatttttttgaggcgctattgagcaattgaacttagctattgagcgggacagtttcaaaacaacgaatgtgagttcattcggccaagtttagcaattctgtgtccttcctctgtttaaggatgtgttccattgtctgctcggttctttccatgctgcccatgcactcattctccaggagggcggtgcgttgaccacactttgtgtggctttggtagcccccgtccgtgcttcttcttccttcgttctttgcgcttgtaatgtcggcgattccctctgttttgtgtttgacgataagaatggagtcagagagtgagtgaaattcaatttataaattatctttttcttcccttcagagttacactcgcctcccacgacattggccaaatgcgcgacatgcgtgacgcgggcggtgctttgggtcccgtcgacgggagaaatccgcagcttcaaaatttgacttgctcaatgaccattt

SEQ ID NO: 80690 - DNA, 399 bp, Heterodera glycines
atggcacggacgacgacgacgacggaaagcattggcacagaggacgaagcgaaccgcgaatttgtgcaatcgttgcgcatcaaagcattgcaacatttgcaaaggtagcgtcggcgcgggggaggggggagaagccaaacaaaaaaggaaaagccgggccatagacagcacaattaggggcaaacatcgttttggcactgccaatcaatggtcatccatgcaaaaacattcagatccctcgagtcgttgagctcgctgactgccaattcgctgatgctaaacgaggcacttcagcccagcgaagagacgccaaatgaggatgaagaagagaaaagttgggaggagaaggaaagggaggaggaggaggaagagacggagcagcaaaatgtgccgaattaa

SEQ ID NO: 80691 - DNA, 854 bp, Heterodera glycines
acaatcaacgctcgttttgcttcaacagtgacaaccaatggaatagcgccgagtgagcagcaacagctgaacacaacaaaagcgaaggaaagacacaaaggttgatgaggggaagtgtttctttttccgaatgatacaatttttgcagagggacaacccgtctggctgattgggtggtttccaatcattttcgagttgtcctgcatcataaatcgatgcaaattggacgtacggacacgaagtttaacggttggtttgcaacttttgtggtttaaagcctttatcacctttcacttggatatcatcgcaggttttgttcgaacttatcaaaacgtacggtggcacatttggtgcggacgcatggagtgacttattccgagtgattttccgcattttcgattttgggaaaatcagcgaattgggcaacgaagtgagtgaaaagggaaaaaaccattctttgtgaatgtacaaattttacagaaaagcaaatttggaagaaattatgacgaaaataattctaatacagaatacctaaaacaaaaaattggaagtgataacaaaaatgaacgggaaaaggaaggggaaagcggaaagcagaaaaagagcacattcagttcagcagggggaaaggtgccattgaagacaatttcctaaaatattttgcgacaattttttgttccaaaattcagaaaaacgaatggatggtcaccacgtgcaaccacgccctgtacgccattgtggacgtgttctcccaatactacgcctcgttgggcactcttatgttgcccgaggtgtaccggcagttggttttggtgtgtgcagcagggcaacgagctgttggcccgctcggcgat

SEQ ID NO: 80692 - DNA, 814 bp, Heterodera glycines
atgaatctccaagcacatgcctcggctccgaacccggtccctgtacgccaagctattgcagatgcacgcggaaacattccaattgaagttcgaatgcaacaggggacttctgcttcagcaatgtcgagaacctaccgaaattacatcgcccgagaaaaagtggaacgcggagatgatcttcttgatctggctgacatttctcaaattgtgatcccagaaagactgcaaaatcagcttcttctcgaccgtattgttgaccaacagcggatgtttgtttttgcttcaccattttcgagaaatcttctcgaacaatacggcaatcatgtcgctgtcgacggtactttcaaggtgattatacataattcaaataaaataaaattattaaaaatttttaagtgtgccccagcacattttacccaaatttacacaatttcggttctaattgacaaagttgctgttccttgtatttatggaatactcaactcaaaatccgaaaacacatatgctaatgtcagttaaataatttgaaatttataatataatcgaaaattagatgtttcaagcggtgtcacagacggttcctggttggcacccacaaacatttatgtctgattttgagtccagtgcgctgaacgcgataactaatgtaaaaataacaaattttacaagaaatcctgaacttaaggtgtttccaaatgccatcagaattggctgtctttttcatttttgtcagtcaatttaccgaaaattgcaacgtctgccgggtcttcatacccaatttttggaaaacgccgaacaacacacaaacattaaa

SEQ ID NO: 80693 - DNA, 2329 bp, Heterodera glycines
atggcccagcccacacaataccacggaaagttaatgcattctttggcgtcaattccaaaagcggtggcttggtttctgagcaaatggaatttccgttgcgtttcatctttttgctggtttgttttttgctgcaagtttgtaaatgaacacaaatttcttctgaaagcaaagtttgtgtatgatgaatcattaaaacaacataattttgagtgaatccaactaccaaagaatatagaaaatgtgcaaatgtaaatgcattttttgtattgattcgttttttgtttgtataccgtatttgctctaattatcccccatgggggattatttttcaacctcctcgtagactgggggatacttggagactgggggattaagatagagggattattcttcaaacccctcctagactggaggataactggagaatgggggataattagagcaaatacggtatgtagatgtgtggccctttttgtgtggtcacaaattgaaagaaaaaggtaaacaaataaaaataataaaaaaattctggcgtattgtataaatggttactgaatttgaatttggttgcactgttatggaactagagaaaggcaaatcaacatttttctcttagcgaaaattgttttaataaatatcaacattgacgttgatatttatttaatatcaacataacattatgccatcaacgtaatatcaacgctatttttaaaatttgcgaaaattttttaaaatttaaagcaatttttcaaaaatgacttttggcggaaaataagatggggagagagataacgcaaaagtgagagggtgttatattcagccccagtcatacaaaagcatttttggtaaagaagaataaagaaaaattaattaaaaagagagtgttatgggaagagatttaagacagagagagaatagagaacatagtgaggaatctgcgtctcttaccaaaagaatcagcgaagaagagacatgaactcccttcccattgcgctctctattgaaattgttttctctaccctccttcatcaaaaatgttttgtatgactgggactgagatccagcactctctcatttttgcgttatctctcgcactaaaattataaaccgctcatataaattttaacaaattttcgcaaattttaaaaattacgttgatatttgcgttgatggcataatgttagttgatttaattaaatatcaacatttaaattgataccccgcaaaaactaataaaaaggttgatttgccattctctagtgctgatcaatgttttaaaaccatttttcatcattttttgggttttcaggaatgtttgggcaaattttgatgaaattttgtaaaaaaatccattaaaaccgaaatataagtatatcccgttaggggttgattttttggaatcttccaaaaatatggtccctaaaattcactctgattaaaattaaataatatcaacaaaataatttgttttaaacaaaaatggatatttttaaaaatttttgttcactaatttatgtttattttttcagattatcgtggatttcttctaccaaatcactttgttcactgcaggtcatttttggcattttttatcatcacaaaatttatttaaatgaaaacttttttttatcttttcaaaattatttatttatacattaaactttaatattttaaatattttccccagaaatattgaaaatcaaaaaattttcttattttttaggagagagatgagtaaaaaattgaccaccaaaaacaaactttaaaattttttcctaacctaaaaatttaaaatgaaatttaatcccgtccccatttttaattttaaatgcaattttaaaatatttgcactccaaaaatttgatttttactatttctcatgaaaatctaaaatttattgcctcttaaaaatcgaaatttaaccctccccctaaagctttttccttgaaaacctaaaaattttctatttttttttcaaattttcttggtaaactaaaaattcccacttttgccggcctctagaaaatcaaaattttaccctcccactaaagcatttttcaattgtttttcagtgctcgtcatttgtgcacgtcgggaactgatcagtgcccggaagcgggacaacaacaaaatccatgccacaaatagcaacaatttgtcagaggatgatgttaagccgacgaaaagcggtggatttcggcactcattagaacgcaaattcaacgcatttaaagacatttacatttgcctggtcagtgtgccaaattcaaaacaaaaacaaatggacattccattcacgggattaatccgatcaaaaatcaatccatga

SEQ ID NO: 80694 - DNA, 1372 bp, Heterodera glycines
atgagagagtgctggatctcagtcccagtcatacaaaacatttttgatgaaggagggtagagaaaacaatttcaatagagagcgcaatgggaagggagttcatgtctcttcttcgctgattcttttggtaagagacgcagattcctcactatgttctctattctctctctgtcttaaatctcttcccataacactctctttttaattaatttttctttattcttctttaccaaaaatgcttttgtatgactggggctgaatataacaccctctcacttttgcgttatctctctccccatcttattttccgccaaaagtcatttttgaaaaattgctttaaattttaaaaaattttcgcaaattttaaaaatagcgttgatattacgttgatggcataatgttatgttgatattaaataaatatcaacgtcaatgttgatatttattaaaacaattttcgctaagagaaaaatgttgatttgcctttctctagttccataacagtgcaaccaaattcaaattcagtaaccatttatacaatacgccagaatttttttattatttttatttgtttacctttttctttcaatttgtgaccacacaaaaagggccacacatctacataccgtatttgctctaattatcccccattctccagttatcctccagtctaggaggggtttgaagaataatccctctatcttaatcccccagtctccaagtatcccccagtctacgaggaggttgaaaaataatcccccatgggggataattagagcaaatacggtatacaaacaaaaaacgaatcaatacaaaaaatgcatttacatttgcacattttctatattctttggtagttggattcactcaaaattatgttgttttaatgattcatcatacacaaactttgctttcagaagaaatttgtgttcatttacaaacttgcagcaaaaaacaaaccagcaaaaagatgaaacgcaacggaaattccatttgctcagaaaccaagccaccgcttttggaattgacgccaaagaatgcattaactttccgtggtattgtgtgggctgggccatttgtgttccgggatgtaacccaccgaaagcaataagtctgaattccgaggtacaaaaaaaaactcggaaatctgtgaactcccaggtctaaaatttctcggaaaacgcaatttggttacgttccctggcatgttcgttaaagaaattgacacatacaaaatttgccaaaaacaggcaaactcggccacgtcggttccgtctctttggacatcaaaaattgtgagatctgctccgtttacttcaaagtcaaatcaaatgccaaccacttctattcggttcgtccaaacaccggtgtga

SEQ ID NO: 80695 - DNA, 120 bp, Heterodera glycines
aaacgtatgattgttgccgaggcggaacagagagcatttgcgcccattccagagtgctttttcgagctgtccaacctgttgatgctcaaagcgtgggaggatgtcgagcagtatgagcag

SEQ ID NO: 80696 - DNA, 103 bp, Heterodera glycines
gtgctgcatgttggagcgtggaagtcagttgacgtcgaataccacttttaatgagcttaaagagatctctttcaaaattgcctttgttttcacaatcacttaa

SEQ ID NO: 80697 - DNA, 407 bp, Heterodera glycines
atgccgccgcctcatccgttaccgtcgacaccccaacacccccaccgctacggtggccttcacaccatatttgaggacaccgttgagcagaaggcagggcatgagaaagacgtacggcaacaaaaagaacaacgcagtcacacttcatcagctgctactgtcaatacagaggccatggtgcgtgaggctcaccgggtgacctcccaacttgctgccgcaattccggagcctatgcgtagcgctgtgacctcctccgtggccattcccatccttgtgtcggcggcacaaagtggcggtggtcgaaaagaagcaacgcaacacaacagtgaggaagaagaagaaaaggaacgcaattgatatagtgatggaagggcaaactcaaatgtgtttactagtggttcagtgaa

SEQ ID NO: 80698 - DNA, 270 bp, Heterodera glycines
gttatagacccaattactctgatcacgtttacacagtagacgaggcccgctcaaccaacccccagcactatttgctcaaagactattatggcacaaagttgaagagaaaattttatttgccagaattaacaaaagtacaagtggatgaaaacacaatgtatcgaattgaaaagaaatacaaagaacgagtgagagatggtaaaagagaaatgttggtgaaattcattggattccggaaaaatattgggtcacaaatgaagaaataaatga

SEQ ID NO: 80699 - DNA, 1572 bp, Heterodera glycines
atgtacccgcgcggcttgatcgaccccgagtacaattgcgatcattttgaggactctgaaaggggtgagtttgaagcttgtaattaagcaaatattttttcttaataggcttttcgacaacagtcacacacattgagctggaagccgctctccgctcgtggtacaaggtgacgcatgtgtaccgtgcctatatctggcctctggcgtgcgattggagcaatgggttgttccactcgtacctgctgaagttcctcaaaatgaaatttgagggtaaaatttgaaaaacttaataaaaaaaattaaacaaacaaaattttaagcaagcggatatccagcgtcttgtacggaggcgggcatcagcgaggaggagtcggcacggagaaagcaggaacacatcgacaaggccaaagaaaaggcccaagtccctcttgaggcggaccgaatcaaacacaaccccggactccgctacctgtccaagctgtgtttgaattcgctgtggggccggttcgcacttcggtaaaattttggttaagaattatgaaaaaaatacaaatcatacagaaaccggcttaccaaaaccgaaatcgtcgagtgccatgccgagctggccaaactgctcaacgactcgaagattgaggtcagcagcattgatcagctgacggaaaagttctggatggtctgctacaaggccaaagatgagcatgtggtggagcacagcacaagcaatgtaagaaaagttttaaaatatttaaaaaagacaattgaaattttctcaggtggccattgccctatggaccacctctgctgcgcgaatccacttgctggaatcgctgaaaaaggtgtatggccctgcaccaggtgtagagcgcttcgacacccgcattctctacatggtaaaattcagaaaataaaatgaaaatgtgaagtaattttttaaaatcaggacacggacagcatcttttacgactacctgacgcggctgggggacccacttccgggtggtgagcagctcggggaactcgcggacgagtacccgaatcatacgatcatggagtttatttgtggtaagattagttaaaatttgaccaaaataaatggaaactttttgtttagccggacccaaggcgtacggattgtggctgcgcaacaacgcaacgggggaggacgagtacaagctcaaggtgcgcggcatcacgctcgactcggatgcctgcgagcgcataactttcgagaagatgaaggacatggtgcagaacaagctgggacagccggacaacaacgtccgcttcaactacccaacgaagaactttcggatcaccaagaagggagagattttcaccgtccccttggtcaagcagttcaacccgaccgtgaataagggggtggtcagggatcacgggttgaaggtggtgccctttgggtacagcgacgaagagtggtgtaagtggaactgccctggcgcttgtacctgtctgttcaacccagacctcaatgtgaacatgttcacagaagaggagctgaatgaccccgacattatgccataattgtttttattttttaattttcattaaa

SEQ ID NO: 80700 - DNA, 372 bp, Heterodera glycines
  unsure (1)..(372): unsure at all n locations
atgatggagcgccttgatgaggacaaaaacttggccatcgagtccaatggtaaaggaaataattcgaaaaatgtgccatttacnccattcaaaaggtgctatggcatgggatgcccaagctgctttccngacgatgcgcaattgtggggcggaggagaaacggccggagccctcagggcccgggacgcaaaacgaacccgggacattgcgcgggaattcgaagtggaagtgatttgggagtgccacttgaacgcaatgctggaggacaacccagccatgaaggcgtatttcgacaactgcccggattctggcccaattgacttccatgatgcattctttggcggtacctttttccatttaatttttaactaa

SEQ ID NO: 80701 - DNA, 599 bp, Heterodera glycines
atggcctcactccaagttgatggctcaatgttagagacgagttgtggtcagtgtattttattaaacatattttttattgtgccaataattcaaaagcatttccctaaaaaaggatcgcctcactacgcatgtccagaagtgattagggtaatttattattaatatttaacagtgattaatgtttgaatgtaattaactccttaatttcagggagagaaatacgatggacgtaaagccgacgtttggagttgcggggtaattttgcaacaatttgtgccaacaaattgtgcttaattaaggtaattttgtacgctcttctcgttggtgccttgccctttgacgtaagcgaaaaataaaaattatcatcattattattaaatgttttatccagtattatttaaaagaaatgaatttatttttattttaatatttattaacttttaggacgataatttgcgaaatttgctggagaaagtcaaaaagggccttttccatatccctcattttgtgcccgccgattgccaaactcttttgcgctcgatgatcgaagtcgatccggcaaaaagaatctcgttgcaggaagtgttgaagcacccgtg

SEQ ID NO: 80702 - DNA, 1005 bp, Heterodera glycines; identical to SEQ ID NO: 16311
  unsure (1)..(1005): unsure at all n locations

SEQ ID NO: 80703 - DNA, 1034 bp, Heterodera glycines
atgtccaatgtactgtgtattacggttgttgtatcagccatgattgctggttcttcttcaatttcattgcatggttcgctgttgttgcaaatgcgaataatttgtgcccggtcaaaatcaattagtttcacaagtttttcgtttccattcggattaattggcacaaaaatgagtttatcaatactataatgaagatgagcagcaacttaaaaattttttaaatatttttttaaattcctaaaatgccaagtgcaaaaaataggcattataaaattgatcctagaagactcaaaccaagctagaaactcattttttgtgcttatctcaacgttattatacagggtgacaaataagtcttgcaccactttaaaatttttaatatttcataaaccagaaaaccgattttaatctttttatactcattttgaagcccattaaattctctttaaagtactctgaattataaagaaaaatttctttttctcaatggagtaatagtaccatcaaaaattgtgacccatttttttcaccaaaagtttactatgcgtagacaataaaaaaattcaaacaactaaactaagtgaagcaaaataatgaattcatgtggagaatatgtcataacatagttctttaaaatgagcttgaaatcggtggttattactgtttctaagatcagaaaaaaacatcaaaacgagagtgatcagaaatcgttgatttaaatgaaaacaatagcgcactgagtcaagtcaaaatgaaatgtattaatttagacaaagcgcaaaaattaactagaattattcctttattagatagttaaagccaattttattacaatgtatatggaaaaaagttatgggtctatgaaataggggatacccctcaggcacgcaacttggaaaatattttttcgggcattaattttctaaattaaaattgtttatattaaactaaaatcatataacatacatatgcacacaaataattactcagctgaaattctttggcgtgacataaagccttggtccaagtggtag

SEQ ID NO: 80704 - DNA, 590 bp, Heterodera glycines
aagttgctgctcatcttcattatagtattgataaactcatttttgtgccaattaatccgaatggaaacgaaaaacttgtgaaactaattgattttgaccgggcacaaattattcgcatttgcaacaacagcgaaccatgcaatgaaattgaagaagaaccagcaatcatggctgatacaacaaccgtaatacacagtacattggacatcgggaaatacagtagtcctgaaatatttgttggcaataaacaagttaattaaatgggaacaaataaaagaattcataattaatattaataattaggctgtgggcacaagaaaccacaaacgaaaagtctaaaatgatgtttttaatgtttggaaaaaatttaaaaaattcttgctcaatagtaaaaaattaaataaaaacaaatagaaaaaatggcaaatttttctgttaaagtaaattaatattattattttaaattttttttttacaataagcccatattttaaaagctattttattaataggaaaattaagttgtctgtgaaagcggatatttggtctagagggatttctgtttatgaggcaattctggtggcaaagga

SEQ ID NO: 80705 - DNA, 1153 bp, Heterodera glycines
atgggttttatgctttccatttttatatttgtgctattaaaaactttaaagttttcatcgccatttattaccaattgtaatggatttgtcactgaaaatatgcttccatttgaagaattcatatcaaccaaaaatgatggacatgagcataacatttggaaaacagttttttcaatcgattcaaaaccctcagcagatggccaagtaatatttttaaactatttaaaaaaattttgaaaattttcaggtttttggtggttatatgaatgaagaaaaagtgtcaagaaatgctcaaaattttgtcgaaaaatgcgtggcaataaaaattgctataaatcgcatacaagaacagcagattatcaacggagttcaagttttggaagagattcaaaaaattgaggaatcaaagagaaaacacattattggactaattgattagtgagttacagggaacttctgaggggggggggggaggcatgaggaacatcttggaaactttttgactgattttttaaataaatttttattcaaaattgccaatttttgcgtcaaatttaaaaacattgagaaatttagggtccggcaacttcgataagcgcctgcgggcaaaatcaatttctttagtttgaattaattttttataaatgttttcccatcttttgctcattttgaacttttttaataaagcaactaatgttaataattgagaaattttaccttatttataaaaaacattgtattttttgaaaggaaatgaaatattaaatttaaattataattattttaaaaaaatttacgatttttatagcggcactttgacgagtcgtcctgctgaaactgaaaatgcatattctgtgctcataatggaacttggtggaataagtttacgtgaacaattaggacgaagattacactttgaaatgccaatggaagaagtcgaattaataaaagaaatcaaaagaatggcacagcctttaaaagaattacaccaaggtaattaagaagaaaaaaacaatcaaaaataattaaactatttaaattattctcaatttatttcttattaatacataataattagaaaatttatatcaccattatcagaacagaatatttttattaaatgaagttaatttatataattgggtaaaataaa

SEQ ID NO: 80706 - DNA, 637 bp, Heterodera glycines
atggatgtaagcctttgttactgtattaaacatgataaaaatgaattgttcagggcgaatcttgtctccaatcgtacaaatactttgaaagtcggaggaccgaaattcgtcaaatttttcagtttggaaaaggcatttgtaaaagagttacggcattcaaaaatgaattatttgggttggtataaaaaaataataattaattatttttaaaatgaacaatattttattacgtacggtcattaattacacttttaatacattttaaaaaacgtaaaattaataaaataaaaatatattgaatttactagtttaatattctgtttttcatcttttcagagatgatcattcgcacaaattttgcgtgcacattcgaatgggagactttgtcaatttcggttgggaatcgaaaaaggattttacggagaaaggaattgaatttggatttgaatatttaagggtttgttcgttaatgagcattcattcactgttttaattatgcaattaaattcaagaagaaatttggcaacattttcgtttctgttgttttgctgggagaagaaaagcaatttttgacggatttatcattcaacggccaggcaaagaatgatttaaatatttgcttattaaattaaataaa

SEQ ID NO: 80707 - DNA, 1170 bp, Heterodera glycines
atggggggggggtggggggggggtgggttcccctcttataaaaaagaaaaaaagaaaaaaaaaaaaaaaaaaattttttttttttttttttttttttttttcttctcccccccccccccccccccccccccgccgccgagaaaaaactgggccggagagaaaagaagagaaaaagagggcgccccggcgggggggaaaaagaggggagaagatttgcgccccccccccttttaaaaaaaaaaaaaaaaaaatatttttttttttttataaataaaaataataaaataaaaaaaaatattttttttttttttcccccaaggaaaaattgctgttttttggggcgaaaaaggggggccaaaactggtgtttttgcccccattttttttttttgaggggggtttagggggccttttccttttggcgaaaaattttgggccccaaaaaaaaaaaaatttttaaatttatttggtgggcaaaaagtcccctttccccaaggggttgattttttttgttttcccccgggcccaattaggcggggggccccatcccattggggggcccttgaaagggggggaattgggggaccggttcgaaccaaaagggaccttttgccccctttggatccctggtcaggggtttccgtttccaatttgttaaaaaggtccttttggaattgaccgtgccgcttcccttcaaaatggaacatttttttccgttttggacttcaaaactgtcacttcccatttctttcccttttttcatttttactttcttccgccctttcagaataatgtcgcccatttggaccgttctctccgttccgcttcgtccgctcgtcagtccgtttgttttgtgttgcctttggaccgccagcagacgctcggcatggaccaattgcaaagggcggcaaaagcgggtgccgaagtgagaaatttgggaggggcgggagcatggtggagaatgggaatagggagaggggtgcgtacctaatattatttgattcaaatgccataaatttgcagaagaatgcccagttgcatggatgggaagaggattggcacttcatgccaaaccccgtgtcggcccctgcccaattgtttcagccggacatttccgagtgccaaggggcgcgatggatagaactgatcagaacgccaaccgatcagaaag

SEQ ID NO: 80708 - DNA, 1636 bp, Heterodera glycines
atgctgcgatttgccaacgacatggacttggtgatggccatcagcattttggagcagtacaacagacaaagcgaaggagtcgagagacttggaggaagacaacgaacaaacggtgggggaagtgatgccattctggagcagaagttggcacaattccaccaatgtttggagagggcaggccacggcaagggaccaggcagaatacggtatgcactagggggaagggacagatactgtaattcactgctttgaattgcggtaaaaagcaatataaagccattgagaatcggcacgaaaacaattggcatttgggaatgatcgagagagaataaaagaaaagataaaaatgatactcgaaaacgaacttttataatagcttttctctttgtttagcttccgcctgcgacgcgatcacttaatgaatgatgcatttgaaaaggttttgacagtcggcgcggaacagctcaaaaagtgccaaatgatggtaattggggagagggaggggaggaggggattaagcgactgaaaattggtcaataatcattgatcgagattgcttgggattgattaggctttcggtgatgccaaaacggtcaatgattgtttttagcgagtcattgacacgtttggtcaataatttcaattttcttcaggtgacctttgactgtgaggacgggtgagtccgaatgtctcaccgtatgctaagttttgctttgcaaggttggattacggtggcccctcgcgtgaactgtttttcctactctcgcgagaactgttccatccccggcacggcctcttcgaattttccgggcccaatgctcacaccgtccaggtgtcactcacttattggcatatttttgcgttttgtccctccatttttttgcccgttcagatcagtcccatgtccaaattcgtcgaccatcacctcaaatggcacttccattcttttaattggcatttcattcaccgtttgtttccctttaaaaggatggaattgtgcggcagagttctcggcttggcccttgtggtaattttttccaataatttattccaatttcgggaatttttaaaaagttatcagacaaaatgccaatccctgtttccatcccctgccttataaattcaaatttattctcgaatctctccatttgttttgacttatcaatgtctgtgtttgttcagcatcgctgtctgctcgactcctttttcacccgccctttctacaaaatgatggcccaactgttcgtcccattccccccccccccccaactcctcccccattgttggccaaattggcatggcatttttcagtccgctacgtctggacgaccttcgagacttggacccccaactatggcattccctgtgctggttgcgcgaccatccgatcggaggggccgctgaagaggagaaggaggaggagaatgaagtcactgatcagccgacgacattggcattggcattttgcgtgacggaggaggtggctggtgaggtgaatgatgggaagaggcgaaaaaaagcaacaattgaaactattgcgaatcggttggcatttgttcagacccttggcgaaatgccgaaaaaatgcatgggattggattggaacacgtggaatcgcctgatggatgatatttag

SEQ ID NO: 80709 - DNA, 1758 bp, Heterodera glycines
atgatttggcctgcacaaatggcggttacactaatcccaacaattgcaatcagtgcctttgtcctgcggtgatttattttaatggaaaaaataatttttaagaaaaatgggtaattagtagttttatgatgcctaatatatttgatgaaatttcaaattttatctttggcgacaatttaaattttttcgaaaataataccacaaaatattaaaaattattttttttttgtcaaaattaaaaaaaatcactcatttattgaaaatcgcatttagggctactctggcgctttttgtgacgaaattcctggcaatggtattattattgttattaattatttaaaaaaggttttttaattaaattcttaattttagcaaacccgaactgcttgagcactggcgctctgatggcaggcgaatttgcgggaaacatttccacagtgtcattgacgccaagcacgaattgctactggaaaatattggcatgtttttaattaccataaaaaatttatttaaattaaatgtaattacgcaaatgattaattaagcccgagtccgcggataggcgtgtcatggtcacaattagacgcttggactttccatgcaatcgcgaaacatgctccagctatgtggaagtgaaagcaaaacaggacaaagttgcaaccggtaaaaaattaaaataattaaaaattattattttttattaattaaaaatgatttaaataattaggcgcgcgactttgttgtgcaggagttccagccgctatttatgcggatatcggagcggaagtggtgatcattttgagtgttgatgatgctaatcaacgcaatcacactgggttcgacattgagtacaaatcaagtgaatgttttgtaaattaaaaatttaatacaaaaatttcaattacagtaagcagcttggctcaatttgaagtgccatctgtaaggagttttttttccactaaatatattcccatttatgttgttttcaaatttaagccatctttttcaaatgccaacaacgcaaatcgaggaacaattctggtaaatagcgaaaaaaaattaaatttagttacaaattgtcaaaaaaaaagatttagtatttattttaattatttttttttaattttagcccgctcctaaaattgccaacaacacaattcaatggcctaatatggtaattaataatttaattgaaaatattttaataaattttgccattgtaaattaaaataataattactgacaatattttagccttcttcaacaggcgtaaacagaggaaattggcggcaaattatggtacataatgaaactgataaaaaaaaatcaaaatttatttaaagcctaatttaattaaccccaacaatgcaacacttcgaggaacatttgtggtaattgcagtgaattaagaaattatttatgttaattaaaaaataattaaattacaaatacgcttagaaatgtaattaatttttatgatttagccttattcatctaatgccaataatgcgattcgaagaccaattttggtaaatgaccatttaaaaaatatatatttataatgatattgaaataattaaattaacagagaataatattatcgaattttttttcaaaatgttctttaatttccagcccaacattgcttcatctcctaacaatactgttcaagcaccatctatggtaattgcagaatttagtttaataaaactgaccattttttctaaaagattgctccgacaatttccaacaatttaa

SEQ ID NO: 80710 - DNA, 437 bp, Heterodera glycines
cggcggatcatttggaaaataagctgaaatctgttgataataaaactgattcgatttatcaatggcttgacaatgcgattggcgttatgtgcagttacaaatttgaatttcaaatggatgaaaatgttcaacaaatgcgcacaaatttatgcgaacaaaaaagcattgaaaaagcagcggaaattttgcaaaaaacaactggaaaaagtgaatatgtaattgatctgtccattttcaaaacatttatacaaaaaactcaaaattttacttcgttcatcaaagatcaaaacataaaaaaccttcgcaaatttgttggatatttcggtgcagcaatcaaaaagtgttacgcaggtatttttataaaataaacataaatagcatttttttaagttccaagtgtcgactcgagaaaagtcaaggggcagaccggtttttaa

SEQ ID NO: 80711 - DNA, 242 bp, Heterodera glycines
atgaccgtcacattcaacaccgaattccgactgatcgaatgggtgccaatgcttgaggaagttgctcgtgaatttggctgtattacgccactaccaaaccttgggtatgtttctttcgttttacaacactaactccaacatacaggagccatcgtgactatcgtgtaagcggatgtctgatgattcgcacactgacatcgttgaaccggctctacatttttgatgctgaggactgtattgag

SEQ ID NO: 80712 - DNA, 1663 bp, Heterodera glycines
tttactgtaaataattattctcttgattttgatacttctttttcttctccaacaataaacgacgttgaatttaatattatttctgttggtaaagttcttaaaactttacctaacagaaataacacatcaccggacggtattacctttagactgttaaaaaattgttctctttcgtttactccttttgttactgaaattttcagactcacccttgatacaggaaaacttcccactatatggaaacaatcgattattatccctttgcataaacaaggggaaaaaagtaaccctatgaactataggcctattgccttaacttgttctttatgcaaaattatggaaaaatttattttttgggctatttccgattttcttttaaagaacaatttattctccgaacatcaatttggatttataaagggcagatcaaccacaacacaactaatttcaacccttgaaaattggtatgatggtatttataataataagaatatcgattgtgtctatatagattttagggaaagcatttgatgttatcccccataatttacttttatataaggttcatagaatcggtattaggggtaaaatcttaaactggatatctgactttctttcaaaccgtacctttagggttcgggttgataatactctctcttctgaatataaaatgagctctggcgttccccagggttctgttcttgggcctcttttgtttctgatatatattaatgatttacgggaattaattcctaaacaaatttctataaaattatatgcggatgctgtcaaattatattccgtacataaaacaaaaaatgatagaattgctatgcaccatgctttaaatattctctctgattggtctaagaaatggtatattaaaatttctattgataaaacttttatcatttacttcggaaagaataaccccagggaacaatataaaattaatgataatgcaatttgtgaagttaaaactattcgtgacttagggattcttattgacaataaatttactttttccgaacatataagcaaaattacccgtaacgcctactaccgtatgcgtttacttttccgtgttattaaatcaaagaaaattgcaatttggaaaaatatttatgttagttatattcgtccacttctagaatatgcccctgaatcttggaatccgcaactaaaatcacatattattaaaattgaaaaatgtcaaaaatattttactcgaattgctttcagaaaatgttgtcttccatatattccctatgaccaacggctccaattttttaaattagctactcttgaaaaacgaagaaaaatttttgacctcctaactacttacaaaattttacgtggttttacacatttggacccaaattctctgtttaaaagaactaacttaaatactcgaaacaagtcatttttccggttatatgttaaattacaatctaaaaaatcttccaaatcttttgttaacagatcagtcaaggcctggaatgcccttaataaaacgttaatgtctagctcattaaacacctttaaaaattattagaattgactcttgattctgaaagcaccaatgtataaagaaattattaacttttgaggcattttattgactttgacctcgattttattttcatataaatttttcgttatt

SEQ ID NO: 80713 - DNA, 56 bp, Heterodera glycines; identical to SEQ ID NO: 68623

SEQ ID NO: 80714 - DNA, 1379 bp, Heterodera glycines; identical to SEQ ID NO: 16325

SEQ ID NO: 80715 - DNA, 1367 bp, Heterodera glycines
  unsure (1)..(1367): unsure at all n locations
atggttttgctgngggaggaccagcagccatcgctgttccttctgctcggccccaacggatgggttcagcaacagcaaatgccatntgacggatcagcggcaccgagaaaccgattcttagcaccactgaacaaaggcacaaggtgggaacatcaaagggacaaaaatcgatagaaaaaggaggggattaatgagtgtgggatcactgatcaatcagtgatagatcaatcggggggagagggcttagaaccgaccgatacaattggccaatcaatggccgacattcagagggaaccgggccgatgagtacagcagcgctggaaaagtggagaagaaatggagccgattcgaaccatcgatacgcttcttttgatctgacgaaccaatcacaaatttagacggatttttgatcgaaaaggcaacgaatcacaacaaactgacggagatcgactgcatttttatcgtccccattaatttttttatttttgtgtaataatgacaatttgccggttaaaaagcgaaacggggccaaatattgacaacttaaaaaatagtttaaatattttgaagttaatgcgagcagaattttgttagcagctggttacagtaagtgttaccgtatgtcgagtcgtcatacagtccctccagcgttacggtgtgcatgtagcggaagttggcggccaatttctgatcggagttgaagccgacttcatccttggggggcaaacaaaatgcaaaaacaattttttggcttttccgaatgattaccttcataaagtccctgaattcgtgcttaatagttttggcaaattttctttcttttctgttttttgaatcttcgtgccaatattcgacgaaagtctcaactaaaatttttgccaataaatttatttaaaagtgaaatatttgccgtcttcaaaagtcaaccagctgatgttcatctcattcattctatcggtcagtgaaaggtgcacctgaacaattaaatgtactcaattatttgccatttgcttaattggccacctgttggggcgtttcccgcgaaaattttccaatttcttaaaataaaacaatgaaaaatggagacaaaacgaatgaataaatgttactaaaagggcatttccgttcgactttctcattttccttgtcatttggtgggtcggcaaattcgaaacggtaaggaaaaagaaagaaaataataaaaaacaaaagaaaaaagcgtttccacttgtaaatagacatttttttaaattttcagttgggcaatatcaaaaaatgtgaaataattttaatggttttggtgccaacattacttccaacgagtgaatcgatggtcggaaagtgggcggaagatggattttaataaa

SEQ ID NO: 80716 - DNA, 159 bp, Heterodera glycines
atgattgcacgtaattgccgaaaaaattcgagaccaatttccgaatgttgaccgactaattgcaaaacgaaagccgtctttgtcaaagcgccttaccgagtcaaaaaatttggaaatgtatctcatacatatgcaatttcaaccattaaatttgaagaa

SEQ ID NO: 80717 - DNA, 1275 bp, Heterodera glycines
ctgtacataacggacgcggaattaatcttggagcaaccacgggagaaggtgttgaatcgaaacaatatttggagattgatacaaatgtgtggaacggaatgaatgacaatgatcagattgttttccatgttcgcacaccgcatagcgtggtaacaataaaattagaatgatcaaattactttagggggtgtattttctaaaaattttttggtcatttctttggggtacaaatttttttgtttttgcatttttgttaatgatttttctgaaaatccttcaattaggtaacaaaaataatgaaataggtataactaatagagtagaaaaactcccaaataggtaaggataggtattataaaattgggtccatgagctcaaaaccaacgtaaaaatggtttttttcccgcttatctacacgtattaaatgcgcaaacattttggtatttcctaaaaatcccaagccctattcattaaaaaaagacttgaggatttgcaaattggagaaatttagtaatcgaaggttgctcattgatatgaataggactttcaaagataattagagtggaattgcttacacaaaacagctatgaaaatcggaacttagctaaatttaaaaattttgtgaaagaattttatttatggtaattcatcccttttattttaattttatgtatttttactgtattgaccatatcatatttttctaattgtattcatttctttgttttccgctataagtgcaactatgttgccttgcggtttgctcaaataaataaataaataaataatttttttttgccaaaattataatacgaaaacccgttaacaaatagagccaaaatttcctggcgttgattgactccctaaaactcttttttcttaaaaacttcctcaaaaacggaaaattcattccaagtttttctttaaaaattagctcaaaatcgcaaaatttgtacctatttttaatcctgtttaaatcaagttaaatatattaaaatgattttcatttatctcatctcttttttttctcttttttatctaaaaattagaattaataatttatattgaaaaatttttcattaaccgaaacctaaaaccgagggtaccgattaacaatcggtggtgacctaccctttttaatgtctaaaaaatcatcggcttaaatttttgctaatttatctttttcagactaaatgtgacaaagctacagtacgcgaattacgtcaaactgatcaaccgaaagactttgctgatcaaacaatccgaacagtttaa

SEQ ID NO: 80718 - DNA, 659 bp, Heterodera glycines
  unsure (1)..(659): unsure at all n locations
atgagttcaaacattgtttcggtaaacgaaaatgatgccattggtgacagtttgcctcgtgccacgattcncaccgaattgggcgtcgccgccggtgggattggaatgcgaatcgccgacatcgaccggtaagagaggacggacgaagtgacacgcatttactaaatatttctttgttttgcagacagatagaagtgctgatgcgttgtgagtgtctgacggagcaagaagtgaaagtgttgtgttcgaaggcccgcgaaatcattcttcaggagggaaatgtgcagcgaatcgatgctcccgtgacggtccccttctccttttctggactttcacattaaaatgcaaaccaaacaaacttccgtcttttagatttgtggtgatatccatggccaattccacgacctaaaagaactctttcgagtggctggtcacgtgccggacacaaatttccttttccttggcgactttgtggaccgcggcttcaactccgtggagacatttctgctgctgttggcactcaaaattcgctacccggacaggcaattggaaaattgcgagcagttcagaaatattttcttttgaagaatcgtgctgattagagggaaccacgaatcgcggcaaatcacacaagtttacggttggtgtcaaaaaataaa

SEQ ID NO: 80719 - DNA, 1314 bp, Heterodera glycines
atgtctgcggaatcgccaacaacatcacaacgccgtgctcgcagtcgcaagacgaagaaacgtgcggtcagcgctggcgagaccaaaccactgcgacgctcggcacggattgcggcacagaaagcggcgaaggaaaaggcagccaaagtgacgttttcggacagcattcctcctccgtcgtcactcattcatttccccttttttcagcagaaagctcgtgacggctccaccgcgtcaacgaagtctgctggtcgtggtcgtcctagtcgctcgccgaagaagtcaggcccgaagagtcgtcgctcgcccgccggtcgtggaggaggacgttctcagacgccgcgcaagaagaaacaaccgatgaagaaggcgccgggcccgagcagtcgcactcctggtcgacgcgtgaagaaaccgccaacgaagaaatcgcctgctcctcgccgtgcaaaaacctccaccaagaagcgcggacgtcctgccaagaaagcggaacaagccgaaccatcggacagcgggacagccgccgacagtgaccgcgacgacagcgaacgtgagttgaaacggggtgtgggaatggcacaattccaatttgtgtccattaattaaactgaattttcagattccgaagagagtgccactgagacgaagaagaagccaacccgcaagactgccggtggacgtgccaacaaacagacgaagtcgcgtgggcgcaaaacaaccaagaagacggaccaggaggaggagcgcgccgactccggatccgaggccgaagctgcaggctctccgcgcgacagtgaacgtgagttgaatgggggtggggaatggcacaattccaattgtataatcctaatgaaattgaattttcagattccgaagagagtgcctcggggacgaagaagaaaccaactcgcaagagcgcggctgctggacgttccacgaaacagaaggcgtcgcgcggaggacgtgcgggaaacaagaaggcgcaggaagaacgctctgaatcgccaactgaatcgggctctgatcgcgaggaggatgaagaatgaatgagccagccggagaagaatgctgcttcacgagaccaccgcgataataacactaacccccatttaaaaaaagagaaattgtatctctatatatgtatgtatatattgtatgtccatatccctgtggcattgtcttgctgaatgtaattctcccacaaatggttgttgttctatttaaatatgccatatatatgtgtattttttataattgtaatatgtttgccctgtttatgcatcttttatggtcatttattctcattgccga

SEQ ID NO: 80720 - DNA, 2791 bp, Heterodera glycines
atggacgacctgactttggtgccgacattctttaatcagcccagcgcaagcggtgaacaaatgaatgtgaaaaatgatcatacagtaacggcggaaggggaagaagttacggtaattgaagcgactgaaccgccgaaatataagaaaaggcaaaaacaaacaaagcaaataaaggcacaaaaacttaagccattaaaacggcaaaaatcgtccaaagaggaccaaaacaagcggaacgcattggaaaatggcaagcgaaacatgccagcagttggccagcaaaatgccattcaaagtgcaattgttccgcagaatatgccacccattggcaatgccattggaatttcgcttcaaagtgtcattgtttcgcagaatgtgccacccattggcaatgccattggaattcggccagccaatgccgttgtgcattcatttttggcggcgccaacagagaaacaattcaatacaactaatcaacgggagcggtaccgcattgagccgatcggaaaagcatcgacagcagaaaaagcagcggagaaaggcacaattgggacggaggagcaaagacaaagtgcactttttgtgactttttcggttatggtaaggctgccccccccccattgtttgaaccaaaaattagtaatttaaaaatttgaattttcgaccatttgttcgagtttgggtctggggttccgaattggtcgaaatggatgctgggtacataatcagcgatcccgaaaagcccagggatatgttttcatgggctacacccaaaaacgttaccgtatccttgccgcagaaacatcgctggacaaaacgtcgccgaacataacatcgccgcaaaaaaaatattaaaatttttcaaaatttcaagaaaatttaaaattattttagcttttttgaaagcctacatttataaaaactaaatttgctgaatttccgaaaaaagaaacttgtaaaaaaaattttcctagaattttgttaataaattttttttttgaaattttctagaattttttttcacaaattcagctacgtaactaaaatttttgatctttcattcctaaaattaaaatttttttagcggcgattatgtcccggcgacgtttcggccggcgacgttttgtcctgctctatttttcatggcttttgaaaattaaaaaaaatttttcggaaaatggggggatcaggcttactttacccttttcttttcgaatttgaatttttagtcgattttgtgcgctatgtttttgatcagagtttatttgcattgtgcttatcgccacaagctttcaataaaccaatggctcagatcaaaaagggtgccaaaatgagcgatcaaatagcaaaaaaacattttaaaaagctatggaaaagtttgaacgtaacggacgcggaaacggcatttgaacgtttgcaattgctgttggcaaaagcaaaacaaaatgaaaattttgccacaaaaatcagtgaaattcaggcgcagaccgagtttttgtttggcaaaacaatcttcagcaggcaattagcgagaattaaaaacgctaattaattaaattaattacattcatttttcaaaatgggcgctaaagcaatgcccaaataagcataaattacctaaaattgctaaaacattgagttttttttcttcttaaattagttaaattaagcgtcaaattttctggttttgaaattttataaattaaaatgtttagaaattcttaaaacccactaaaatggcacacaataaggctgtattttcacaattatttttcaattgtaaaatgggtactaaaagctcgaaacaatggccaaaatatacgaaaaaattagcagaaattagccaaaaattgctaaaacattgcgtttttttctgaaattttggttaaattaagcgtcaattttttttctttctaaatttaatagattaaagtgtttagaaattcttaaaaactcacactataaatggcacacaataatgccgtatattcataattcttttttttgaagtgacaataaaaatgcttccaccgcgactcatttcaaggtttatttggatttgatgaagcatacatttggacaacgaatttctgcatttgaaactcttacaaaattagaaaagcgtgtcgggattttgcagtttttctatttgcgtttgtccgggaaactgatcagtgctttggaggcgcctttccacgaccaatttgatcagaaagtggtattttttatccattgcattagtacaatgctaatcaaaatcatttcaatgctttttagcgtcattctttttttaattctctaagattgatttatttttcgaaattttcttcgataaaatccaaactttgccttaaaaaagcaaaaaaaaaaaatttcgaacattcttggactttttgccaaaaatttagatgccagaaagctatttttgtaaaaaaaatcccccaaaatatttgctaaaaactccaaaaacaccaaaatatttatcagccaaaagtccaaaatctttttttatttgctagaaatgctatagaaaaaataaaataaaaatatataaatccggtctctgcaaataacaaaaattttttaagcatttatataattagttaaatttaaatttatttttatttcaaaggaaaacaatgcgcagagaacggacagagaaacgcttttgttttggataaatattgcgaaaacacaaataattgaagaacagcaacaacaacaacaacaacaacaacaacaacaacaacaacaacaacaacaacaacaacaaaatgagtggcaaaagatg

SEQ ID NO: 80721 - DNA, 280 bp, Heterodera glycines
atgtcactacatattttatcaagaaaatataaggtttgcgcaaaagttggtcatttgttgacaaaaaaactgttaacaaatcgcgataaatgtcgaaattctgatttagaaaaattttcgatccgcaccctggaataaaataaagtaaaacggttaataaaaaataattattaaaatagaaatttgttaataaaaaatttttacagtcgatagcaatctcatagattttttttagttctctactcgcgaagaatataaatcataaaaaatttaaagaata

SEQ ID NO: 80722 - DNA, 884 bp, Heterodera glycines
tcaaagatcaaagtgcacaagaagcaaattgaggaggcggtaaagctgaaataaaattaaaatttatttaaatttaattcgatttttacaaaattgtaattgttttaaattgaaatatgctaattaagtgcatccaccctgtcagccgccccttgagttttttttaaatcttagaaagtttttttaagaaagcatcaagtaaaaaattgacaaattttcaactattttttggaaatttattaaaaaatacttaataattcatcataattttgaaaaatggctgaaaaatttttcatttttttttttgaaattttctttggcaaaattccctaagactttttttttaaaatttcttaatttgtaattttcggggggaaggcacgacggatgggaaatggcatcatccgaatttttagagcacggtagcggtgggatttttgatatacgtacacaaaattttgttaaattttttttgtgtgaatttttaagaaaaacctaccacaaccctaattaaccatatttttcaagaatttgtcaacaagaaaatttacattttcacatgtattagagggttatagccttttgcacaaatgaaccattgaatttctgctaataatttggcatttttttttaaatttaattacccccttcatttgcaggaggaagtgtcggcgatgaacacacaaaagtttcgccaaatccaatcccatctgggcgagtcggaggagcgcgcggacgagccggaaaactccctgatgcgtgtccgctccaaaatccgtgtcaacgcggcaccgaacgcgttcggcacaatgcgtgccgcttcgtcatccgcgctgatgcgtgccgccagcggggcaatgattatgaatggacaatcaaaataa

SEQ ID NO: 80723 - DNA, 537 bp, Heterodera glycines
atggcggctgaacccaattatgaccttgtgaaagaacggatcaaagattttttgcacgaattttacattgaggacgaagaaggctgcaaagtcttcaaataccgagatcagattagtcaaattgctcacagacagcaaattgctctctacattgaacaagatgatgtaacattgtataaatactgctcatcccatttggcctttttaggtgcatcttcatgaccccgaactttccgattggattactttcaatacagtgcgttatcgacaactcttttatgaaattgttcaaaatcttgtccaggaaacaattggcaacaacgaagttttgttttgatattattcacattttaatttacttttctaatccagcctgcggttattgatgcgcttgacgcatttatcttccaacgcctttatatggacaaaatgttgaaaattgccagaggtgaaatgaatgcccgagaagatgacccatctaaggcatatccacctgaactccttcgcagattgtatggtacctttaataaaagataa

SEQ ID NO: 80724 - DNA, 194 bp, Heterodera glycines
atggaggagctgtacaagaaatacgaactgaagctggacgaaattcagcggggcatcgccgaacagctcacttacatgtgcgacggcaccattttcaattcacaaattttgaaatttcatttttttaaaaatgcttcagggaacaggtgtgcgtcggcgccgagcaccagggctcaacttaccattaccatcag

SEQ ID NO: 80725 - DNA, 1581 bp, Heterodera glycines
  unsure (1)..(1581): unsure at all n locations
atgctgctccncagtgggaagactgcggggcaagtgcgcgaacgggattccaagcggatggaatttctgagagagaaggtcaaccgagtggacgtctactgggaatgcgaaatccatcggatgctggagaggagcaaggaaatgcgcaaggcatttgaagactatgtcgatgatggcccgctggtgatccgcgacgcgtttatgggagggctaactggaccgctgaagctgctgcgcaaggctggaccgggagagaaaatctcctattatgacttcacatcgctctacccgtacataaattgagcacagttaaatttgtaacaacttttaacattttttccttcacagttttaccacctgctaccccattggcactcccaaagtgcatgtgttgaaccaggaagtggagtggcgcagtgcagcggacaacccctaccctttggcattgctcaaagtgtgggttgtgcctccccgacgcgtcgacgtcccagttctacctgtgaaagttggagagcggctttgcttccccctgtgcatcacttgcgccaaagagcacccgacaggaggagtggacaacgactaccactgcgagcattccgacagacagcgggggtgggtgagcacgtgcacctccattgagctcaacgaggcgttggacgagggctacctcgtcacaaaggtcttccgtgtcctcgagtatgagcaaagtgacgacaagctcttccgcccgtacattgctgagtttatggcccagaagatccaggccagtggatttgacaacagtatcagaggcaatgcggagaaggaacaacagtttgtccgagagtgcgcagagcagtttgacatcaccatcgacccaaccaaaatggcggtcaacaaagggaagcggtccctggccaagctctgcttgaacaacttatgtgagttttgtcgtccattattattatattaaaaaaaatagggggacgattttcgcttaacaactttggtctcgctcaaacactcatcactgacgacccagcaactttggcggagtacctggacaacaaatccatcaaagtgacatcaatcgacgagttggacgagcagcacatactcatcacctatctgcagaagaaggattgggtggatgagcactcatgctcaaacattggtgagacacacacactcacaataaattgttaaagtacttcagtcatctctctatggaccacctcagcagcgcgcctcgttctgctcaaggcaatgcagaaggtggtcagatcaccgggctcggatctgttgtacactggtaagtcaaactacaaaaaaaaattttgtgcacaaacatttattttagacactgacagcctcatcctcgtccacccggaggagcggtgcccgttgaaaactggcccccacttgggccagttcaccgacgaataccccgaccacgacattgtggaattttgcagtggcggagcaaaacaagtgcattttcagttcatttttgtttacttttcaattttaccacgctttagtatggtctttgtctgcgacgcaagggcgcggaggcgggagcccaattggaacatgtgctaa

SEQ ID NO: 80726 - DNA, 405 bp, Heterodera glycines
atgaccaaaactttcttcgtcactggaatttcggcacaaggcgccgcatttcttcctgcatatgggcaattgcgcaacccgttcaacatcaatgtggcggcacatttttatgcacggcaccgcataaagcttcacttcccgtatgcaccgtgcataattgaacgcttttcggggggaggggaggaccggcactatccaatggaacttcttgagctgattgatgacaacatggacatggacatcaacaacaacgagcattggctgggccgtcttttcactgaaattgacgacaaacaatcgtcgtcaaactcatccgacacaacaatgcgcctagtatttgagggagacatggatgaagacatcggacgcaatgaatgctcacagagtactgtaccgttatattag

SEQ ID NO: 80727 - DNA, 267 bp, Heterodera glycines
atgattgcacagaattgccgaaaaaattcgagaccaatttccgaatgttgaccgactaccgtatatgctctaattatagcccagtctctattaataccgcagtctccaattatccccccccccctttctgaggagtttaaaaaataatcacccagtctccaatacggtaattgccaaaacgaaagccgtctttgtcaaagcgccttaccgagtcaaaaaatttggaaatatatctcatatgcaatttcaaccaataaatttgaagaa

SEQ ID NO: 80728 - DNA, 1097 bp, Heterodera glycines
atggtgagtcatttaagaatccgttttaaaattaagtactatggtttttaatcttttttaaatcactttgagtccaaatttttaggaaaattctgtttccatccggtatactggcactaaaacaaggcttataatcaggaacaaggcattttccggatttgagtctcggttggcccaattcaaaaagcctggctatttaaatattcggggttcaagaacattactagcctagtggctttgttaaactttttttttttggaaaatttaattattaaatgaaaaaatagctaaaatttatttttattttttaaaattaaagcgttgctgccttttctctgtcgctgttgtgctaattgtggcacttttgctgttggatgttgcaatgtgcaaaaaacaccataacaaaaggaataataaaattgcaaataataaacataaaaactcttcatcatcttctgctgattcatcctcgtcctgttcatccgagtcggacgaagatgcttcaaaattggctgaatttttgaccgatgaaggacgacaaaagcgacgatttcgggcaaaaagtcgggtggctaaatgcaatcagcgaagtggaggccattggcaggtcatattatttgggcggagtcggggcgttgtttaaaaaaccataattatgaaaatttttgtcgaataattatttataattttgctctaaagcataaatttttaatttttgatatcattcgatagcactaactgttctctatcagtctgcaaaatttcaaaaaatttcgttaagtttcaaaaaagttatagctcgaggaactcaaaaaaccttggtttttgaacaatttttgccataactttttttaaagttaataaatttttttgaaattttacaggcttctaaagaacacttatttctatcgaatgatttcaaggattaaaatttggttattttagagcaaagttataagcaaaaattttcattttgatggttttttaaataacgcacataatgatggtttttaaataatgacatagcaccatcttattcattgtttttgatttatcgttttcagggttttctgaaaattagtcaaaatatcaataaa

SEQ ID NO: 80729 - DNA, 833 bp, Heterodera glycines
atgtttaattttggttctgctgtaatttattttataattcttcaacatttctcattttcaatttcaaatgcaaattctttagtgagtttttgataattaattgctaaatcaattttaattaggcaaacgacaatttgctaattgcatttatgaaaggtcatcagaaaattcaaatcagtgaatattcaaagcaaaaatacgaagctcatcttggcattgtatattatatgagaacgaattggaaatgtgacaaaatttggaagaaatttgacgaatttgaactgaaacaatgccaaaaatatcgaaaatatttgaatattttgtatgaatttttgtacaaaaaatacatcggaattccttcagtgaagccgaaatttgcacttaaaaatgaaaaatttgaatttgatagtccaataattaatgtcattaattgccttgccaaaatttcgcagttttattttaattcaaaatggagtgatcactatgatcatatattaagcaatctgttcttttaccattttgatataatattattgaatgagaagagaatgaattacgaagaaaaatttgaaattgagccaaaaatgccagttaatgaaatgattttgaaattggcaatttacacagcaaatgaatgccaagaaagtgttgacgaaataattcaacaaaattttaaagaaaatatgaataaaatgctgaaaaatgcggaagaaaaggcaaaagaaggcttttcgtcatggagaaacaatgccgtaaattatgacaagcacaaaataattttgcgtttgaaattcgatgactcaaatacttgggttggcattcaattaaaataa

SEQ ID NO: 80730 - DNA, 204 bp, Heterodera glycines
atggtctcttaccaagaacactgtacagggactgccatgggagacaagtaaagacaagactggttgattacacacttgaaaagtcgtatcatttcagagatgccgtcgaattgcgcacctgcactttgttgaccgactgcaacaattgtctgcttcaaaagggctgcggttggtgcgagagcagtcaggtgaaagatgggaagg

SEQ ID NO: 80731 - DNA, 377 bp, Heterodera glycines
atgttcgaattcggactcgggattcgaaataggagcgaaatggatgtttggcatatatccgaccaattcagtcctaaacaggcattcacgcgaaaacgtcctgccccgattcttttgaggtgcatttgataatttgtgagtcaaaatttgattatccaaaaaatgggtgagaataattaaattaaattttttaatttagcctattgcccagatcaaaacccacactttgatttaaaactactgagaatcgggaagcaaattagccataaaatttgccgaggcttttgcaaaatcctagctcgggattcaagacagaaccctgagagtatgtgaaaaccacagaacgactaaccaaaaaattaaatgttcattgccaa

SEQ ID NO: 80732 - DNA, 100 bp, Heterodera glycines
atggactcgaacctccttcctttgtccctttactatcttacaaaaaccactgagccacacatgcaaatctttattgttaaaggagctcatttctgggaag

SEQ ID NO: 80733 - DNA, 753 bp, Heterodera glycines
atgtgcacaacggactcgaacctccttcctttgtccctttactatcttgcaaaaaccactgagccacacatgcaaatctttattgttaaaggagctcatttctgggaaggtgtgtatatcaggggctgacttgtctcagaaaagacgagagcgagagttcggcgagagtcccccaaaagacgagagcgagagttcggcgagagtcccccaaaagacgagagcgagagttcggcgagaggcgagagtccccaaaaacacgagaggtcccaaaaatggtgagagttgtcccacccctggtatatatatacacaccgtttcaaaaaacgagatgtgtaccaataaatagagagtgccagagaaaaacattatctttttttctctaattttttgtctccttttggcgtactatttaatatttttattattaggaaaaacaacatttatttcgtgacgtttaacttttttcctgcacgttaaatccacaccaaattttgtatatcgatagagaaaaaaataatacattcagtaatacagccattttttggcttatacattatttcatgagttattagaaaaacaaattttcgaagcctcatatcttttttcaaactcatcaaatcgcttagcatttgcttagaaaaagcttctcattatcaagagctttcgaaagataccaagattatccaatttggttggcaaaaaccttcaaaaataattcccaaatatcgtgattttttaatattttgtacaaaa

SEQ ID NO: 80734 - DNA, 80 bp, Heterodera glycines
tagagaaaaaaagataatgtttttctctggcactctctatttattggtacacatctcgttttttgaaacggtgtgtatat

SEQ ID NO: 80735 - DNA, 1470 bp, Heterodera glycines
atgaacagacggtaagcaatttttaaaaaaattaaaattttaatttacccaaatttttttttcatctttcagttggatttgtggcgacgtttggatggacattctgccatcttttgaccgtccccaactcggactcaaaatggcattgctttccgaccgtttcgatgttttggtggacaaacatttcgatggaaaaagcgaattgacaatttggaggatgatcagagttggcaaggacgaaggaccaaaagcgaaactgtctgtacagatcgatgacaaatttgtggattttcctctgccggaccgtccgctgccccacaaaattcgttttaaggatcttcggataaagcaattttatacttttatatgttttaaagcatattttatattttatcaggtatattgaccattccgtcattgaatttatccgtgtcaacaaacaaatttgggacataagtggcaccaatttggggttgtctattgcgtatattcaacaaatttgggatgtttttgtccgagaaatttggcccgtttttgcaacaaacattcgccatttgggctttcgcagtggcaacgatttggacaatttgtgtcgtctcatttcaccgacaattctcaccgatctcaatcatctgaattcaatcggtttcaattatctgttgcccgacgtaattgctgacgatgggccaaatgcaacttctgctggccaagcattgttcaaatggttgcatgcgccgaccaccgatggacggccgaaggaattgaattgtaatggttatttggtttcacaggatctcgaatggatcaacaatttcaaagaggtggtccttgcccggtgctatgtcattataaaaatccatcaaaaagggaatcgcccattttggtgcagaacgacatatcatttttatttaccaaccaaattaaatattttgcaggccaatagaggaagggtaataataccgatgttagcccctttttcgaagaagaaaatttttgaaatttttttcgagaaaaaattatttttgtggttttagggtcggagaatccgaatctatcattaatttcgacccatgtcgaatcctgaactcgggttcgcgcaaaaattcgaattttttatttttggtctaaaatggctggaaacaaactaaaattggacaattcactaataaaaaatcatttaaactttttgtttagtcatttctccgtgccaccacttcggtcagttacaatgtgcgaattactttttataagacaacaacgccaattgagccatttgaattggtgaatgaacggaccaatgagaaactgacatttatgaagaaagatggcggtggtgaattgcttaatgcttggctgttgaaacggtgcccaattattgttggggagagggcggcggcggttcaaaaagacgacaatttggaccatttgaacggagttcacttcagtctttatggtgattgcattgggtga

SEQ ID NO: 80736 - DNA, 2356 bp, Heterodera glycines
  unsure (1)..(2356): unsure at all n locations
atgttgtcggaacaagccggactaatgggtactgtaacacagtttaacagaaaatcttttttgttacggtagcaagttactaatttctttcctttctttacaggacgtgactacaaagatcacagatgtcagcatgagatgatgacacatcgtcaaatgatggtccaagaattcctcatgtcgccagaaattgtgatgggctgtgcccaacaaattgacaagtactgctcgccacagggcgacatcgaatcgaacggcaaatcggcgcattgtttgatggcacattcgcaggagaaggacgaagaaaaggtggggaccatttatccgatcagatcagcattgattcagattcaattaagaatattgtacattttttcaaaaatgtttttaaattttgctatcactgatttaggatttccattgtttttggtacatctcacaataataattaaactttaacacgaacggtcatgggaagtgttgaattcttaggcacatgatttacaaaataaaaaactacattttggcaaaaatatattactattttaatatgcgcagttgaaattcttcactgcctttgtggaccagcagctgaatgacgcgtgcggccaagaagtagtgaccgtcgacaattggcacaaaagtgccaacaaattgcggggacaggacgacaaagtggcggccgacccaggaccacaggtaaagccgtccatacggcctcaaagctctgactttgccattaaatttacaaattttatagggcgacattgagccggagggcaaaacggtgcacagtttgatggctcatgaacaggaggaggacgtgaaaaaggtggggccgattggctgatcaggacagatttatccataagtctgagcattgttttgacattttgtcggctttcaacttttttgttatcattaccggagtttaacaccccataattttggccaaccatatgaattctgattataaataatataaaattaattatttttgaaaaacctggaatagaagcatgctttcaactggattaaggacaaccttataaatggaaactttttttttggataaatggttaaatttcactaaaaatcctcaaaaaatgtgatataaacgtatttctaaaaaagaattaattcatacctttttataaaattatatcaatagcctgtaaaataaattaggtagaaaaatattgaaattaaaagaaaaaaacgtaaaaataatcggtggaaagtgggttgacaaattatggcgcgcagggaatcgaacacagaccaaaggctgtgacaaaacaaacaaccaacaaaatgcgccatcccaccgctgcactgatcgtcatagaaataaaagaaaagaaataaatttcctcattgatagccgtgttgggacatttcctaaatccgtcatcataaagaagataaataattatagcctaataattaagttctttgtccatgaaacgaattcttcaaaattaatgccgtaaataactttaaacaaagaataatattaaaataaatgaaaaaaagacaaattttttctgttcatttgtcaaatttagtattgcaaagaagaatttcacagaaattttatttttaattaattactttcagggaataaaaattcaatgattgggattttccaaatatccctgtaaacaattattttcatgaaatgaagaggccatttaaaatttataaaaattctgttatgagccattaaataattttccaaaaaattaactatttttgatttaatgaagatggagagaatttggcactttcaacttttttaaaacaacagtaacattgactaaattatcagatgtatgtttaaattttgcttactattttttgggatgatttaaatactgaattaaataatattcaagcccagtaataaatgtttacagcttccagatttcaaattccttgctatcaccaggaaacggatttatatgtttttgaccttttgtccactacaatacttaatgctacaaaattttaataatttatcaaattgacacatttcccggaagccattattatcattaaaagggctgggattttttacacatattttagattgagcacatattttggcattttttggttcttaaaacctgttttgaaagttttttgcacgattttaaccctaattattaataggggaaaaaatgtttaaatgtgtaattttattatttttattttgttagaaaataataaaaaaatttccattttattttttcagtggtgggacaatgagcagaacaaatatgtgcagccgaacctgaagtaccagccgtttgacttncagtgtctgaatgaatccattggcatgcttatgtaa

SEQ ID NO: 80737 - DNA, 1062 bp, Heterodera glycines
atgtaccagaacttgaccctgatcgtggagcacaagttggtggtgtcacatgttgctgctgtaaatgagaaccatacgtggaaagggggtcacttgggaattcgtacaaacgcaattcgtacaataaaaattttttacaaaataaagctaacaataagcataggcccaagcaagcgtctatgccattgtacgaattgcctttgtacaacattgtatgagttgccttttgtacgagttgtcatgacaccggagagggagggaggggggggggagttaagagtttgtgtatggtagcgcagttttacagtaattgtttagtctactgtaatcatatgttttcaaaagaaattgggtaactttttaattttttcatttttcagttgcaaaggcgccaaagctaccaaggaaattcagatccaattgcgcgaccttagccacaagcaattcaaagtgcgttttctgggcaccaaacaaaatgccaatttgcaaaatgccataaagggctcctcatatcattaaaaatttttcatttttttagaatactctttggtctgaatgtatgaaaaaatattttttgtacgctgttgttaagctactttccgagtttttagtgttttccaggtttttcgagcctaaaaactttaagattttgaccttttgcataaaattccttaaatgcgcaataaaaacttaaaactttttagcctattttctaattttactgcctattttggggagtaaggccacaaccattggcagtttttaatgccgaaaaaatatgagccagagacatgacgaagaagtgccaatttggcaataatcatagcatcattaaaggataattgggcggaactgcgtggcctgtacatcaacctgatgaacccgatggacaccagacagtacagctacgtggagttcaaatacatcgatttggccgagaatttggagggcattcaatggtttaacatggtggagacggaggacgacggattctgaagtgcttcttggaagatccgagaaattgggagacggagggaaagcgattattaaaaaaataataaa

SEQ ID NO: 80738 - DNA, 177 bp, Heterodera glycines
gagccctttatggcattttgcaaattggcattttgtttggtgcccagaaaacgcactttgaattgcttgtggctaaggtcgcgcaattggatctgaatttccttggtagctttggcgcctttgcaactgaaaaatgaaaaaattaaaaagttacccaatttcttttgaaaacatatg

SEQ ID NO: 80739 - DNA, 2583 bp, Heterodera glycines
atgaacagaaaaataatgtacaccgaccggatccgaactccccccccccagaagatgactcagaatccccaatcacacagggattctgaggtcttaacgatgtccaaactaaaatctgatcacgtattcgtgatcagcggcccaaataacccctaaagacatgtttttggatggtttttgatggaaaaatttttccactcaaaaatcctggtcacccccctttggtcccgaatccaaaaatcacttttatttttgtatctttttttaaaaatgcgataaaaatgtgaaataaaatttataaaatagagaaaaaaaatgcggatttttggaatattttatttttccaaaatgacttttcagaaccgagttatgaaattttttctgaaaattcgaaaatttccagaaattctggaataactttttttcttttgaagatagaaatcccaaataaatcacataaaattctccttatttttctctatttttagagcttaaactcacttaaacataccaaacctgaggttagttatgagttttccaaaattagcccaaaatcccaagggccaaaaaattgccaaaaaataaagaatttttaaaaaattccaaaaattctgaaacgtaaaacaaacatcatattcgtgctcagcacctcaaaatagcccagaaaaatatttttgagcccctttttcaacccaaaaaaaatttttgaaaatttctagggggcctagctcgaaaaattttgaaaattttcgaacatgtagtacaccattcgatagcatttaaaaagctctacaattttgccctaaggagttttttcgataaaaccaacccctgacgagttatgggcccgggactcaaatgtcccgctgaggccaaaaattttttctatttccgggaaaaaatcgaaatttttccgaaaaaaataccagtcgatagagctcgaaaaactatgttttggaagtggtcttcgtttttctgggaaaattcgttaaaaaatcctaaaattcaaaaacccgaaaaccgttttttaggcctagctcgaaaaattttgaaaattttcgaaattttaaaatttggaaaaatcgagctttcgaagctctacaatagtgccgctggcacccctgcgctcaggtcaaagcctaatgagttattcaacggggactgaactggacaaatttggtactgaaaagttctagaagcacccagcccagggggttagagatagaggcctggaattttttttaatttttagccaacatttcaacttagggccctcacagcgggaattttttgatccgagttttagaaaaaaagttacgggccctaaactgcaagaaaaagtgagaaatcggtccccgggactcagttgggcgtcgagaatttttttctatagttttcccggattctcctcaaaaagttgtaagacccttccactactttcagacccgtcccattagccgttaagctcaaattagtttttgaaacgaaactccttgtcaatataacgtatatagtaatttacttacgaatttttcaaaaagggcacatttttggaatgcaaatccattttttaaataagtatttgggtattcttataaattgtttttgataaaattgccaaaatctgataccaaataccacaaactttccacattgcaaaaacaataaaagaaattttcattcactttttctcggtcccgcgttttccttcagattctcggtcccattaagaatgtttaaaataataattattatttaaacaataaagataaaaatcgtttaaaaatatatttttgtaaattttagggccccgcttgcggtgacccgttttacgaattcgcgaaacactgtgccatggtcaaattttatgaaaataagagcccgaagaaatggatcgctgagaataatccgggtaaaaaaaaaaatttcaaaattcttcaccaacctgtttaaagactcattgctggtgctgatcgacggctgcgtggtgtgtgatgaggaagggtcgagtggaacgctagcaaatccgaaggatcagcaaattgaggcataaaaacgggggggggggaggggggcgagggattgcaaaaatgataatatcggggcttcgggatggggaagatttctgaatttttctttgtctcaaattagagtttctgaaagaattcgatttcccgaaattttttggggcttaaaattggacttccggaattttttacgccgcggatttgtgactttttgaattttttggcctcggaattccgttttttacctttttgtttaattctatttccaacttctttaggcctctgaattcgctttccgatttaaatgaaattcccagggtatagtattcataacaatattttaacaagtcaaaatttttcaatcatttatttggcttcaaaaaagtctttttgtttttttaatttaaaatttataaacaaaaagaatttttatttgtaaatttgatttattttatgtttatttttttacggtcttgggggtttccatttgatgacatattttcttctttttcagccccttcgaattttaaaaactaattaatagtgttaaaataaa

SEQ ID NO: 80740 - DNA, 742 bp, Heterodera glycines
atggataaagctgaaagtaaatttgaaagtatttaatagttcattaatattattttttaatagacaaagagattgtgaaaaaattgagtgaattaatggaattgatcaaactgaaaagggtagagaaaggtaataatcttaaatttaataaaaaattttaaataatattgtttttttttaatagtgaaaggactcaaagaaaaatttgttgaattattggaaaaagatgaaggtaattttgaataaaagtcaacaattttttaaagtattatttttataatagtggaaaagctcatggaaaagctactggaattgaaaaaattgcaagtggaaaaagccatgggtaattttaaattattattatttaattaattaattttataaattatttctctaatagtcgaagagctcttaaaagaattgaagaatgtttataaagtataaaaatgtgaagagaaaggaaaacatcaaggccggaagaaaagcagaaaaaaggaacaaaaacaaaaaagaattttctcccattatccaacatttcttttttcactttatctaaaacgatgtaaaaaattttgcacatttatttttgaaccaaattcttcgtattgttattaggctggacacaaattcgacaaattcatctgttttatgtccatgattttcatgcgtatacaaatttatttcagttctttatccatcaaaaaaaacttcggtttccaaaaactttcatttcgcctactaa

SEQ ID NO: 80741 - DNA, 1217 bp, Heterodera glycines
atgagagctcagccaacaaatgttgtgcagcaacagcaaaatccgccgccgacaaatcaggcgatggcacaacacaaccctcagcaggaggtgatccggcaaccaacagggctaagtggcattgaatatgctatgatcctggacaggctgcacgacattaaaggaaacgagggaagtgattcgatcctcaactttttcaaaaaattttcacaatatacgagtgaatggccaaacaaaaagctaatcgaatcattagaagccaaattgagtggccgagccgaacgtgcctacaatgctgctttagcgacagagccgttcgcgtacgaaaacatcaaacgaaacattttgcagcagttggaagaaacggattgtagggagatgagtgcttttgacgacctcatgaacggtgtgtacagaaaatcgggggagaacttagacgatttggcaaatcggatttcgaatttggtgcgtagagcgtacccgggattaacccaaaatttgtccgatgattactccataaagcatctgatacggagcttaaacaaccccgagctcgctctaagtttggagttgcatcgccgatccgagatgagcttcgacgagtttgtggctttgacttcacgagccgagacaacacaaagggcagcgaaaagggcaaacacagagcgattcaagccaaataatggaagaattttccaacaaccacaacagagcgggcgtgattttggaagtggttttaagtcaccaattacccaaagccccgtggtttgctataattgcaatgaacctgggcatgtgtcacgtaattgcaataaagcattccacccaaatcgtggcgaatcatcaactcccgcccaacaaaatcaacaatgggcacaaaattctgctgcaaccggtgcaaaccgtgtctttttgaattcaaaaaacggaacatctccagtggttcggtctcaaaattttctgaagcaaaattgcatcagaatggaggaagaagtgagaactgatgctactgttggtggcgtcatgcttgaaaggaaagtaattgatttttttaaaaattaatacagcaaaggccaaacagaaccagagccaacggaggaaaagccgattatggggaaaatggtaacggtggaacttgttattttggagacaccaacaactgcaatgttggacggtggagctcaaatttctttgatcggcggcaaattcttttatga

SEQ ID NO: 80742 - DNA, 213 bp, Heterodera glycines
atgaatgaagttaagtgccaaagcgtggcaattctcgaatgtttgaaaagtcagccaaaagacatgtctgatcgagagtttttacctctcggacaattgataagcgaatttgacaacattttcgcaattcatgaggaggaattgacacagacggatatggtcgaacattccattgacactggaaatgcaaaaccgattaaggcaaagcgatag

SEQ ID NO: 80743 - DNA, 1128 bp, Heterodera glycines
ggagaagaagttcaaacttggcacgggcaatgtcctcgtggtcggatacgacgccagccatgccccaagggcgaccacggaagaattgtcgatgatgcgcaggaagggcattcaggcgacatcgatggagccggacgtgataggggtcagttacgacaaattaaacaattaaccgggggagtgactgttccggcaatttattttctgtaaaacgcttcccctttcttttctagttttgcgccaattacctgaaggagccgaacaatttctgtggcgattatttctttcagcctgcaaagcaggacatttgccatccggaacatttcaaggcgaaagttctgtggatgctgcgcaagttaaaagccaatcgtgaacgcccgccttcactaatcgtattaaataaaagagggactgattacaaattgcttattaaatttgttttaagttcattattcgcgatggactggacgaaggcaaagtggacaatgtgaggacgggagaaattccccctctttttgtaaatgaaagttgcattttgtattgttttctcacaggcgttgtccagtgagattgggctgtttcgcgaaagctgttctcagatcagccaatcgtggaagccgaaatttgtttattgtttggcggacaaacgacacaacagacgctttttcgaggtcgaggaacggctgccggacgcggcccagccgcgcaatgtgtgcaacccgcaaccgggctccgcggtcgatcgcaagttgacccgttcgggtgttctcaacctctacgttcaagcccatcatcccgtacgcgtaagtgaataaaatggctagaagttgcaaaaaacaatttgtttaggggacagcgaagattcccgagtttattttcccatgtaacgaagtgtgtgctaccaaggaggagttggaggcatttatcaacggactctgtcactcatggcaaattgtgaaggcggcgacgtcactgccggtccccgtttaccaggcccacgaacttgcgaagcgtggaaggtccaattacatggagctgaggaggtattcttcccgaaaaaaccaaattgacccctctcaaaaagaatggcgcccgaacgaattccacggagtgctgacggacaagtga

SEQ ID NO: 80744 - DNA, 1301 bp, Heterodera glycines
cggtgcatatcgaacggggcgaccgaacgaattcgtcgctgtcggaggaggacggccagtcgaatcacaacggaaacgacctggccaaacagcagcagcagaacgtacacaatgtgaaattggaaaacgaagtgattcaggtgggcatttcttcgacccatgccaatgccaactttcgcgtggtctttcttttgtgcgttttattcctttctctccttcagaatcggcaattggccgccgcggcgacggagccggcgaaaattgtggcaaatggtcacaattcatccgcgacgatgaacaatgacgacttgtcacccgacttggatgtgcacggcaacaaattggcgtcctccgtggggcggactcagtccgactcgtcgaagagttcgctgaggacggtcaattcttcgctgctgtccaacagagcggagggaattctcgggaaattaatcggaggaaaacacaccaaaaagtgaggacaaaaagactaataccgtatttactgaattagaaccccccgggagctctatttttcaacgcccctcaaaagagggcctttatttcattctaactagtcaaaagtattcgaatttccctgtgcaaattcctcgctaatcgctcccccttcagaaagaaaaggaagtcgctgctttcttcggccggtcgtattcaaatcggtcttaaatacgacggggaccgtttcaaactgatcgtttcagtgattgcggcaaagtgagccgggtaatcaatcacatgccggactttccctcccttttcttccagagatttgagtccaatagaaaaagagggccacgcggacccatacgtaacacttcggctgatgccttccgcaaatggccacccggccacgacaaaagtgcaaaagggcagaaagcacacggaaatggtgcccaattcgttggacccgcaatttaaccaaaagtaaaaagccaaaacaaaacaatcgtctcatgttcaaactctcccattttcagcttcgagtttgacattcactgctccgacttccccaatttcaagctgcacttggctgtgaaagacggcataaagtaggcttttttaatgctttaattgctaaatgccatccatatcgctgctgtgctaactgatgtccctttccccttgcattaattagtttcttggactgattcattactcccttcagttacggtcttttgcacagtacgcccactttcggtgttgctgaagtgccgttgcataacttcgacccgttgaaacccatcgtcagccaatggttggatttgtcgtcgcctcagagatga

SEQ ID NO: 80745 - DNA, 1145 bp, Heterodera glycines
atggtgcgcatcaacaactcaccgcacttggcctggtatggaatggccattattcttctcgcagccgtggttgttttgcaagtaggaaaatcattttcctttttttttgagatatttatttattcattattttagttggagagcaatagaagaaacaactccacattcaccgtgctgggtccatacaatttgctgcgacgtgtggcgcgcgtgctatgtatggtttatatttttctaagcgcgaagacagatgttttgattagagaccggaaatttcaaatttgcggatcctgttgcaggattggaattcaaaattttttacaggacaggatccggcaggattaatcctgcaaatcctgcatttaaaatctgcaggatcctgcgcaggattgcggattttaggaaatttcaaaaaattatgtattaataaaaaagtctttcaaagtataaaaaagtattcaatatatttttaaacaaaaaaatgatgaagatgaaaaattaataacgtttttttgcttacactccaagcaatcgactgaatcttctttaatgcttttaaaaagaccgatttgccaaattgggtggctcataataatagcttaaattaaagtaaaataatttttatttaaatttctttgcaaaaaaagccataatccattatgtatagggatgggatttttaggcacaaaaaatcgcgaaataggcacttaaaaaggcagaaaaatcctaaaataggcacgaaaatagtgggaaaaaaattttattaacgctttttaggtagcaaaacacataaaaaattcaattgtataaacttttttcgaataaggataagtttttaaacgaaaaatttttattaaaaaaaaaatttttgaaaaaagaaagtttctgaatatttggcattctatttttaaaaattttcaaaaaatcaatgcaggatcctgctgaatcctgcataaaaatcaaatttgcgggtcctgttgcaggattggaattcaaaattttttacaggacaggatccggcaggattaatcctgcaaatcctgtaaatcctgtattttccaaaatatgcaggattgcggactgggatcctgcaaaatcctgcgcaggatcctgtcctgcgccggtctctagtatttaacaataaa

SEQ ID NO: 80746 - DNA, 782 bp, Heterodera glycines
atgtcaattattcgattgtacatttcgttcaactggatggatttatcgcaatttattgtgtgtattaacaagaggagttacttattacgaagtggatttaaatatcgttatgaggttggtttatacatatatgtaaatttttcttaaaaatgtttatattaatgttttttgtttctcagttaagtaataaaaaaaagtaaaaattaataatgctgatttattactatgtgaaaagtattttgttttgtattgtaaaagatttgtgacattgtaagagaggaagtatttgtattgaaatgaatttttctacattaattgtgtttaataatatgtaaaagaagttttacaatgaaaaggtcggttcaatcatttgaattttcatttcatcaattaatttcatttaataaatttttatctttatttttttctcatttgttcaatttgcaaatttacctatatgttttaatattgtgttgttaattaactttgttttttaatacagattttaaaaacgccatattatccgagcaatgaatttggaccatgtttttcagataaatcttagtattagagttggaaatgaacagtttttggaaaatggaaatgttttagttattgaagatgaaaccgagatttttgaacatgatatagatgatgttttgtctgaacataattatgctaaacgaacaagatttttgacagatgtgaatgttgctagccaggcatcactgaattcagatattggcgttgcaggaccgtcacgtattagtgatagtcaatag

SEQ ID NO: 80747 - DNA, 1286 bp, Heterodera glycines
atgatgatgaaagaagaagaggacgaagaagctgaaagagcgagaactgaaaacagagagccagccgagatcaagcttttgtttgagaccgggaagcagttggacagacgtttggggtacaacgtacctcgagcgaatgaagtggcagctgtttatgtacctggggcagatggtgaagtgccaaatgccaagattgtgattcgagaacgtggaaaggaattaaagattttgaatagtactgatatgatggtgactccaatgacttacccactgtttatccgcgtggtacgcttggttgacaccctgaaatgaaacagagaacagtaacagaagagtgacaagactacagtatttgtgttatagtttggcaattagagaaagagaatttaatccgattttatatggaggaaagctctttcaacagtattgtgttgatgaatatgttaagattgaaggagacagaatgagttggataaagaacaatcagaaaaggattttggctgatgcttacaagaatattgacaaattttttaagaaaaaacttctataatttcgacttttcgaatttcatgtataacttttttggtaattgtctaatcgcgaatcaatagcttagaaaaattcgaatgatatcaataatgttggatttggatgacaaagaaaaaagttttagtggaaaaacatgctgacgccgaaacgtgagcgccgaaacgagcgcgccgaaacgtgagcgccgaaacgcagtggatccaaaaaggtgacatgaagtttgggcaccagaaatttcggcaccggaaaatttgggcacctgagggagagatttaaaaagataaaacaaatattaaaatgttatataaatccagggttcccatcatccatgctccgtttccaaggacgggtatgccaatttgcaaggaaatagtggggaaaattcatgaaatcagtcagagaacggcaggtttggtgtaaagagggaagcaattactcaattaggggtcaaacaattatgctaagtcactgctcgcttaggacaaagtcgataattatttagaagaagcttttattaaggcgaacataaattaataatatccaatgcgaatgaatgaatgtcaaaaggaatgtccttatataaaaagtttggtgtctgttgtgtgtgtccagtgtttgaatttgtgtggcgttttgtttaatttttgcgttaaaaatgaatttgaaaagaaatgtttggttttgctttttttcatttttgtttaattagtttttgcaaaaagcacagttaaaataaa

SEQ ID NO: 80748 - DNA, 2800 bp, Heterodera glycines
tgccgaatgtgttgagctgttcctccaatttttgcttgaccatccccggcatcggcaacaaaatgccaaacgcgcgcaccatttgacggaactgttcctccgctgtgtgcacagttcgcacacaatgcgctaccaacttggacatgacgccatcacaacgattttgaaaagtgacgaggtatatatggacgggatttcgattttcggaattttttgtggtcgtctgggctttttttttaaatatttataaaaaaaatttttaaaacagtaataaaagtttctgttttcaagacaactctctctgatgtgcactgtcgttttctctgctgcttcttgaaggtaatcaatcattttgagccaaattccgtagccatgggacaattaattaattcgtcgccaaaaaagtagaaaatatttggccatttattgaaatctgagcctttggcataacaattccgttgttcaccgttgcctttttgttgtcttaaatctttttttgcaaaataagtcgtaaatttttttttctgcttgcaatttggaaacaaaaaatttttttcttttcatccgatttattttctttactgtttcctgttcaaaaaaggatgtccatggtcgggcgtggcttcgcgaaagcggcggattggaccgcattctgtgccgtcttgcgaccgcggaacagtgcgacgaccgcagggatttgctgcgactccaacaattcattgtgaccgatttgaagtcaattttgcacgaccacgcgctgctgctgaccataaatgtgggtgaatattttcgtgttccccccccccccccgtaatgaaaaattaaaattttttccagtaaaatgggaaattattaaatttttttatttcttaaaaaaatggtgcctaatggcaccgccgagtcgcaatcattccattatttatttatttgcaaaatttgattccaaaatggccaaatttgacaaaaattggctaaagatttcctattttcccactgaattgaaattttaaaagaatggacaaaagatctaggggtttctattgagattccacactctccatgcatttttgaataaaaatgtttactttttttttagcacccaaactttttgccgactgccattgcgcaaattaatcgctttttggaagaaaatttggtggagtgtgaaactgttggcgatgctcacaatcagcacgagtcgtcagatgcaaatgttcagcacgaggaacaaatggtggaccagaaaagtgatggcaatcggaaacggcacggcacagacgaggcaaattttggtttttgtgccatggaaaacttgacgaaaatccgttgttttcccattttcagcctctttgcaaggatttttctgcttccacaagtgcctggccttcgcattcgccggccgcttctcctccgtcaactcggttacacggggctcgacttacttttttttgaaatttattattaaattttgagtttttttttatcgaaaagataactaaagcccggaattttggtactgacaatggtcgggatcgggattttaatcttaactcaaaagaaagtttttggaaaaaatatgaaaaataattcaaaaataccgttcccgaacaggcccatgacatgacttgatcattcaccggaacaaaaagcccgtattttccatgtctaaattctggtcccattttcatgataacaaaacccaattcatctatccgtaattaccaaatataactctaaattacgacccgattttcctatgttttattgtatttactgtttagtggaaatgttgcctggtcgccgtcgatgtcgccttccacggacccccaattttcgcttagtccgtccgcctcgcctccgtctgatcatggccaattttgggtaaaaaaaagcgttttttttcgtttcatattttcaaatacattttcaacagttggacgactatttggtcgaaggactcaaaacgaaggccatgtctccgccattgcaagaagacgcggcacccgaagaattggaaacggacggtaaagtttatgagcattttccattgtctttcaaattttttttgttataattgtttaaagtctttgagctactcttcatttttctaaaactaaacatcaaaaaaataaaattttttgcattttttagtaattcgaaacaaaaaaccaaataaatttaatttttttttaataactttttttacatgctagaaaatcattttccctttttgtaaggcaactagagcatgtgaaaggcttttgaatgatatcaagattgtttgatttggttgaaaataaacgaagttatagtccaaaaatttggactgcgccgaaacgtcccatttcatgcattgattggcccctttaaatttgaagatccgtcctcctttttggagcggaagaccatcatggaggaggaggaggacgagtcggacattgaagaatttgctgaccattcaaatgcctctgcttctgttacttctgatgggccatcgtcgtcgtcggccgatggaaaagcgttggccgagcgcaaaaaagtgatgaaaattcgtgccaaaattgtggacgcattgctcacgctgatcaccaccttttcccacttggacgaacgccaaagcattgtgttgatcagcgaaaatgtaagtgagccacttttttaaagtgaaaaaatatttaaaataaataaaaataaaaattttcttttggtactctttttgtgcagcatgccacacttttcggtggatttggattgaaaaaatttgtagagtttgacccggatttggatccaggcatggacc

SEQ ID NO: 80749 - DNA, 582 bp, Heterodera glycines
  unsure (1)..(582): unsure at all n locations
gtggttcgcttcgcgaatgaaaggcatcgatttcgaaactgggcaacaaatgtgaattttttaaattatgcattaattcttcgtctattagccttcgtttagcctttgcccttctcaatttgctttggttggctccggctctgatgaacaactcggtgcattcaaataaaatcacttaaatcttttaatgaaaaaagattttttcgctctttttaaatctatttttcgttggaaatttattattattattatttattattatttttgttattataaaggtggctatgctcgacatcaaactgttttcaaaaggtgtttgtcgttcgtccactaaaaatgtgcagatttactgaaaattctttagcaaaggattggacggagttgcggaggaattgtccatggaaatgcatcggatcggagcacgcaattttggcagggacgaccgaattggcacagtgaatggcaaaagccttctgtgagttagccttttatatgccattttccctgctttcataaacgagcatcatcttcattcaaggcaccgtccttgangagccgttggtctgctggctgaacactttg

SEQ ID NO: 80750 - DNA, 236 bp, Heterodera glycines
acggtaattacagtaccaaaaagcttcaaaaatttgaaattgttgctttcagttgtcccacttgctccgaaatgttgtccaaggatcagtcccattttgtggagcgtcatcagtgcattcgcttcttcgcccgcgtgtacggctacaaccctttggtgttctcccaattccgtgccgactccgtgctgttcaaaacgcgagtgccgcacaatcaccaaaagtgctttcgctacgtt

SEQ ID NO: 80751 - DNA, 514 bp, Heterodera glycines
atggccaagtccctaattttggcaccaaatttcattggcccatggctgacaggagaacaacttataggacatgctacgtcacccgtcttattccctggaccctatagacttaatttatggctaaattatttctctcaaaaattccttatagggtaggctctttaaagaatatggcaaggtcgtggatccagtgaaaattacctaggttcaaagaatggcacagaattttacaaaaagggcattgttaaactcccatctcggcggcaaaaggttgtagacagtcagggcaattactttgttaagtagctttttgatcggctttgttatgattgttatttttcattttttgttcataaatttttttccttcaaaaagcgcccttttttatgcaacgacctagtaattagacataaatgttttaaaaataccggaaaatgtcagacaattgcacccaatgggcaccgaccatttggacggccaagaagacgatgcacaacagcaaatcgatgcctag

SEQ ID NO: 80752 - DNA, 563 bp, Heterodera glycines
gagcttttatgtgcagaaaatttggacgaacttttgagcagtgagaagcaaaagccgaccaacgaggacgacgacgagtcggccccgccgtggcgcttcgggccggcccaaatgtggtacgaccgttttggggtgccggcgaacccgtcgaatttcgactacggactgaagaggcggggcacggtttgccccccccacgccccattcattggtttgccgttttcattgttaaggcgctgtcgaaacgttcaacggacgacggcactatgccattgccaagcgaaggtaaccgaaccattgccagctcgctgctcaaattccatggcctttttcagatgaccgcaactttttgccagtgcatttcttacattgggaggacgacataatcattgaccctgaacaggcgcgggaaaaggtacagaaaatggggggggggaaggaaatcccacgaacatccgctcaatttgttcagctggtgaaggaactctcttcggttaaactgccgcgttgcggatggattccgacgccgtacacgcgcagttacaaagcatttatcgcggcat

SEQ ID NO: 80753 - DNA, 1301 bp, Heterodera glycines
atgacgagcacagaatccccgcaccaacaacagttccttcggttgccattgttttgcaacaacaaccgccttcggcaccaatcagcccacaaaagcagcaacaacaacagcacacgagcccaaggccgggaatattgcgtaagtaagacaacgcaatttgtgcaaatgtaatttcaaaaggtggcaatgcgtcggcagtgcgtcgtctcactgtcgatcgcgaccgtcccgcgtcagtttcgggttcgttcataaacaattcggaggaatcccctcggaaacgtcggaagcagcactttgacaacagtcagcttcttggtgacaaagtgacggtaattgcaaattgaaacaatttatggggctcactgaaaatttaatgatttttctaattaaaacatttctcttatgttacattaattgtaagtcgtatataattttaggtcgagatgagacccaatgaccgtcttggacagtcggcttctgctgggcctttgctggcgggctgttggaggaattcgagcagttcagtgacaaccgaaggcggtgttgcaacgcaacagtcagaatatataatttttcaatgcttttccgtgccaactttctgtctttacttaggggaacctttacggccgacccattggcacgtgttggcgcggcaatcagtgggaaaaaagccgtcagcggtgttccaattgagggaaaacagcagccgaagaagcgcggccgaccgaaaacgaattgtcaaacgcaacaattgccgttggtgtcggcaaatgcgacgacaaaaagtgtgcaacagaagcagaaaaacaaccaacgaactgaacaacgagcggtggacatcgccaaaaatcaaccaaaacatcacaaattggcattagggaaccatttgacgttgacaacactcaacgaaagtgcaaaaacgtcaaagtcaaaacagatcatcactgtccaagtcgagcacatcacagaggtatttgaagtgagattggaaaggcacaccaaagcaaaaaaaaaacatttaagacggagcaaaagaagcgcaaataccaaaagaggacaccgaacattgacccattgaccggagcgaggaaagtgcgaaaaaagggcagtggacgaaagtcaaagaaagaattggctgcgaaagcggcaaatggcgggggagtttttggcactgacgggcgatgggtgctgacggaggcacaaccagccaaaagcgatgccaattccatcccaaatcataagatggaggaatttgataacagccatcagccgagccaaaatgaagcacccgaactgat

SEQ ID NO: 80754 - DNA, 774 bp, Heterodera glycines
atggacagtagtgaaagtgcggttcgtgcacccagaaatcggtcttacaatccgcaacatttgacggtaccgaaacatttggacgaacggtgcgtcgaccgattgagtgccgacattttctgctcgcttttcaacagttacgacgaggtatgctgtcaaaacactattaatgaatttgccatttttccattcgtcgcccattttcagtttaaaaagaccacaaattcgatgcgtttgctgcccgtcgcctgcgcttatttcgacgcctcccaacgccttctctcctctcttcgcacttcacttcgaggcttttcactttatcacgctctgcaaaagtcagatcagccaactatcaaagagaaaaatatggtaaaacacaaacaaatgacaattttatcaaaattatttgcattattatacaatatataattataatatttataaaatcgataaaaatgaccaattacaggatgaaattttggtggaggagagcgaccgttggttctttggagacggtttggtgggcattgaggaggccgaaacggaatgggacgacgacgccgagggcgagagggaagagcggctgagccgtgccttttttgccaaattggacaaagaataccaaaacatcgtcagacgacagtgttgggacgacgatgaacaaaacgaggcgaagggggacaattttcaaccaaaaatggcgcaccaattactcctccaacttgacgttgcccaaacattggatttagtgttgcacaatgttgagaatgacag

SEQ ID NO: 80755 - DNA, 569 bp, Heterodera glycines
atgcgacgtgcggacgatggcactgccgatgagcaatgtgatcggcggtatgtaaccatcacaaatgctgggtttcattttccaaaattcacaaaaaataattaaacggtgaaataatattgaataaatattgagtgcaagtgaacagacaataactcatattagggacattctttctgatcagttttctgtaagaggtgaaggaattgaatatgttacaaaaaaatattcagcccaatcctttttttcatcgttcatatttttttggtgataaatgattagattagtagctgaccaattaaacaccgcttttctgatcaattaatataattggattgatttgaaagtgatcggacccattatttatgataattttatttaaggttttctgtcaatttcttttaaataataatagtaaaagatttaaacataaatttttaagtccaaccaaaaatttatgtttgaaaaatgatttcttttgctctttggtaccatcattttaattttgaagattggacttttgagtttcaaaatatcgcttttatttaaagatttaatatttaattaaa

SEQ ID NO: 80756 - DNA, 68 bp, Heterodera glycines
atgcattggcggcggcgccgcgttcgacgtgctgacgatggcactgccgacgagcaatgtgatcggcg

SEQ ID NO: 80757 - DNA, 104 bp, Heterodera glycines
ctctgggtacgcgccagtgtcagacaaaattgctcttaacgccaaatagcgcatttagcgtaaatttttgcgcgttaattcaaaatttacactggaaaatgcct

SEQ ID NO: 80758 - DNA, 1080 bp, Heterodera glycines
catcggaatttcggccaacatccaatccttccagtcggcttctgtccatttcggtcctcaatttacctgggggcttggcctcgcttttggtgtttatatttcggcacaaatttcgggttcgctaaattggcattctatagcaatcaattcccttccatatcaggtggtcatttaaacccggccatttctttggttcagttggccaacgggtccatctctctggtccgttttgccctgtatatttttgcccaattgtttgccgcttttctgggcagtgctgtggcatttcttggccatttcggtaaaactaaaattaaattttgcactaattttatttcagagaattgcatgcaaattcaaacacgaaatggcaatcaagaattctgtaatgcgttctcactcatttgtttaatacatttccgatcacttaacagcacaacttttcgccacttttccaagtcctaatttaagcatttggggcagtgttgctgatcaggtcatttccatttccattttcgttttctttctttttttgacaccatctaaagcttgaccactatcttttcctggattaatttaaaattccctctttaagctgatcggtactgcaattttggccttttgtataagtctgatcatggacaaacgcaatcgcgtccccattggactggcgcctctgctggcgggcctttccctgacaatggtctgttccttatttatgcatcaccgatgttccttttttcaatcgaaagatcgcgttgactttcggcacaaatggcggctttgccataaatcccgcaagagatttggggcctcggctttttatgctttgtctgggactcggctgggaagtgttcaggtgggcgctgattagtgaaagtctccgcctacccatcgctgccttttccgttttccatgtgatcgatcatccattcgttcagcaacaacaatttctacttttgggttcccctagccgtgccttttgtcggggctttggtcggtcattggctctacaaaatactgatcggagtccacggcctccaggaactgatcgaaatcagcggagccaaatacccacgg

SEQ ID NO: 80759 - DNA, 860 bp, Heterodera glycines
gacatgaaagacacagtgaaagaggggggacgcgtcaacaaattccctggttaatgctcaagttcccctaattaggcaattaagctaatttagggatgagcgaattggccaaaaaggtttctttgactgtggcgatccaatcaatgcgcgaattgttccccgacgaatatgccttttacccccaaagttgggtacttcccgcccaattggacaaattcaaaaatcactgcacggatcaaagggacgccgacaaaggccaatgttttattgtgaaaccggacgaaggtcaattctgatgtggaaaaagagagatgggggagagaacgaaagctgctttaggtgcccaggggacgggcatttatctgatcaattcgcatgatcagctgaagagcaccacgacacggcaattggtccaggagtacgtcaccgacccctatctgttgccggatgacctcaaatttgaccttcgggtgtatgcggtgattaaaagcatcaacccactttccatttacgtggccagagaaggcgctcactttttattttttgtttatcttgatttataaccttttatctaaaaggataggaatggcacgattttgtacggaaaaatatgtgaggccgtgccctgagaatttcgacaaattttacgctcatttgaccaattactcactgaacaaagagaacaatgcgtacatgcacagcaattccctgagagaacagctgagaggtgaatttggcattttgccaaaaaaaaaataaatgaatcgcaggaagcaagcgactgctgtcgacggtgttccatcagatggagcgaaaaggcgtcagaacacggcgattgtggaaggacgtgaagctgatca

SEQ ID NO: 80760 - DNA, 973 bp, Heterodera glycines
atgggggtaacctgtaaaatcctgtcaagttggggctggtcatccgggcccgacgaaaatgccatttggaatggtttgtccagtgcgataaggtcatctgaaagtcaaaaaaaaaatcaaataaataaaacgcaaatacaaatcccgaacgttttttaaaaatcatggccattctaggtggtaccccctcccactttttcgaaaaaaatataaattaaactttacaaaagttcataatacattttagggattttcgggctcgatttaatttcacatgaacagttatactcttcgaatttttcggcttatcatttgaatccaattaggggcgcagaattggtcggaattgaatgtgagattcaagattaacgaccccgataatccctaaaatgtgtttcatcaactctttttcaaattttgagattttcgaaaaggtggacacttggccctcaattgccttaaagagcgaaaaattgcagagggagcagaaaatttttctgtcttttatatatacgaaaattatggaacaagtatttgtgccgtttattgtcggattttaaatgttttcctttacccgctcccatcaaattttatttaaaaaatggggctattaccagtctcgtagatgacccgttttgccatgcagtcgaccaattcggcacggtcaaatttccaaattgggtctatcaaagcccacaactgctttatgccgctggtaccgtcagactggtccgcaagctcaaacattgcgaacaaaaacgggaaatgcaaaaaatgtaggaaaaaatgctaaaaagtacaaaaaaatgttaaatcccgaaatatgtacacggcgagtcaattttgggctccaagcgcaaataagttggtttttttgtcttagtggtctgtgagttagtcaacaaaaagggggtctcaggttcaaatcctctttgtgtttgtgtataaatttcaattttttaaagcaaataaa

SEQ ID NO: 80761 - DNA, 107 bp, Heterodera glycines
  unsure (1)..(107): unsure at all n locations
atgaaggcccaactgcagaacgacgccctccttttccgttaccgagccatttgcaagggcgttccgaagttggccaaggcgcgcatttcaatcccattnngatcaag

SEQ ID NO: 80762 - DNA, 1098 bp, Heterodera glycines
atgatttccctgtcttcggttaaaggtttcttcacctcgtccactccgctggtggccgccctctcacagccatccatttcctcctcgcccgcctcgacacgttatggggtgaacacgccgaaatcgtcgtcggctgcgtcctcctcgacctacggcacgacgcaaaactatggcggcggcgctgctgccgcactgtgcaacggcggcggtggcggaccgttgccgagtccggcgggaacaccgggcggaggaggttcacggcaacagcagcagcaacaacatcactatgtggtgcagcaacagaccaatgctggaggagcagggtgtgacggaaacggaagataccatccacagcaacaggttgggtggcgatcggaattaattcgttatacacaacggcccaattttgggctctcagtgcaaataggtttattatttatttagtaatcagaacgccaaaactttgcaaaacttaaaatttttttggaattttcccttgtaaaattagaagagccgatctcgagttaaaaactagacagctaaaaaataaactgtgattcgatagagggggacaaaatatgggcctatacaaaatttcaaaaaaagttacccacaggaaaaaattttttcccagggcaaaaatttcaataattttaattcttttttagccaagtccacaatttaaggccaaaccaaataaaatttacaatattctccagaattttcccttcaaaatgagcataaaatggttttatttgctttagtattcaccaagttataagctaaaaaaatttcataaaattgtcgatgttgtacctaaccaacgctttttgaatatgattttttattgccccgaaaacttttattaaagaaaaaataattctcgcctagtcaggcccgtatccagcaggagggaggacccgtgccccccccccccccccaaaaaaaaatttcaagaaaaatgagtaaatttttttcaaaattttcataatggacggcgcctattggcccaactgccgggtcctatttttatgcccctccaagaccttccccacccaaaattttccaaaaactttttttttgaaaaaagtttaagga

SEQ ID NO: 80763 - DNA, 627 bp, Heterodera glycines
atggtggagccaattgaagggacggacagagaggaagagggggccaacgaccactcggatatgacactgccgtccgaatttgatgaaaatggagggaatggaggagctgtgcgcagtcttcgcagcgacacggagacgaacgaagagagcgcggtagatgaacaatttcggaagcagaagggaatgccaaggggggagacggaggcaccagagaatgccgaagccacagatgtgccggaatcaccgaacagcggcacgacctcggcggcgaaaggagcgcagaagaaacacccaatcttgattctgcttaacaacattgaaggcatgccaaaaccaagcgacccacggaaaagcaaagggattagaaatgcggcacaaaataaccaacagatggatgaagaagggccttctttgactgattgggagattaatgttggaagagcggcgccaactggcgatgttccgctggtgaccctacccaaattcgcaactgaatacaaacaaaacaacgataacacaacgaagggaggagaagagcaggaaaaggaaggggaaaggacggcacaaaaatcaccgaatgacgcgggacagcaacaacaacaaagcggaataggcacgcttttataa

SEQ ID NO: 80764 - DNA, 615 bp, Heterodera glycines
atggtgcgccagccgcaaatgcgcatgcttttgccaacgcttctgaccatcgactgttttgagccatcggacgatagaagcatttctgattggttggaacgcttcaactttgccatcgactgtgcggcaccgcagctggcagaccaggcgaaggtcaagctgctcatgacgaagctgagtgaagtggctttcagccagttcagcaaatcatgtctgccgaagaaagtcatcgattttgactacagccaaacagaggagcgcctaaagattgccttcagccggccacaatccatttggattgatcgctatgaatgtatgagggcctcgaaaagcgaagatgaaagctttcgtccttttatcaacagacatatgcgactcttgcgtgattctcagtttgaaaagctcaacgaagagcaattttcttgcctcatgcttttgacggcactgaaatcaccgaaggatgccgagctgagaaaacgaattctttcgaagcttgcagcgaatggtgacctggtcgagtatgatggagtcgtcgaatacctccaaatgtaccagtcaaccatcgctgaagcaaaggtcgtcgaacaacaaccgatgggctcacgaaaaacttga

SEQ ID NO: 80765 - DNA, 760 bp, Heterodera glycines
ctccattcttctttaaccatgcctggtgcttggcacacatcctttccaagtggccactcttcttgcactttcgacaaacggttgtttcatgtcgacaattgctcgacgaatgtctcaaaccgcatcgccaacatacgcgttgcgatcgattgctgctgcgcgttcctgtcgaaatgctgctctcattcgacgaatgatccgagttcgttcgtttcttttttgccttcaatttgttcgccatcaagtttttcgtgagcccatcggttgttgttcgacgacctttgcttcagcgatggttgactggtacatttggaggtattcgacgactccatcatactcgaccaggtcaccattcgctgcaagcttcgaaagaattcgttttctcagctcggcatccttcggtgatttcagtgccgtcaaaagcatgaggcaagaaaattgctcttcgttgagcttttcaaactgagaatcacgcaagagtcgcatatgtctgttgataaaaggacgaaagctttcatcttcgcttttcgaggccctcatacattcatagcgatcaatccaaatggattgtggccggctgaaggcaatctttaggcgctcctctgtttggctgtagtcaaaatcgatgactttcttcggcagacatgatttgctgaactggctgaaagccacttcactcagcttcgtcatgagcagcttgaccttcgcctggtctgccagctgcggtgccgcacagtcgatggcaaagttgaagcgttcc

SEQ ID NO: 80766 - DNA, 556 bp, Heterodera glycines
atgtgtgccaagcaccaggcatggttaaagaagaatggaggaaagaaggaaaaagcggtgaacaacgtccgcgttggaggagttttcctggttaaatctgagaacgagacgaagaaaggaataatcgatgttccgattgatgtgaatggaataaaagtggacttcattgctgatttcggcaccgagagaactgttctttgtgaggacacggtgcgccaaatcggaactttgaaattgagccgttgtcaagaacccgctcagtatggcaagaggtataagaacgccgaccgaggatgcggatgatggacggaggcctggcactttttaagggggggggggggagatgttagggttgggacccaatgactggtacccatttggccttttactttatttgtttctcccattttcccttcgtatgtcacgcccctttttccgcccataaatacccgcgttgttgacccttcctacgtatttcgtttatttcatttatttgttcccttcgttccccaatcaatatctgaccccgttcgccctgtctttcttttctttttga

SEQ ID NO: 80767 - DNA, 286 bp, Heterodera glycines
atgccaccaataaagcatgccaacaatgatgaagatgacgaggatgccggtggtcatcgacgcgccaatgttcagcttgccaagcatgatcgggtggccaatgtgcagccaatggaagtgcaggccgggcattggggaggtcaaactccagtccatcactttggcatcaacaagcagggcgctaacggtcgaagagccttgctttcctaaacaaaattaattaatgattaaatttacatgaaaaattaaccacaaaaatataattctgcataggttacagaattaa

SEQ ID NO: 80768 - DNA, 846 bp, Heterodera glycines
cttgttattccattttacttgccaatgaaaaagggagtaaaatttgcgttcaaaaaaattttggtgcagcccaaagattggttccgcgcatggatattgaaacttttctcgacagcgaattttgtcttgaatgatggtgatgaaaaaatgaagcaaaaagcgaacgatggtgctaataaatgcaataaaaattattcaaaaccttttaataaattttaattaaccatttttaatgtgttttataataggaaaagtgccaatcactgatttgtcggaaattgagccatcaattaatgtgccgaattttgaggaatcattgaatgaaaatttgggcacaacaattaagaaaatgtcaaatattgtggaaaaaaagaaagcgaacagtaatgaaaaagcgttcaaaaaggtggcacaaatgttgaaggaccttttcattaactttggcctgaaaaaggtacagaacgaaattgaaaagagtgtcggaaatgcccagaacagtgtgggtgttatttttgactaaacatttttaaaataaaataaaaaaatttaaaatgaattattttagagtggagaaaatacaaacacaaaaaagagcaatcggagacgccgaaagcgcggcattgagttgggagctggcataaatgcttacattgaagcgggtaaaatattgaattatgaaaagttttccaaattttcttgaagttttcttaacatttcgtttaaaatcagtcagaccattgtcatcataaaggatgagatttctaggcatgaaaatggcaaatttgcaagtttatacagggataaaagcttatatcccttttttattcatctttttcattaattaaa

SEQ ID NO: 80769 - DNA, 1746 bp, Heterodera glycines
atgccatcacttttatcaaccgttttcgccaacttttcgccaaatgccccattaatttggccatccgaacggcgaatgatcgcatttcggatttcatttttcacaacatttggccaatgttcggaaaaaacattcatggcttgcgattgtccgccagatttttccaccgtttgcgtcaattcgtcccctcaattctcaatgattgtccgtcgcttcgcgttgtcaattcctattctaatgagttcttcaccgaattcccatgcgatgacagtgccgcggcatcggaaggacaagcggtggccaaatggcttttcactcctcgtcctgacgatgtgccaaaggtgttcaaatgctggttgaacttcggtagctggcatttggcgccgaatattgaagcattcaaagcggtgcttactaattgatttaatatttcattgatcattttctttctcaatttttcaatatttcaggcttttgcctcggcttcatctcctgccaatttcatcatttccgtttggtttccttcgtcttttgctgcttctattgtgccatttgtgctgaccaacgaattaactcgagaacaattgacgctgaaaaagattaacaatagccatcgttttctgttcgtccgttgtccaattgtgcgagacgaaagcaaatggacaaaatgggagaaggaagcgattgatttgcgaatttataatcagtgtaaccttcacattgaaattaataaggatgattacatctgcaaagggtcagcgaatgctttttcaaaaattaaatttatttgttcgatttttaggcttctcgacgaaattcccggcccaagtgatcagcagcaaaagtgaatgaatgaattgttgagaagggatcgatcaatttgaaattgcgccgttggataatgaatttgagtcagaaaattgttctttttgttgcggtgatcaatttgatctaattgaattattttgatgctattttgacctatgatcataaaaattgttctcttttttttgttggaatgatcaacataataatctttgttaagccccctaataagggtaatttagtgtttccgacagttcctattcgcaacaaatggcacttttacttatgaaaaacgttgtcttacgctgtttttcggcgctattcagatttttggtattatttgatagcaacattgcctaccaaaaagtttaatatctcgtgtcaaacgaattaagcaaataagtcacgtcatcctgtttcattttccaaatcaaattccccaaaaaagagaatcttcccgttgaaatattttccttcatttcttaaatctgtccctaagccaatgactcactcaatgcttttcctttttgcatactgtacacatcccttttgtagtcaaagtgggacaacacccaactctttttggacaaactcgcttttgttaccctaattcattttttggttcgaaatgcgaaaatcgaggacatttcaaagatttttgagtgtctgatttttagtacaaagtccgttttttaaagacttctcgacacaactcccggcccaagtgatcagcagaagaagtgaaagaatgaatgaattgtggagaaagtgatcgatcaatttgaattatggaattattgacgtgctcataaaaattgctcctttttattggactcgtaaaacttcttttttttttgttttttaatctttagagctttaaaaaatgccaaattcataacaaatttgtttttggaaaataaa

SEQ ID NO: 80770 - DNA, 1115 bp, Heterodera glycines
atgacacaatggggcagggcgctgctgataggcgcctgtctcggcaatcagtctcgagtcaaccggtatgtttttaaaataaataagcaatatttttttaattttacaaaaatatttgtaaggctaaatgcatttttttctccaaggctacctaatttagaaaaaggcacagtgaaaatttttgaaacgaaaaaatggtctgcatgtaaattctcttgaatttcagttaaggaactgatgattacagtacagccaacccatgcttaccatccgtttcattgatccaccaaagccgaagccgtactgtactcggtccttgtcactgctgatgtgttggatggggaagcgatgggcacatgtgcaccgggccgtctcgcgtgcaatttcctcgtggatacgttccgtctccgtcttgggctcgtaccgacgctaccgagggggggggggggattttgtgttactgtatttacttcatacactgtagcaatttaaatagtaagtaaaatgcgtggaattagagacggatgggaaatgaatatttaaaaaaaagaaaaacacaggctttcagaatatttcctttaaaaggggtaaggcaatggagaacagtatgaaagaattacagtagacataattacagtatgccagacagaatgtagtaatgtacgggtttttaaataagattaccatctttttggggtcgaatcggagtgcgttcatgaattctctggagacgatcaggccatcccccttatcaaactcgtccgccacccgggccatctccagcgcagaggtcggaaattctggaaaaaaacacatggaacagaacagagataaaattgaaaaattaaaaatgatagtaatttcataatactgtacttgaagcgaggattccgtcgatgaacaacttgcgcggcaccatgccggtgcccgacttgtcaatgcgccggaacagatcagacacgcgtgccttgccgtgatcgttccacgccaaataccgttcccgccaatcgtcaaaggtgaagcccttaaggcgttccaattcctggcaataaatcaagcaattagttaattaagaaaatcaaataattcattattcattaaatgatttagatgaa

SEQ ID NO: 80771 - DNA, 1180 bp, Heterodera glycines
  unsure (1)..(1180): unsure at all n locations
ctggtacagtacccttgcgctcttcgcttggtacgnccattgacaagaaacgtacacggcgaaaaagcgacacgctgcacgacaattggaaacggttgtggaccgacttggtacagtatgaacagaagctgaacgagcgcaaagctcatttgcaggtggtcatttcattagggatggttaatacatattcataattttttgattcctttatcttttaaaaaaattaggtgactaaaatgcaaaattaaataggtggcttaaaggcaataatattttgtaaaatctcatcaaattcatcaacgtttctaatttcttaaatttaatgaggtcataataaaaattttaaaaagaaagatattatgctgttcatttatttcatctaaatcatttaatgaataatgaattatttgattttcttaattaactaattgcttgatttattgccaggaattggaacgccttaagggcttcacctttgacgattggcgggaacggtatttggcgtggaacgatcacggcaaggcacgcgtgtctgatctgttccggcgcattgacaagtcgggcaccggcatggtgccgcgcaagttgttcatcgacggaatcctcgcttcaagtacagtattatgaaattactatcatttttaatttttcaattttatctctgttctgttccatgtgtttttttccagaatttccgacctctgcgctggagatggcccgggtggcggacgagtttgataagggggatggcctgatcgtctccagagaattcatgaacgcactccgattcgaccccaaaaagatggtaatcttatttaaaaacccgtacattactacattctgtctggcatactgtaattatgtctactgtaattctttcatactgttctccattgccttaccccttttaaaggaaatattctgaaagcctgtgtttttcttttttttaaatattcatttcccatccgtctctaattccacgcattttacttactatttaaattgctacagtgtatgaagtaaatacagtaacacaaaatccccccccccccctcggtagcgtcggtacgagcccaagacggagacggaacgtatccacgaggaaattgcacgcgagacggcccggtgcacatgtgcccatcgcttccccatccaacacatcagcagtgacaaggaccga

SEQ ID NO: 80772 - DNA, 1777 bp, Heterodera glycines
atggagcaggcgaacacgcgcagggaaaatgttgagaaggtgagtgatcaatgatcattaatgatcagagtaattaattaattaaagagtaaattaattaccattaaaatttttttcaaaaaataattatttgtattttttgattatttgtttttaaaggtgcgcgaacgggcacgaaagatcctcgacacaaatgttggagatgcccatgaattggctgaattggaaagaaaattgatcattctgaacgatcaatgggatcggctgaacgacggtaccacgcaaagggtgagtaaatcggcatactgtaatggtgctcaatttcaacagatgcttgggactaaaatttgcctaacattcaaattggcgtgaaaaattttgaagattaattaaagatttaatgggtttttttattggtacctttagttcataaaccatttcccccctccccctcctttcgaattataaactcaatttattttatgttttttttaaattttaaattatttaaaaatttttcttgttttttttattaaaaaattttgctgacttatgaattagacttttttttattaatactttttaaatttattaatgctccagtctcttttttacaatgagaatatcataatattaaggaaacgctgctcaccagctcattgaagaaggctgtagacttgtcagaattaatgttggtatttttacatttaattaaataattttaattagtgccataatgcttaattgccataattaatcattttaattacgaatcgtcatgctgtttaggcacgatttgggcacatcattgcaagacattgaagcgcgactgcgccgtccggcgctgtcttgggacgaaaaatcggtgctagccgaacagacaaagctggaccatttgcgggacgaatttatggccaaattgccagagttcgagaaggtgatggagttggccaaggaattgcagcgcaacgcgcatccgcgcgcggaggctccgatgcgcgagctgatctgtggcatgagcactcgctgggaactgcttgatcagctgatcaatgaccgggcggagaagttgcgacatgtaagtgcactattgcttctgattgatcggaatgagggacgaattttttattgttgattaattgatcagtattgctttaattttttgttgtttagctgatcaggattttaatttttgtttttcagagagtctacgggtgaaattaactcaatagtgaattatcttatagctttttttcagaattctcattaaaaaatccaatcaaaattttttacttttgattttttattcgtttacatttttcttaaatttttgaagaatttgttacaagttttttttgtttactgatcaaaataattttatttttttatttttagcggttggaagaaattcgacaacatgagcaaatgttggacgaattgatgggttttgttgaagaaaagcagggacagttggagctgatgcgcgactgcagtgatgagggacagctgagccgattgagcacgtgagtgatcggaagaaaatgtattactttcattaatgtagccgatttacggaatttatcccaattaatttacggtattattcggatgcaaaaggattttcttttctaaaattgttaatttcaactaaataacgtattttacaaaaggagatccctcccgtccctcgtttggattataaaatatagacccttcccccttttagggatacggtagtttcaaattatcagagaaataacaaaaaaacatcaataaa

SEQ ID NO: 80773 - DNA, 608 bp, Heterodera glycines
atgccattgtatgtgttatgcaacagtttctactcagtccaacaaagttttgacgttctttgtactccagctgatatgccactcatttatgccttcacaaaatcgaattttaaatacaacacaaagtatgcaaaaataaaaaagaaaaataatttaattttactttaataaatgtattggaatttaagtgtcatggaaatggctgacaaattgctttgtaaagccgtgaaaccattcagccgtttaaaactgagcaccgaagaatttgtactcattcgggcaatcattttctctcatatgggtcagctaattaatgaaatgccaaaattacttgattaaaaaagttaattcagtttctccggggcttagtgaccaggcacagaaattgttgttcaccgaagcggagaaatattcttcactgctaatgagtgttttgcaggtgccgttcttttttaaaccattttaaacaaaaaatgagaattcaagaattttcgaacttttattcgaattcggtttgggattagaaattggtcgaaatgaatgtcggattcgtgatcagtgtccccgaaaactctcggaaacatgctttcacgacttttaaaaataaa

SEQ ID NO: 80774 - DNA, 1131 bp, Heterodera glycines
  unsure (1)..(1131): unsure at all n locations
atgattgagcctgattctgccgaatctgtcccggtcaaatgttncgtttgtagtgaaaaatgcaaatttcattctggcgtcaaatgttgtgaaggtgtttttataaaaatattaaaaaaagaacaaaggttaaagctctaaaaataatgaaataattaaaataaaataatatttgtatttttaactttaattaaatattaataattcagcttgcaaacatttttttcgtcgctcaatttcgtcgatgaaggaatattattgcaaaagtgccggagagtgcgacgttaaaaaaggcagaaaatgcaattataaatttaaatgatcctttttttgtgatttaaaattacacttatccatcagtctttaaaatggcaaatgaaaagaatttaaaataaatttaaaaaatctaagaattttttctacaaagattcaacgtgtaagcggtgccgtctgaagaaatgctttactgtcggaatgaatcctcgaagagtttgcgtcaacaatgtcaataatgagcaaatattggcatatatacaacgaatcaaacggctaatgacatcaacaaattcagcagcagcaatagcaccaagttcggcagaaattggcatggaattatcgacagaaaccagcgccaccaatggaccattgaaatgtcacataccaaactcggttatcactaatcatggacagataaagacaaaattaagaagattagctctgtaactgattttttaatgccaaacgccttaacaagaaaaatattcttgaggtagagagaaatccaaaactggtttttgaactggttgctaagaaaattggcatgaataacttactctgtttcttcataagcttgtgaatattatttgtaggattttttagcaaattctattaaatgcaaaagctctgattttagcaattggtaaaaaaagattttttgggtttcattgtgctgaaccatttgctggagattgagcagaaagtacgccgaattcgctactcacagacaacgattccagaattattttatgaacaatgcgattcatttgagtcaatttttgggcggaaattaaatttgctcgaattggccgataaattttctgtaagcaaattaaaagaatttaattaaataaa

SEQ ID NO: 80775 - DNA, 75 bp, Heterodera glycines
acatgcacatgtggtgtagtggttaaactttctacctttcataatttttcgcctgggttcaaatccccacttgga

SEQ ID NO: 80776 - DNA, 1966 bp, Heterodera glycines
atggacccgcagcaacttcaacaattgcttaatgcactgcaacaaatggtcacaaatgccgcaccgcaaaacgccgcaccagaaaatttgagcaatgccaatttggcaagctctattgatgctcggctttcagcattccattacaatccggaggtcggcaccacatttgaaagttggttcaaacggtttgggaaattgatcgaggacgacggaagcacactgccggagacctcaaaagtgcgacttctcctcggcaaactcggagaggaggagtacagcaaatatcgtgacacgatcagcccaacccagccggaccaagtgaattggaatgacaccatttcgcacctcaaacagctttttgccgagacacgttcgctgttcgtccgccgctacgaatgcttcaaaattcgacagcaaccaggacaggacgtgtcgtcacttattgcgcagatcaacgcgtcatgtgaaaacgcagatttgagcctgacaaaggaacaactcaagtgtattattttagtcatcgcgctcagcgatgaacatcatgatttgcgacaaaaagcattgaaaatgttggaggacgctcagaaaaatggcaccaacatttcgctcaagaaaattgaggaggaattacgggcaatccaaattgtgaaggaaagcgccctgtcgctggtcaacccgccaattgtcaccaacgccattaacacaaggccgcggcaatggaccgacccagcacaaagacaaagcggcacaaatcaacggcaacataaaaatgccaatacaagtggaaagccaacacgtggtcgtccaacacttccttgtggatcatgtggcaaatccgaccactggcgctccgactgcacattcaaagacgccacttgccttaagtgcaacaaaaaagggcacatttcgacagtctgccgacaaaacaagacaaaggccccaccgaacagccaccggtcattccacacagtcaaagtggacacacattgcctacatgttggcacaactcaaggccgatggtggaaattgatcattttgataaatggaaggcaaacttccatgaatggcgacaccggcgctcaggccacaattatttcattgcaaacatggcgagagttgggagaaccggaactgactccatccgacatcgatgccaaaaactgcaatgaccagccattcgccttgcttggcaaattcatctgcaccgtccaattttccgacaaaacaccgcaaactctgatcgcttatgtgagcggagaagtcggacacaatttattgggattgccgtggatcgaagctttggagatcattccccgccaaattttatttccgtccagcaaatcggctgatcaggcgacaatgattgaaaatttttcggcagtgaagccgccaaacaaaacgatcaatgatgtgtcaacgctaaaagcggcactccaaaaagatttcccggaagtctttgaagaaggactgggacactgctcaaaggcaaaggcgcatctcattttgcggtctgatgcaaagcctgtattttgccgagctcgcccaattccacatggcgccatggaagctgtgaatgccgaattggaccgtcttcttcaaattggcgcaattaagccaatcgatttcagtcattgggccgcaccgatcttggccgtaaaaaagaaaaacggcaagacgagagtctgcatcgacttctcaactggcctcaacaatgcattggaattgaaccggcacccactgccaaggccggacgacatctacgcttcactgaatggcgcgaaatttttctcaaatttggatttgcgcgatgcatatttgcaaatggaaatggatgacaaatccaagcaattgtgcgccatcaacacgcatcgcggactcttccaatgccaacgcctgccattcggagtcaaatcggcaccggcaatatttcaacatctgatggaccaaatatgtgccggtatcccag

SEQ ID NO: 80777 - DNA, 391 bp, Heterodera glycines
atgccgttgtcgctgcattcaccgtctgcgaccggtcgccacaatcgccgtcagtcgtggcgacggcgtcgatcgccgatgtgccattgtcgacgctgtgcgatgacagacgaatcgccgatgccgctgaacagtcaaacagcagcgatcggcgagcggtcgccgatggctgcttttgttgccgctgccgcggagatccgtcgatcagtgccgggaaagcggtgcgcggggagtccaatggcacagccgtgccgacgtacgcttcgtacatggacacaccggcgctgctggggacgtttgctgcaaaagcagggaatgagtggagctgtggaaggagttttaccgtatggctatcgtatcgacattaaaaatgcgttaccgtgtggtaccg

SEQ ID NO: 80778 - DNA, 106 bp, Heterodera glycines
gtttgtgtcgatgacgcggacggacttttggcagcgattcggggcggtgccgaccgagtcgaactttgttctgcgcttgaggttggcggattgacaccgacgccgg

SEQ ID NO: 80779 - DNA, 2777 bp, Heterodera glycines
  unsure (1)..(2777): unsure at all n locations
atgagcggtaaaaagggcgccgattggtacgacgaatcggaccgtgacaaaatgaacatgttggacgcatgtgccagtggaatggtggcagaggtggagcggtaccttaatgggggcgtggacatggaggaggaggacgacgacggagtgacgggtgggcggggggaggacggggaacggcacaacacactcggcacacctgctgggggcgaatttcatttaaaaaaaatcaaaaatgaatttagcccttcaaattgctgccgcnaaaggacatcggagcctggtcagtggctttattacatattagtgtcctataattagcaacaattaatatttccaataggttgagttactgctgcggaagggtgcccaagtcgatcgagcaaattatgccggaatggttggcaatgccattcattacnttaataacaacagttaatttgatgttcatgctttgctttcctttatagactccttttctccacgcgtgccgcgaaggtcatcaggacgtgatcactgtgctggccaaccatggggcgaacactaatacgaccacgtattcatttggaaatttgtttatcatgggatgttgcattcaaaatttgttaattattattttttatttcaaatttctgtcactttatctcccagtggtctcggcgtgtcagcgatggcattggcatgcgccggtcggcacattggcgcagtgcggactctccgcggactgaactcgccggtaaattcggtgccttcaaatcggatggctcatcaggtggcgccaagcccatatatggtcgcttttttccaaatggacattgaaatttgcggctttttgaaaaaaaagtactgtggttatcaatttttttaaataattaactgaatttattgaataaaagcgacgcgaatgtttggcaccaaatccgctggatggatggaatggacgtgcacaaaatgggcgaaacgctcaaatttccgccaattttgatgagcctaaactacgcggagaacagcttaaaggcgccaaagagtgcaagtaaaaaaaaattgggttcaaaatgctgaaaaagttttgccaaaatggcagaagactttcgagcggtgatccaagcgggcgacgaggccgaactgtgccaatgggtgcgcgaggggcgagtgccaagcgcaattggagacggagtcactccgctgatgtacgccgcagtccacggccaacagcgcatcgtagggaaagcggaaaactgattcataattagcagcaattaatgaatgattaattgattccaatttcaatgaatcatcgattataatttgcttaggccgaacatttgttgagaaatgttgcgaattcggcgattgatgcccaagaaaacgttctcggactgagtgcgctaatgtttgccattgtcgccggggacaattcgatggtgcaactgatgctgcgccatggggccaacccgcgcctttcctccaccacaaaagagccattcactgcgattgaactgtcccattttgcgggtaattaaataaagcaaataaataaataaacgcatttcacattaaaatttaaaaaaagaaattgtttaggtctcagccatgacacgcttgtcaagctgtacaaacaatttttgatgagtggaaaaggcatggacaatctgaagaaggaattggctaacaaaagggagacgggcgaaattggcggcggaaaagcgccattgggcgagcggaaaagctcagcgggcattgccctggcaaaattagtcctaaacgatagcggaaacggaggcggcggaatgccatcgcccgcgtccgtcgccgggggcggcgtaagttttaccaaatggcaaattttaaaaagaaatgaagcgcaaatggtccaattgaattctcagagtcataagcgacttcgtcgagtgatcgaaagcatcggcagaaatatcatcggacttaccggcgacctaagcggacaaatcggtgccggcgcgtgcggcgcaagtgacgcgttcccaatggcgcatctgtcgcccagcggacgcgcgcgtttcgacgcgcttgtggacacggcacatttgaacggggcggacgcaccgcgatttgtgctggcggaacagattctacgcggcgacgcacgtgcgcccgcaacgacactcgcgcggacgaaaacaatgcaattggacgcacgcattttgttggcccgacagacggcgattgtaagtagagacagagaaacataaacacaagaatgcattgattacagtatcggccaatttgttactgtaatttggtctgacatggatttgggcgtttgcttcacttttttacctttgattttaaagatttttatataaaattagttaatcaattcgattaattagagattggaggggagggaggacgctggacgagtcttacgaggcttcttctggttttaaaatttgttctgtatagagttggatggtccgaggcgacactttgaggccaatgatattcggagacaatgtgccacattcgaaaagtgccgaagagtcagccgaagttaatggcctttacatggcagcccaatggaacgcagaaaaactgtttaaaaatgtataaataaaagtataattcgaattgtcaacaagaaattaaggccccaatgaaaaggcaccgccgcaaaacggacccatcccatgggaatggggcggaggcaattccgaacgtgcgagtgcccttaacaccgcaattaattgtcagaacggctaacagtcgcgggcacgaacaactgcaaaaatgttgaa

SEQ ID NO: 80780 - DNA, 319 bp, Heterodera glycines
atggacacaattctagcagagaggaagcgtgccaagcttcaacacaacgggcattcatacatgtttcacaaggtgagtgctgacggtgaagttcgcttttggtcgtgtgaacatcatcacgcaaaagacatccgttgcaaagggcgccttcacactgacctcaacaacaacgctttacgtgaagttggcagccaccaatgtgaaccaagcacgatgtgtcacgtcgctcgcgtttctcccaattggagatttgacccctggaatcattgctctggacatggctcttcccgacgaacttaatcccgtccttgactggtaa

SEQ ID NO: 80781 - DNA, 1716 bp, Heterodera glycines
ataagaaaatggacacaattctaacaaaaaggaaccgtgccaagcttcaacacaacgtctattcatacatttttcacatgctgagtgctgacggtgaagttcgcttttggtcgtgtgaacaccatcacacaaaagacatccgttgcaaagggcgccttcacactgacctcaacaacaacgctttacgtgaagttggcagccaccaatgtgaaccaagtgcagctcgaatggaagcacaacgagtgatcactggaatcaaacgccgggcggtacaaaccatggaaccaccagcgacaattcgctctttggcactgcagaatgtggtcacgccagtccttgcgcaactccctaccaaacaggcgacaaaacaagtgataatttttatgtttcctcaaatatttgtatatttagataatcaggcgtgtacgtcgtgaaattgacgcaccgccaccggttccgaacacgctcacagacttaatcatcccagacgcatacaaaatgtattctcgtacggacgaacaaagcgagcaatttttgttagccgattcgggtgtttaccaagaaaacgggagggaacagaggtaatatacatgcccactttttaattatttaaacgcaatttagaatactgatatttggacgtgaatcgaatggtcggtgggcgcatgaaatgaaagagtgcttcgccgacggcaccttcagcatcacaccgatgcctttccaacaagtgtacgcaattttggcgcggtacgaaataaacagttaacaattttgaacttattatttaagtcggaatcgctgggtcatcccagtgtgctattgcatgctgtccaacaaaacgcacactacatacgagcgtatgtttcgtatgctcgttgctgtgtggccagacttcaacccggacagcgtgtcgatggacttcgagacagcggcgattactgcgctgaatgtagtcttcccattcactgaagtgcgcggatgtctgttccacctcgtccaaaattttcacaaaaaaatttctgaatttgggctgaaacaggttgaattcatgacaaaaaaaaaatcgaattttcgaaaattttagcgctatcaaaatgacccgacattcgcagaaatggcacgatgtgtcacgtcgctcgcgtttctcccaattggagatttgacccctggaatcattgctctggacatggctcttcccgacgaacttactcccgtccttgactggtaaattgacaatctcacaaattgtttactatttattgttctttaattatatattaggttcatcatgaactacacgggtcgtcttaagaatgatggaagccgaacacgcccgcgatttgacccaaacacttggagcgtttacactcgaacaatgcaagtcgatgaccggacgaataaccattcggaagccgcgaacagacgcctgcagtgctcatttgcctgttcacatccatcgatttggcatttcattgaccttctgcgaaaggatcaaaagttatcagatgatgacttcgcgaagtgttcaactggacaagacccaccgcaaaaggcaaagaaatatcgcgacgcagaccgccgaattctcacgatggttcaaaattatttgccacttaacaacggagacaccaacattttcctaattcatcagcctttcaatcatcattttatcattacctttttgatcggaatttctcgaaattatgaaatgagacc

SEQ ID NO: 80782 - DNA, 951 bp, Heterodera glycines
atgcttaaaaacggtcagaatcgatgtaaaaaggtttgaaatgggttggaaaaaaagaattaggggcgcgcttgccctttttcaggctgagaaagtggcggaaatggagtgccaaactcagctgggactcaagtgaccgcactataaaaagcactcaaaaggcatttgaaataatttttctagggtaatttgtggcgctgttcacgaatatgacttttgtttttcaaattttcctaatcccaaaccctaattcgaacaaaaattcgaaattcataaattaaaaggaaaacatatttttaggagttttcgaggtcgctgaacacggttattgcgcagctgaaaaaggagaactctaacgcaacgatttgttctattctatacaaccatcagcattggactgcactcaaaaatacaacaaatctcctagatttgattctcgaaccgcgtgggaaactcatgctaactaatgccagctttgagtgccaagatgcgaacctttaattaccgcatttattctgatctatttaattagtatttatgaattaacacgttatcacacttttaattattttttccacaatttttactttttaatatttaaaattcagagaattttttattataaattttattaattgtacaaaatttataaaaaaatttcaaactaaagagcgagcatttgtgaaaatcattaattttgcttaaaactcctctctaaagcattgttctaatggaatttatgggaattatttttgcttttgtaaatggatatgtttttttatcccgaggagacaaatgcaatttgatttctcgctttcacaaaaaagaaaaaatttaatttttagggatgaaaaatatgtacaaaaaatggtcaaaatatgtacataaattttaaacaaaataccgaaatatgtataaaaaaaattaaatatgtactaaatatgaaataaa

SEQ ID NO: 80783 - DNA, 495 bp, Heterodera glycines
atgtatcaagaaaccgacgttttccccaatcttcaacatgaatctcttttctcattgtttttcagggatactttgccaaataccattggtacgtttcggtggccacccaacaggtggacgctccgatcaaagttagtggttgtgatgagttaaaaatgtgtgcagaaacaatggaccacaaattggcatagtttcctctggttgatacccaaaaaggatttatgtcccgaaaaacttaaccaatcgctcgtcaagactctcgagcattgatcggcttcaatttgttcctttttgtccgtattttctgttgcattttcgagtgcttctgtttttttaaattttgtccttacataattgttttcagttggtccaattgcccatcaaagtgttcaatgtcggcatcgatgtcagcgcggccaaaccgaaagccgaaccgatcatcggggagaatccatttctgagcagagacatcgaaaggcacttctcatgggatga

SEQ ID NO: 80784 - DNA, 136 bp, Heterodera glycines
atgaggagagcaacggctcaggcccgcaagggagcaggcaaaatctcccgcgcggtcacagtggctccgaccgcacccgagagcatcgccatccaaacgcccaccgccaagctttttgccgcgctgcacaccaggg

SEQ ID NO: 80785 - DNA, 544 bp, Heterodera glycines
atggagccgccggcgtcggcacaaaatttttatgtgccagaaaaatgcgattttggcacagacccacaatggtgtggagactatgtgcaacaatatgtcaaatggtttgaacagtatggaagccgtggaaaggtgcgaaaatttttagaaatttataatttcctaatttaaaaaacctaattattcgtaaaaatgaaaatttccattgactaaaaaaatataaattttgaataaattcaaggaataaatttgaaaaaagtaaattttaaactttagaaaaacctgaagctaaagaaatttaaatgaacatataatatttaatttcaattttttttaaatccataaaattttgcgaaaattctcagatttttctttcggacaaaacatatcaaattgattgacaaatacttaattttcttaagaaatcttcgaatgttggaaaatcttttttttaacaattctcaagagaaatttggggaaaattattataatttaattcaattatttaaaagttaattcaatttttaaaaaaataattaataaa

SEQ ID NO: 80786 - DNA, 640 bp, Heterodera glycines
atgggtggttacggtaacaaatttgggccttcactcggttacggtggctacactaatccgcttatgatgatggacgccggcagactaggtggtggcggaggatacggttacgggccgtataacagaggatatggtacggtaatttaaatttaacaattctcgtttactgcggattactgtaacatattgatgggcagccggcattggcgtcagcggattcaacaacccttacggaatgtactataacaatggctacggtgcagcaccatcgctaccgtacgcagcgtactggccacagagtccagcactacagtacccaatgggcggagccgcggcacaattacagtactccgcgtcacagaatccttattccaccgcctattggggtggctttctgagcccgttgaaagccaaaacaacgaagaagcggatgcttttagaataaacttaagaaaatttaggaaaatttttggtgccaaaaagcttttaaattcaccgaaattggcaattttataccgtatatttttgaccattccttaccataacattttacacagaccctcaaacaccgatattcttcataatgataacattttcctagtgtaatgttattgtatcacaaatattaatcactaataaa

SEQ ID NO: 80787 - DNA, 1122 bp, Heterodera glycines
atggccaactcaaaaataagaaaaaatgaattaacggtgaaaattatcccaagcctggttgaagacgatgcacacacctaccatatgctggcctactgtactggcaaaaggggactaatttacacagaaaatggttgctcaaaaggaattcaacttccaacggccaagaataattggcggcatgtctttgatgaagttgccaaattagagtttaatgacacacagcaatgtgttgcgtacaacattcacatttggttaaaactgaaagaagaccaacattgggtttcatgggttagcattaatagttatatttttaaatgtaatgaacaaaataaaatagaacattgaaatagtctatattagagtaaagcggtaccggcaactttcactttaaccggtactgatactgaccgtactggaaaaacggtacagatacccgtaaaaatctataattttcagaaaaattttgtatggaatttgaccactttttaacaatttttctcatcggaaaaattaacaaaatctttgggaaatttgagtgaagaaagccttgaaatgggtgcctagaaggaaatgaaatttttcataaaaaaaaaacaattttcctttaacaatttcttaacagatttttcatagaaaataatagcaaaagaaaaagaaataatattatttaaaaattatgaattcttaaattatttttattttcagccaacatcatataacagtgaaattgaaaacaacctgttgaatcatcgagttttgttcgggaaccatttctatctgaccatcagtccagaaatggacagtaacagtgagcacttttacagtatccaagtgtactgtgaggaaaaaacagttgaaaatcagcaacaccaacagatggttgatggcaaaacaggaccgacaaattcggacaaaaactggccaatgaatgatgaaaatgacaaatataatttcaaaacgtacaccaaacggtcaactatggttgtgttcaacagtgaagcgcgccagtgcaccgacagtaacacataccgtattaaagtgtgggcagtgcacaagcaattgctgtattttaatgtaaaaaatttagcttttttttgggagcctattaagtttctataa

SEQ ID NO: 80788 - DNA, 2475 bp, Heterodera glycines
ttattttaattgaattcttttatgttctcaaaacttttattgctacttgaaaaatctactttagcaaataattgaattatttgaaaaaaaatttctataattagccggggtatgcactcgttgattttgatatatttgctcattagcttaatcgaccccactctaaaggaagccgacgacgagcgtgacccttgagccatcaaattaagacttgtgggcaccgcgtaatgaaagggtcaattacataatcgaattaacagccgatggacggacgaatggacgacgacacgcagttaatttttgagataaattttgatgcaatccgattttgtcatctaaatttaaagcgaaaaatttattctcaaatttttactttaaaatttttaaaatttcaattaaatatttaaatgttcgctataaagtgaatgaaaatttaattttagtcaaactatttaactaaaaatgatttggtataaaatgcaaaatggaataattttcatttaaataatatttttaatttttcatctaaaataagcaattataaaaatgtttctattgccgtttctgttttgtttctgctcattgtcagcccattttgtgtttactcatgcgcaaaaacgaggggaatggtcattaaaagaacaaaaggtaattaattaatttattcatctcattaattatttcattacgccaaatcagaaattttggcaccattttcaactgaaaaaagagaagcatttgttgccgacaaaatcgctaattaatgacggcgaccaacaattaacagcacaaaatgggagcaatgtggagaagaaggctgcaccaatattttcgcctgaagatgcttattggtgggaaaatatataagctattgtgtctagaaatcataaaattctatcaacatttcttctttatgtcgtattttataatatatttcgcaattttaaatgctaaattaatttaaacatttttgattattttaattaaaattttttattcaaaaaataataattaagtgaatcatttaacattgatattcatccggacgattatccatctgcgcggagaaatgagtcagttgttgagcgtatttgtggacaaaaggtgtgcaataaattttaatagcaaattcacaaaaatagtatatattcacaaattcaaaaacaaaatttaatatttcaaatattctaagtgaaaaattattgataataatgcgatttattgaaaacagaaattaaaccagaagaaactgataaattttaaatttctccaatgcaatttccagtaattgtttatctttgtgtcaaatatatactaattagaaaaagtacagtaaattttactatatctaccgtaggttatggacccataccgttggatggaggacccggaccggccagaaacaaaacaatttgtcgcggagatgaatgatttgtcacgtccatttctggaaaaggcattcttccgtgcacaattccgcaacaagttggtgatggtgcaaattgccaaagcgatgaaattttgatcaaaaattggccaaaaaaaattgtgggggtggttaggcttttccattatgacaggatgaagcagctgttcgaccaaaaggcgtacggatgcatcaccaaacatggcgactattattattatgcgtacagtgagggcactcaaaaacaaaggcaatttttattaaaaagaaatcattaatcggttcttaatatttgagaaaatttttaacatatattaaattaatcatttattggggttttcttggccccaaatacattaaaggagaaatgaatgttttctaataatcatggattgtgatggtcagatattgagatgagagttaaacaaattatataccaaaaaattcagtgccatttatcgccagcggacattgtcgggtgaaaaggaattgtttttggaccccaaccaattctcgccggacggaacagcggcaattgtgcaaagcgcgttcacccgggatggccaaattatggcgtacaccgtggccgaaaagggcagcgatttgagcacaatacgggcaagaaaattaaaaaaaattatgcaattttagtattaaaatcgaacggtagttatttttgatgagagaacacaaatcgaaaatttataaaatccttgtctgatttggtacatctcttttaattggagaaagctttttgtctttaaaaacattgacttatgataaataaaaaattctaatagaaaagttaataatttcgaatttaaatttgttttacaaaaataatataaaatatcaaaaataatatttaaatttataaatattttcttcataatttagttccgtggtgtaaaaggcaatgacttgccggacaaaattcgaaatgtgaagcaaagttcgctggcatggatgcccaataacaaaggcattttctactcggtaaatacaaattataataataaaaattaaattttcgtattattatattattt

SEQ ID NO: 80789 - DNA, 556 bp, Heterodera glycines
atggcggatggtgccacaatagtcaaatttgttaaaaagatacgacacagtgacgaatggcgtggcgtcaatttgaccggcgttacagtaagccaggagtttttccacagtcgcgacggtacaaaggtattaaattgtcatttaaataattcgtctgattttgagtttaccatgatttcgaacatctaaataggtaaaaaatccaaaataaaaagtgacctagaaatttcgtcataatagccaaaaacaggcaaaaatagtcattataaaaagtcatcttaggcgaatcatgcttttttcgtgccaaactaaaaacggcgcgctaattattttaatttttggttcaaattcacacatttttaaaggtgccggttttcattataagtcggaatgatacaaaacgcgatggttcaaacccggcacttctttacggttatggtggcttcaagtcagtttatcttgggatttcaatttcccatcatggaaataaattattaaattaagcattccgttgttacccagttattcttcacaccgcaatattttcgtaaaagta

SEQ ID NO: 80790 - DNA, 1108 bp, Heterodera glycines
atggacatgctccgattccacaagtttactgtgggcagttattggatgaacgaatacggtgacccggagaagccggaggaatttgaatacatttacaagtaattgttatttatgaaaaataataaaaaataatttacatttttaaagatattcaccattgcacaacatacgattgtctcgtggcactcaatggcccgcaacactgcttatgtgttttattaaaaaacttaaatttttctttaaaaaatataaatgattaattagggcatgtaattttataggcacgaaaaaattaaaaaaaggcattgaaaaagtaaaaaacatgcacataagttttataaaattggggtaaaatttcacaaaatttcgtcaatttcgttaaacttaagctagagatcccgtgaatcgctaaataaggtgtcacaaatcctttttgaagaaaaaaaaataccaaataaagctaaattcattaattttgaagaaaataataaaaaaaatcaaatttttttgaacttatttttggcataaattgaaaacatgcaaaaataatttttttgaaaaattttcttgtcaaaatggtcgcctctttaaaatttttctggtcaaatggcttagatgttgttctatatacattcatgcatttagaaaaaaaaaattattaaataaatttacattaactaattggaaatttactatttaattttttgctttttaatgcatttgctattaaaaatataattttattattaattattttaatttctaaaggactgccgaccatgatgaccgggtggtgccaagtcatacgctaaaatatgccgcacaactctatcattacttgaagaagccggaggtgaaattaacccaacgaaagccggtgattgtccgcgttgaaaccgacgcgggccatggggcgggcaaacccagggacaaagtggtgagaaaaattggaaaattaattaaaaaataaattagttaattaattggaataatagattgatgaactgaccgatattatgagttttctgcagagagttattcagctaaaatggtacgacgattaatttcaaatgcggtactttaattgtttttaatttattttgtgcga

SEQ ID NO: 80791 - DNA, 1751 bp, Heterodera glycines
atggagttgggtgattttagtgttgtgatccccacatcctccgccgtcgttatgttctgctccgccgttgtgatccccacatcctccgccgttgtgatctccccatcctccgaatgccagtaaccggcaatttggcttattttttgtaattatcataattaatataacatttattaacaaaattcgcaggaaaaatggaaaatatgacaatttccgtcttgatggcagcaacgcgtcatttccaatcattcggttgcatgtgaaatctgcatataaaaaggtcaatttcaatcaattaagtcatttttttattcaaaaaattgtttaattaaggctaaaaggaaaaaatgtttaccaatttaattttgattttattttttgcaacaaatttttccgagtccgccgctggtgccaaaggaaatgattcgccagaaaagacaaatgaaaagggcgacgaattgccatcaaaggtgatggaagaaagcagtggtgtggagaacgaaaataaagaacagcaaatgaagaaagaagtacaaatatgtttaaaaaaataaataataaaaaatatattttttaaatttatttaaataaattttataaaaattaattttaagattgaaaatcaaaaagcaattattgacaaagggtttaataaattttttattgaaacacttccgtcgcttgttgttgagctggacaaaattgtcaaaaaaattaccaacaccgaaaatcaaatggaaaaaacttttattcatggattgatagaccaaatacggccaatatacggtataataatagtaatagtataaatttatataaaaaaatataataatatttttagttaatgcttgtagtgattttatgcttttacttgcaaaattacgtttgttgaccaatgatagcacgataaagaaggacgcaataaaaataacaaaattggttaaaataataataaaaaattgaaataatttaatatatagcaaccttttatcaacttttcagattatgttaaagaatttgtctttacccttaatcaacacgttcaatcaaggaaaaaatgttataccaattttcttataatatttgaattattatctttgttatatttttaatgtttttccaaataattgatatttattcgtttaagttaattagcatttatcatgaagaccgcacagagttggagcgaaatacgcaacggtaattagcttaatatttgtttttgcttcttatttaaaaagtaataatataagcaaacttcttaagaactatttgatgattaattgacagaaatcggaattggaaaaaagtcatttccgttccctgaaaaatataaatttataatttaaaattacttgctaagaaaagttttatcgaaacacacaaaattttttaattttaaagtttagttgggaaataattaacaatataaaaaaatgcaattatgatctttattctcgcctcgagaacagtctcgggtttctggttctcgtcttgttgagtcatggtctcgagtgtgttttgaggccaagtctcggtcttggtaccgtctctcgagcagttttaaagcattatcaaatcattttttttacagaaaccaaggtgatgcagtactgactgaatatgatcagaaattcgtcaactctttgcgtctcaatgtgcaggaaggccgagactttgggtacattcttgtcgttttggccaaccaacacaaagatgttttgtcaggccttcagcaaaaatctgattaa

SEQ ID NO: 80792 - DNA, 290 bp, Heterodera glycines
atgattggaaatgacgcgttgctgccatcaagacggaaattgtcatattttccatttttcctgcgaattttgttaataaatgttatattaattatgataattacaaaaaataagccaaattgccggttactggcattcggaggatggggagatcacaacggcggaggatgtggggatcacaacggcggagcagaacataacgacggcggaggatgtggggatcacaacactaaaatcacccaactccataccgaagaaaaaaatattttttcgatgccataatcgaaata

SEQ ID NO: 80793 - DNA, 1787 bp, Heterodera glycines
atggcaatttttccaacaaatgcccttgcggttttcactctgctcttttttgcgtacaatatacaaattggtttcattcacggcgaaggatggggtgaacacataaagttcattttctcacaatttcatcacggcggtggagggcatcaccacggcagtgaagagcatcaacacgatggaggacagcaaaatggcccaacgaacggaggtggcaaaaataaaacagtggcggagaaatttaaaacttcaaaactcgtgccggacattttgccattgccaccaccgaaatttttatacgttgaatacccaaaggatgtgaaggttgaattgggaaatttattgttccaaaaccaaacgatgaagccgccaaaagtgatatggccagctcaaaaggaaataaattacacgcttctaatggtcgacgcggaatcgtgagtgataatatttatttaacacaattatttaatctttttttaaatttaagcacaatggtgcattttggcttgtggccaatgtgccgggaaacgatatgttgtggggagatcaggcgactggcggatattttgcggttggttgttactcaaaaatgatcaaaaagggcgttatttaaaaaacaaccaaatggagatttttgacaaaaaatttttttataatattgctcaagaataataaagattttaaacattaattttattcgatatccctaaattttttaaacttaagtagattttttgaaaattttttcaaaaaatcttttctctcaccagacaagacccccattcttatcagtgcttaaaaatttcgtgtttcgtgccaaaatacgaaacccgaacgcgaaactcagtaaaaaatgaaaatacgaaaaatacgaactctaaacacaaaaggatcaacatccctgatatcaaggattacgaatttggttgtagatgagcaaagctataagcaaaattttttattttgattatttttttaagtaacgcggtcattttggtggatatgagtaaaagtcatatacagatattttcagatatacccacccccaactggcttgttttaatgaagacgatgccctaatcattacccgatttttatagaaacacaccgctacactttcttggcttatgaacaaaaggcaggaaaatacttaaacgccaccgctggtaaaaaattatttcaaaatttaatgctaaaaataatttaattaaattgttttccattttagtcgttcgttttggattcaatgtcaccgactttgccgataaagaacaacttggacaaccttttgctggcaatttctttaccgcaacacaccaagacacggacctcggatattgatgagggacattgagtgaatttgtaaaagtagtagttttaaaaaatttaaagttgaactaacaaatagaaaatgttgatgaaaatagacttttcattttgacgtactatttctttgtctctgttcatagaaaaagaaaggtttcacttcagctttataggcttagcatctgtttatgagtcgcacatgtaaatctttttaactgggaggccaaaattgcaaagctgcgcagtagggataataatttaatgttcgacttgacttttcctccgatgtaatttaaataagtatttaaaagaaaggcaagcacaaatttgaaaaaggacaaattcacaaagaaaagatacgtttatcaattaggtcggaggatgtaaattggaaatacaaaaataattaatgatccactttatgcgcgaaggaaggagcgagttgacacaaaataagaaataaa

SEQ ID NO: 80794 - DNA, 2193 bp, Heterodera glycines
atgctaattgcgtttgtgagaaatgaccggcaaatgcaaatcagtgaatattcaaagcaaaaatatgaggcacaccttggcattgtgtattttatgcggaagaattggcaatgtgacaaaattgcgaatgaatttgaagagcatgaacgggcagaatgccaaaaatatcgcaaatatttggacattttatacgaatatttgtttagagaatacgccggaattcccacagttaggccaaaatttgtatttaaatatggaattgaaattgaaggcccaataatttatgcgatgaattgtcttgtcagaatttcgcgattttattttattccatggcctaattttggggaatataaattaaatgaatttttcggtgttcaatttgagccaaaattgttgaatgaggagaaattgaattatggagtaaaatttgaaaatcaaccaaaaatgccaattaatgaaatcattttgcaattggcaattgacacagcaaatgaatgggaaataaatgaaagtttagatggaataatccaaccaaaaatgaacaaaaaatttgaagaaaatttggaggaaatgtttagcgcatggaaaatctatgaaataaatgatgacaaacataaaataattgtggattcgaaattcgatgataaatgggcatgggtgagagatggtgctgggcagggttgttccgggtcgagaaaaatatcgggtttcgggtcgggtcggccgaaaaatcatcgggtcgggtttcgggtcgagaaaaaggccgggtttcgggtatcgggtttcgggtaacccggaacaaccctggtgcatgggtgcggatggcactgcaatatttgcagcgaattgcgccatttataggacgatggaaataaaaccaaatggaatcaggtttttcagccatttgctttgcttaaattcaagaaattcatacaaaatatctttagaaaaaggataataatgaacaaaaacaaatacaaaattttcgattccatttgaacacaatcgtttcaaaaaaaaattctcaatttccttatctaattttcacccagacccccttcttaccagtgcttatttcgacccgaaacccgacccaaaatcatcgggttgggtttcgggtcgggaaaaaggccgggtttcgggtttcgggtaacccggaacaaccctggtgctgggtagagcgcggaaattagtgcagatcccgttgcgggattggaactcaaaatttttgcaggccgggatcccacggagtaatcccgcaaatcctgaaattcccaaaaatgcgggattacggactgggacccagcaagatcacgcgcgggattccgtccagcaccgggctctagtgctgggacgttcaccaaaaaaccagtagattttttaatttttttgttttactagagttacgggaattccaataagaagttccgaggtcccggtcccggaaattttaaaagcccaggtcccagacttttagaaatttttttagcagatcttccaaaaattaaatgcttttcaggaaaacaaataatttttgaaaaaaaattcacttccgatatttcttattctgacattttgttccgttttttactttttttttcattaaagattcaaacgatttttattttttatttgattttttttccttataaaataattaaattaaaatttattgaatttaaaataaattcatggagatttcccggttggtctaggttcccggacgaaaaccgaggtcccggttttggcaaaaatttccagtcccgtacaaccctattttagcgattaatttttacaaaaaaccaaatgtttgtgattcaatggtttattgactaacgtcataccattccacctggagatttaacacccaatgaaaattaataaataaattcaaaatttagagtgaagatgctttagtttcagaatttgtcaaaggactgacgacaaaatttgagaatttttttaagatggtaaaagaatacgcaaattttggtatatttgaaatcgaaaaattgcacgagcatatgacgcataaatatgaagcctttcttggccttgtgtatttgatgcgtgaaaattggcaatgtgccgaaattggagaggagttgaaagaatatgaacgggaagaatgccaaaaatatcgaaaatatttggacattttatatgaatatttattccgattgtatgctgaag

SEQ ID NO: 80795 - DNA, 653 bp, Heterodera glycines
atgttcttgcccaccatattatgggcccacatacaaagtcaaataggcaagaaagttgatcgcacaagaaatggtaagtcgtgcccaattttactggaataatatataataatttaattaattaattttatttaatttttttaatatattaattaatgcaaaattgataaatattaaactaataaaagggttcccatcggctaaaattgttttaagggaccaattaggtgacttcatggaggacataaaggaaaagttttgcgaatttatgtgatgatagacgtcgtggggaaatttttgaaattttaattgggttaaatgaacagatttaactcaaaaatggaaaatttacaagatttttaaggatattttttgaagatttttatagttagttagttcgccaaaggaaattttgaaaaaatttaatgagattttaacagactttgaccaaaactttttttgcaaatcgggaaataaattaaattttagggaaaaagaaaactctttttccattggattttttatatccgtgtgtaaaataccacagctttccaagaacatcaggaaaaagggatatctgcaattttcatggcgtaatgcccaaatccaaggatgttctttgaatccaaggacggatgggatcctgaaaaata

SEQ ID NO: 80796 - DNA, 763 bp, Heterodera glycines
  unsure (1)..(763): unsure at all n locations
atgatcgatcagtcagagggaatgatcaaaagtgagctaaatgatcgggattagcgaaactagatntattaaagtgatcagaaatgagannagtgagggtaattgtcaggttaaaataatctgaattattatgatcagattaatgatcacgagttgggtaaatactcggaattactgagatcagaactatataagtgatcagaaattgggtatgtattggcaattttcagtgatcagagcaatttcagtgaccggaatgatctaagcttaatgatggagataactgttgatcagaggaaggaagtggtgatcagtaaaaccctttttcataaatattatattttttaaatattttaaaatgcgaaaaaattcgcgcacattttcactaatcgcattaacagcatcagccggtgatggcggcatcacttgtgccatgagtgtgatgttcagtgttgtgctcccatcattgtcccaatgctttacaggaagttcagaagcgtcacgcgtcagagccaacttaaaacaaattgaatttttaaaaaattaatattttacagtatactttgaatgcctggcccggtcggagaagtacggtagaggcggaagacgaaccgccgataggggacggtggggatacggtagaattggacgcggcaatgggaacaacgcgaaagaatgggcgcaggaagaacggctcagccagcgtcaccgatacagtacttccctgtcaattgggtttacggtaccaccgtattgcatttaa

SEQ ID NO: 80797 - DNA, 289 bp, Heterodera glycines
atgctgatcacggagaagaaggtggagctggtgttgaagcagctgaaccgggagaagtggaacaaactgtgctacgacgggggcgaggacggcgccatttgcgacggcggagacgacgacggcgcatttctgttggacccggcggacgaagcggcggaggacgacgaataggcgaagcggaacggacgggcgaagcgaagggcgaaagtgccatcattcgatgagaaatgccatattgttatcactagggcggcgaaaaaagaaattcgcgaaatacggacatagaaaa

SEQ ID NO: 80798 - DNA, 827 bp, Heterodera glycines
atacgaatgttctgaagagattatcactatttccgcgatgctttccgtaaatgcggcggtgttttaccgcccgaaagcgatggtaatccatgcggacacagcgcggaaaggattttggtcgtccagcggcgaccatctgactcttctgaatgtgtacaacaaatggagagaaaccaacttttcgatgcagtggtaaatccagtgtctaaaataactcaaaatatagaagtaattagttgaatttaatttttatttaggtgtatcgaaaattttgtccaacatcgtacaatgaaacgggcaagggatattcgggatcagttggaaggactgctcgaacgagtggagattgagccggttttcttttattttaagctggatttaatttaatattgcatctttccgactttctttccatttaattaattctttaagaaatcttcttccgacacaatggccattttaaagacaatcactgctggatatttccacaacttggccactttggacaagggcggtcaatacaaaactgtcaaacaccgccacactgtccaagtccacccaaattcttgtttgtttgaagaccgacttcgttgggtgatttactacgaattggtattcacttccaaagagttcatgcgagaagtaagtcataaacaaactctcattttttaactaaacaaatgtacctacagataattgaatgtgacccgaaatggatttcggaagtggcaccgcattactaccaacaaacccaattggaagattctgtcaacaaaaaaatgccgaaacaaatgggaaaagcaaaaagtgaactcgtcgggagttga

SEQ ID NO: 80799 - DNA, 666 bp, Heterodera glycines
gtcgacctttctgttcgcccaaatagggcttttatgcaatttggtggaattcaatttaagtgtttcaacccttcggaagtgccaaaaattagtgttttggaggtcactcagacgaacacttttgacgaagtacttgcaaatgttcagtctcgttccctgttcattttcctcgttcttaggccggtttccccgttagaggtgggttgtacgacccgcttctcggcacctccgaaaataaccattgtgagacgtgcgggatgcaggggacgcactgtcccggccatttcgggcacattcggctcactgtgccggtgttcaaccctcttttctactcattcactctcaatgtgtgttttggactcatttggttttttgtatgttctttccattaagatgatgaaagggacttgcatccattgccaccgtttcacctgcaactccaattcggttgcagccaaagtcgtcattgccaaactccgggcctttcgttttggggtgccggaagtcttggacagggtcgagagtgggttgaaggcgaaattcgagaaaagagacgaactgctcactgaacgcattgatttgatcggagagagtgtctttttacgggaaattaatgcgttcatcgcagagctgaaaggcgtgtccaacgctgaccaactgcagaaa

SEQ ID NO: 80800 - DNA, 1738 bp, Heterodera glycines
atgctaaacgcagcgaatgtgccgacagtgacaatgacagtgaacatcagcaaaggagtgcttgtaagcagaggaggaggagggcattttgccaatttttccaacattttgtgccaatgttcagaatttggaccgcctttacaccagcgaagcgtccctttgggtcaattggggcggcgttcggccgctgaccacgccgttgtgcggctacaacggcacgcaatgtggccaaaatgcgactgtgtacattctgatcggaagtgccgtcattttgatgctgctgattgtggccatgctcggcatcggatacgcactgaggtaggggggaaaaaccatgccaagcgtagtcattcagtttttgcttttcaacaaacagcctttgtgccgttttcagggagaaaatgcgcgagaaagagcggctgatgcgcgagtgtctgattccgtttggggagctgcgcaatttgaaggagctgcaaagcacggaagaactgaagaaggagacggagaaaagcatgcggagcatgcaaagcagtcattcgggtgagaaaaacggtcataccgtaaccaaatgtacggtaacgaaagtacggtaatcaactggactactgttgaggaagcacaaaacttacggtgggcagccacaaagtgttggagacggccaatttcgcactgtttgtgtacaaccgggagattgtgctcgccatcaaataccatgccagagtgcgcattttgggcgacgatttaaacttccttcgtaaggtgaaagacgaaaagtaaccggggaattgcctacggtacttttgaccggggaattggttacagtactttttctgggatacggtccaagcggaacttgaacaaagttctaagtgtaataaacgacgttatatttaaatacttgtctaattatcttattaagcatttgcttttggtcattcccaaaatcgcaatacagtaatctctcatcgtttctttacggtaacagctccgccagtttgaccacgacaatttgaacaaattttacggcgtttgcacagatgggcctcttttgtacggaatatggaaacactgccaacgcgggacattaaaagttggcaattaactaattggcggtaattacgctaattgatgaacaaattaggagctgatcgccaaggagcaatatgtgggcgacaatttcgtaatgttcgctttgatgcgcgacattgcaagtgtaaattttgaacattttacaaaataacaattgatcaatggataagtctgtttgatcatttcacgccttcttcactttaaatgtcccaatttctcagtctgatcattcaaatcccccagtctcttagatcaccactgataactcatgactcatcatctcatccatttcccttctccattaacttttcagggtctgatcgccattcaccaatcattcatcggtgcccacggccttttgtcctccgaaaattgtctgatcaacgaccgatggcaagtgaaaatcagcgactatggactgaacatgatcagagagagtcagccgatgccgaagaaaagttggcattttggcaccattttaattaacgccaattcaaaggccttttgtggacggcgcccgaacttttgcgagaaaacaatcggacgggcacaaaagagggcgatgtgttcagttttgcaattatttgtgtggagatggtgaacagagagacggtttggaatgggacggagagggacgacgacgtggacg

SEQ ID NO: 80801 - DNA, 1196 bp, Heterodera glycines
atgcttttttgcatggttttgctgtttttgggccccttttacattgctaaactgcagcagcaacgaaacatccggcgtttcgtcgccgagttggagcagcgcctggtggagagtgaggcggagattgcggcgctctgctccgagaagcgtgagttggccaaacgcgttggacacatggccaacaaattggacacggaacgcgtccaaaatgcgtcggcgatggaaagcgtgcggagggaccggcaattgttggtggaggaaaacgagcgggaacgcgcactgcacgcggtgatgcgcgacaaatttgacgagttgaagcgcaaatttgacacgtgagggagcggggagggcaagggaaagggcaccacggcctgttttttgaaaactagcagaaattttcaaaaaatgtagaaattttttaaaaaaaagtcaggaaaaaattaaaaattttttttagtgatttgcaaatttttttttgaaaaaacgtacttattcattaaaaattctgcgggaaatgcactgcattagcctttaaaaaatttcaaaaaattttatttctaaaaagttatggaaaaaactgtttctaaaactaacaataaacgaactttttggtttaagatttctatttgaatgagtatatacagaaaaggacggatagtatttttaatccgacgaatatttgttattttttgtttaaaaaaataccgaataaaaattttaatttaaaaataataattataaggctcttatccatccaaaaataccaaaacgtatactcaaaattttcagcattgccaaaacggtgttggacaaacagtccgagttggagcaaatgaccaaaatgaacacggagttgagccaacagcttcatgaacaagcggaagcattggaaaggcaccgtaccgagttggaaacggcaacaaaaatggtgatgtcaattaaaaaaaaataaaattaaacaaatttgtttaaaaattgtcacaggtcgccgaacgggacaccgaacttaaaggaagcgaatgcgagttggccaagtgcagggaggagaacaccaagttggacgagctcaggcaacaaatggtccatttgctggaagaatttggtgccaatttgggcaaataaatcatttttatgtgtggcggagaacagatgcaattacaatacaatgtataaaattattttttatttttatacaa

SEQ ID NO: 80802 - DNA, 385 bp, Heterodera glycines
cggagtaggacaaaacgtcgtcagccgaaacgtcgtcgaacgaatttttcgaccataacttttttctttctcaaccaaattaaacattcttggtattattcgaaagcattcgaaaaatgctattagcctgcaaattttcaaaaatttttatttatgcacaaaaaaatcagagcaaaaaaagttcgaattactgggtttttgagttcattctggccataacttttttgaaacttaacgaaaatttttgagattttgcaaattaataataaacacatagagctatcgaacaacaccaacaattcttaatttgattgacattgaacaaagttatggttcaaaaagtcttccgacgacgtttcggccgacgacgttttggggtgcaccg

SEQ ID NO: 80803 - DNA, 1203 bp, Heterodera glycines
atggtggcggtggtggccatggtggcggtggtggccgtgctggtggtggtggccgtgctggtggaggtggttaccgttcaggtcgtacgtacggtacttatggcgcaggcgcacatggttctagcaaaaactgcaaatcaaactcgaattgcaccgaaaaagatgtaaatcttttttaaattttatctttgattgattattttaaaatgttattttatgctggtttctgatgattcgggactttttacttgggttgaaactttccaaaaatctgtacaaaaatgcaaaaaattgaaaatgtaccctaataatgctactcatggagtggactttattattcaacattaatattttcaaaacccaacaataatgagaattaattgaaaactctatttaagcctgactgttgttcctgattgattggctgctcgagtttgattgttttttcgatgaatttggaagaatgggccagacgtggataaagaaagagattgctataaatttttggggtctatttaatcggtcgttttcctaaagtaacttcatcaacgtaaccttcctcacctttcctttttttaaaatttatttgtctgagtaaagcattactatgcaacttggtttttaattacaaattcaaagtactttaaattattttctggcttcattgtaaagcaaattttttgaaaaatttgaaaatttaaggggtgaaaattcttgataaattaaatgattaatgtggattattaaattgagggcaaattaagaaattgattaatattttgtaaaagcacgaattgcttttaaattaagtttttgttttatctcgttttgataaaacaaaattatgtcaacagaattaacgaatttgcaatcatagttattatgatagacttttagaacatttaagcaacaatagagattaaatatttttcatttttcattagctttcattttgattagagaaaatttgaaatttacaacaaatatttttactcgacttcaagcgttatttttgtgattctatttttaattttgtctctaattaatacgatttgaacaattgttctgcattttgaacattttaaattttaagatgggcccacattaaaacggacaatgagtgcgcttgaagttgcggctttgacacttggagcagtaccaagtgttgaagctggacgaccacttggaacaataatggtataa

SEQ ID NO: 80804 - DNA, 263 bp, Heterodera glycines
atgactattttggaaaaaatgctaatggacacgaggtaaatttagccggaaagggaaccgtttagtatcatttccatactctgctaattgtgaaccgatttttaaaaagcgccaaaatagctgcctttttcggaaattttagaaatatttaaataaatccatctatttttagcattgtcgtcgcgatgtttgtacttgccattgttgtgttgtcacttgtgcttggtgtcatgaaaattgttgcccaccagaaaactaattag

SEQ ID NO: 80805 - DNA, 1583 bp, Heterodera glycines
ccccactttttgttgtcccgcattcaatcgctggtcactccacggaattttcaatgcgaagtccgagggatgatggacacggagcatttgttggaacgatgcacagtgctccttaacgtaactgagacacttttggaagacattgtgatgaagtgagtgagtgggttgttcaattgtttgaattgcattcccttaagaatggttgaggaaaagccgctttatcacgggacagcaacggacaatccatcagcagttgaagtggacaaaacccctctcgagtacgtctcctttcggcaaattgctaccaaactgttcgtcccatgtgcggtcagcagcgtaggtgaaggtgtgccatgccgtttgcctgtcgctgatgcgatgcgtccctttgcatagcattcgccctccgtgaacacctccaaggcgttttggcggatgagcatcgtgggctggtggaggaccagcgttggctcgtccttcagtagaccatcccatcgccctccccattttccttggcttttaagctgttcaatcgagcatatttcccgtgcccgtgtctctttcgcgcggctcgccattcccacaaactttggcgtcggattgactaatgttcgcttcgttgtcctcgtggtcgcccccctccaaataaaagagactaaatctgccgcagaaatcgctcggactttcgcttctctgttggccgatccgctgctttaccatgaattggccaccacggccacagaacgccaatttgtggccaaaattcgcttaagggcttacgaacttacaaatgttgtagaaaatgttgaaaatgagaagcaaagggaaaaggtactcgattaactaatatgtaaaagaaaacttttcgaaagacagcacaaaattggtaccccgggaggggactaatcggcgatttccgtcgtcgccttcctttttataaatcggactttctcgatggcattgcggacactcgtgcctttcaaaagactattagctctgctgcttttctctattttattgttcttccgatggcaattgctttgggaatgctaaatgaggagcatactcatggcaaaatcagtgagtgatctctctctctctgatcattgtcaatttcgttcccaccaattaagcggtttcaaaggcaattttgggccaatggattggcggtttggtgtttgggctgttcggagggcagcttttcctcgtgctgctgacgagtccgcccatttccctctatatcacaggtgaatagcgaatgagtcgacttccctcaccgatttgaaagttgtcgaacgcatttcgcattcgttgggctgcgactttttccaactttacgccggcattggcacttggtgctgcttttatttggttctttttgcttttttcgaagtgtccaatgtgatgaaacacgccaaaaggttttacccgtcgcagagaagcgaacacaacgcattgttaaggtcgttggaagagatgttcagcatgttcatcgcctgcactttggccatcgaatcggcgaagaatgctttcgcgtcgctcggaagggcttttctgccgcactgcccgccaaatggacactc

SEQ ID NO: 80806 - DNA, 575 bp, Heterodera glycines
atgttctcatgtttgaagtattgcctctgctgcatcattgtgttccttcttctcgctctcctcgctgtgtctctcttacttttgtttggcagtgattgtcccaccaattcgcatcaactcacgactcaatttgaacaaccaaaagacgctttgctttatcaggcgagagggcattattaatttcacaatttcactctctttgttttcaaatttaatcatatcaaattaagtgactttaatttactttcaaaccaaaatttaaggaggaaacgcacattcgtaaagagaataatcagccaaagaatggcagcaaataccaccacgaacaattcacaaaagaagcatcccggggaaagaccgttcagccacaattcaagaaagacgaagtgttcaacaatgcaactgaacaacaacagaatgaggaggacgagcagtacagcaacacaactgtacaacaacggaacttgaacttggagtataataattctttgggggacggacaaattgataatttttcaatcattcattcctatgatatgtatgagttcgatttggtaatcgttgacgccgattga

SEQ ID NO: 80807 - DNA, 1287 bp, Heterodera glycines
tgcgtttctcgacttcgtactgatcccacaaatggtctttcgtccgccgaggcgtcccgtcggctgggcttcagcgggttcaacgagttcgagctgaacgagaaggtgtccctgttcggcaagtaccttgagcaggtgccacttttggcattccgttgtttttcctcgcccttttccaatttatctgtcgtcgttttacagttcaaaaatccgctcatttgtctgctgctcgcctctgccattgtttctgttctggtgaaacaattcgatgatgctttgtccattgctgtcgccgttctcattgttcccattttcttttccaatttgctccaattttcctttttcggtggtcaccgttggctttgttcaagaatatcggtcagaaaagactttggaaaagctcaaccgattggtgccaccgacggcgcattggtccgattctaaaaataaattttagcaattttcttttttaagcattcgcgatggtcgaagcgtcactttttatgcccgagaacttgtgcctggggacttggtacttttgaacgcgggagatcgagtcccggccgatgttcgtgtcatcgaggcactttttagactattttctaaatttaaaaaaaaaaaaaatttttttaagtccgtccaattacaattggacgagtcgtcgtttacgggtgaaaatgaggcgagacaaaaggtggccgcagctttgcccgaaaatgcggccaaattttcgacaaataatgggacagtaaatggaaacggaggcggcagcattgaacacatggacaacatcgcatttatgggcactttggtctgtgccggctggggaaaagtcagtcggtttggttggaagagagaatctaaatggcattttgacagggaattgtgattgggactgggccaaattcaaaatttggcgaagtatttatgatgatgcaatcggaagagtcgcccaagacgccgctgcagaacagttgaggagcaattgtgaacaatttgcactgtgattttcccgtttaggcatggaccaattgggaaaacagttgtcactgtactcattcggcgtcatcggactgattttccttctcggactgattcagggcaggtgaaaattggaatgacccaattccaaacaaattaaatggtatctatttatttaattaatttgatttttctttcgcagggacatgctcgaaatgttcacaatcggggtcaggttgtcatgctcttcccttttccctttaatgctcccttttaagtctcgcggttgctgccattcccgagggt

SEQ ID NO: 80808 - DNA, 1744 bp, Heterodera glycines
atgtatttccattttaaaccaattattccacaaaaatcccttgaaattaaatttgtcggtttgtcccattaaatcctttgtgtgtttcgttcttgtgccttagcatttaattgcctcatggcttaatgggatgtaaatgctcgcctcgaaattagcgacaacgaaattgtcgtcccgaataaattattcgttctttgggtggcctgttttgacgttattttcactgttcaacggactttcccctccattataagaacacaagtactgctaaagtttcgcacacaaacggctcttatcagctcattttgatcatcatcagcagataattttgattttgcacctccccccaagaggaattattattcgtttatatttgtgtagtttctgcaaaacaaaacattattattcatttccttttgaatgcttttaataatattttcagtcggtttctgtttattttttgaagaaatggcaaatacatttaaaatttatgaatttcagtcctttttcggtaggtaattgatgaaaaatgcaagcgcaaagaaacgacgaataagaagcgaacagcaaaattcattgggctttcataaaaccgtgcattttttacatttaatttcctctctttccatttgaatgataaaaaacgacattgaataaattcctgggatgtggagagaaaaaatgtgacaacggctggagagagaaaagattaattggtagcaaacgaatgaatgacaatcatttctgcttttacatattaattcattcctttaaattccaaatgagaaaaataacaaaaatatataatgaaaatggatattaaaagtggcataaattacagacaaaacgaaaagccgaaaagaaaagaacagaaaatggacgaaggaacaacggaaaataataataacagaaagagcggtgcaaagaaaaggaagcagaaacagaagcaacaaagcgttgttgctgaagtgactgaaccgcacaacaaacaatcggagacagaagaggcggaaaaggaaaaggtgaggagggaaggcggggttagccattctcggagggagcgaccgaacgaaccataaattaaaattgcgtctgattggcattatgtttgattttgatgtggtggcggtgcgttggcggccttcggcctttagcggtggctaaattttatcattcctttgattattgtattggtatgtatgtcgcaaaattaaacatttgtgcacattaattaagtaatacgggaatgtagtttaagcataattcttggcaccaaattctagaagatatatacatagataatataaaattccatttaaagatttaaacattaagtcgaaaaacggcgacagcgagaaagacggaaaaaaagtgaacgaagcgtcaaaaccgattccttgccaatcaatttcggtaattggagatacagtcaaatcgacaatattattcatcacctttatcctttattccaaaattttgttttatttttctttaattattaaattttgtttagcatcaaaaagatagtactgtcaacaacaccaaaatcaacaatcgttgctgtgcattttttgggttcaccggtgggactgggtttttgcgttcgctttttcggactggtcttggtgagggtgcacatttgttggttgggcagaactcgaaggcgcgcggtgcagcgggaagcaacggcacgacgatgatccccgcgatggacatccaagaggcatccctcgcgcggtgctga

SEQ ID NO: 80809 - DNA, 684 bp, Heterodera glycines
atggggatattgtacggatcacataagaaaagggaaagtttcagcccccagcctcatgggcatttgcccatcaccagacccccagccccatcagcccccaacccaatggcatttcccatcacgagtcccccagccccatgggatctgcccatcaccagaccaccagcaccatcatcccccaacccaatggcatttcccatcaccagtcccccaaccccatgggatttgcccatcaccagtcccccagccccatgggatctgcccatcaccagaccaccagcaccatcatcccccaacccaatgggcacttgcccatcaccagacccatagccccatcagcccccagccccatgggcacatgcccatcaccagacccctagccccatcagctcccagcccaatgggcacatgcccatcaccagacccctagcccccagcccaatgtgcacatgcccatcaccagacccccagccccatgggatctgcccatcaccagaccaccagcaccatcatcccccaacccaatgggcacttgcccatcaccagacccatagccccatcagcccccagccccatgggcacttacccatcaccaggcccctagccccatcagcccccagcaattggcacttacccatcaccagacacctagcaccatcggctcccaacctcatgggcatttta

SEQ ID NO: 80810 - DNA, 46 bp, Heterodera glycines
atgcccatgaggttgggagccgatggtgctaggggtctggtgatgg

SEQ ID NO: 80811 - DNA, 459 bp, Heterodera glycines
atgtcgttccaaaatacgccaaaagaagttcggcgtgcgagaaacacccgccactttttcaaggcaacccctgacaagggaaagtgtctcgaaaagattgagagccatgtcaacgagcgagccaagtttggtataagggagcacgtaactagtttttatttcaaatgcccaccaaatgaagatgcggaaaataattttagaataattatcgataaactaatacacgaggcaaaggaaaaagaacctgcacaaggatggaagacggaaagaatttcgctgaatttatattgtgctgctttgtctgatcctgttatgataccagtgagaccactacaccaagtaacttcggatgttgtgctaaacgaatttatgcatcgtcagcaatcatttggcgacgtaaaccttatggacgaaagaatttctgtgatcgtgaccacttttgcatatcctctcaagtga

SEQ ID NO: 80812 - DNA, 345 bp, Heterodera glycines
atgactcgagaatattccgatagcgagattttggaatatgtgtcagctggtccgaagcagtacgccctgaagctcagaaggaagaaagatggggagatttgggaaaagaccaaaattcggggattcacgttgaataggtccaacaagatgcggtatgaagaattcaaggagatggtgttgggctatcaggaaggagtgaaaaaagtgtttcgttatccggaaaagattgggccgacaagggatagcaggatactctcaagggatgtaaagaaagaatatgggcccgtgcagaggaaagggattgttgatgaaaactttaatgtgttgccttttggatattattga

SEQ ID NO: 80813 - DNA, 3214 bp, Heterodera glycines
  unsure (1)..(3214): unsure at all n locations
aattccggccaaaaatgggtgccccgtgcgctgctcgtcgacttggagccgcgcgtgctcagcgacatttgcaaccacgaggccaactcgtactcggaactgttcgacatggacaacttttaccagggaccgaccggctgaggggcgggcaacaattgggcacgcggttactacccgggcggacacattgtggacgacatcatggagctgatggaggcggaaagcgaacgggcggatcatttggagggctttgccatgtgccactccattcttggcggtgggtgaacagagttttgtgtccatgggaatgtttgacaaaaatgtttttaagcggagcaattattgttagttacatccccatatcgtttgcctcatgaaaatagtttaaaaaaacaaacaaattttctaagtttattgcaattggatttttttcctgcattagtgaaaaagaaaaaacctttatttgaaacttcaaaataggtattttgttgtgaaagaattgaaaaattaaaaagaaattttttttttgctaaagaaacctctaacaaataagaatttgacgaatttgactactaaaaaaacttcaattaatttttatattaatttttattagatttaaatttttaataatttttccaactcgtcgtccttcagtacgtcgtatgggcctcgccctggcgcacgccttgttcacatatgccctcttccccttcgtacccgctttgcccctcccccccgccctcaatttagccaagtttttcgttttcagcaattccgccgttttctccgccacccatcgctgcgaattgtccacttccgcggccaaccattccgcgcccgactcttttttggctgctcccaaattcaaatacgcagaaaagatttgtttggacgcctctctctcccgcggggacgacaaacggcgcgttttttccgctgcgattggtcatattttggtcgggtgagagaacaaaagttggtctaacagcagcagaggaacacccttaagacatgtgcaagaagtgttcaatgccgggtcattgtccgaatgtatcaaagcgtgtctaatggccgagtcgagctacgggttcagatgcaaatcactgatgttctacccgacggatgctgatcaggcaaacaaaagcatctcgaaagccgagaggggtcaaaaattggttgttaaccccggcgggcgattagattattttgtgcgcctcattttatttttagcatttaaaaaaacaaatttctgtcggatttgtcggaacacccacccaattttatatgcttttatttcagaattgtctgatgaattctgagagcagattcacccaatccgatgtttttgtacaggaagtgggcacaatctgatcaaaaatgatcattccgttgtcctttggcaggaccaaaatgtgcacatgctttacgtggacatggaacagccgcggcttcccccctcgccgcagcctttgcccgacgacgaaaggcgccgtttcaaggcaaaacatagcaaagaaaaagcgcccaaatttgacgccccttttccaaattaataaaatccgtgccaattaattgatctttgacactttcaggacattcccatcggcgcgagtgtatcagaaaaggacggagatttgcaaaaatggaccctttggtcgaagtgtcctctcagctcatccgttccaatgcttgccgaaatgcggcatcgctatttgaagtgccgcgaggcgaaggacgtgagaaagtgcccaaaagagtcaatgccatgccgaaaaagtgagtggacaaattggatggacagaaaaggagcacaaaagggaggaagagaaagaaggagcaccaaaataatctgacaaaattggcattttcaagttaaaatgtaacgaatgaattaatttatattgaaaataaatccgaggaatgccaaaattggcgaattgaaaatttaaagagcatttgcagtgccaaaaccgctgagaatacaaccgatttggacgttgacagcaaatgcgacggcggcctaacactccgacgaccgacggatgccggtcgattgccttgcggtcagagacgccctcgggcgaaaaaagccaaacgaacgaacaaatgctgacacatatatttattctctcttcgtttttgtttttattttttttagaaatttgcaaaaaaaaaaaatacacaaagaaaaaggaaagggtagcggcgagatcaaagggaaaagggaggggcaaagagagacaatggcaaagccaaagagcacaacaaaagtcggccgaccgatattctccgccgttttctttccgttttatgcttttccccccgtcctccaccaccgttgccgttgtccatcctccgttttgtgtccagtgatttgtcgtcgattgcgtcgtcccattgccggagactgaagaaattgaatcgcatcagctgattgtgaacgtccccagccgatgagcagtcattcgaagaaacggaactcttcccgcacataaacgttttgcgttgtcttcgccgagctaattaagagattgtcattaattagcaaagaaaaaaaaccgattagccaaccgatgtcgctgaagggcatggaacgtaggtgccctttgaactttttgaactgctccgctcaatgatcggagaagggcaggcgaccaaacaggcggaaacggcctgaaggaaaaccaatgaaaaattcgaattgtagtgcttgattagagctgaccactttcgccaccattatgtgctgcttttcgcgcaacaatttgacacgcaaacgattggcgaaaaactcagtttttccaaaatacgccaaggaatttgtggccgaattgagtacaacgccaaagtcggatagacggacgaggatggagaggataatgccgaacgattcgatgccgtagaaagactcgtaaatgtcgaagaaaatgggaagcgacctgaggagagggggatggatgatcagaaaatccagcccaatgcacctaaaaatcaggaatttgatcgcgataaatatggccaccgtccgtgacactttctctctgagttcttccaatgcgaccaccgaacggcgccgactttgtgactcgaaaagccttaaggtcaaccaatttcgaacagagtctgaccaatcactttcactcacatgcgacgagctttcagcgatctgtgcactttgtattccgtgacaattgtcatcaaagtgnatcgtcag

SEQ ID NO: 80814 - DNA, 631 bp, Heterodera glycines
  unsure (1)..(631): unsure at all n locations
ctgacgatncactttgatgacaattgtcacggaatacaaagtgcacagatcgctgaaagctcgtcgcatgtgagtgaaagtgattggtcagactctgttcgaaattggttgaccttaaggcttttcgagtcacaaagtcggcgccgttcggtggtcgcattggaagaactcagagagaaagtgtcacggacggtggccatatttatcgcgatcaaattcctgatttttaggtgcattgggctggattttctgatcatccatccccctctcctcaggtcgcttcccattttcttcgacatttacgagtctttctacggcatcgaatcgttcggcattatcctctccatcctcgtccgtctatccgactttggcgttgtactcaattcggccacaaattccttggcgtattttggaaaaactgagtttttcgccaatcgtttgcgtgtcaaattgttgcgcgaaaagcagcacataatggtggcgaaagtggtcagctctaatcaagcactacaattcgaatttttcattggttttccttcaggccgtttccgcctgtttggtcgcctgcccttctccgatcattgagcggagcagttcaaaaagttcaaagggcacctacgttccatgccct

SEQ ID NO: 80815 - DNA, 980 bp, Heterodera glycines
atggccgaacattcggaagacaaattggacgaaactgaacgcatttttgaaattgcaagagtaatgtggaaagcgatcaaaaagcatgacaaagtgcgaaaaagggatgtaataagtcaaaaaaaaatcgaaaaacatttacagaatgccgtgggcattgtgccgcggttgcgcttcatcggtttagtgctttggcatttggcggttcggcaaagtccgctaattgaccagcagcagcagcacaacggggcaccactgctggtgttcactgccaaaatgaggccgaacattgacccgcatgacccgacggaatggcaaacgatgctttggcattttgaccaaaatttggcgaacgcagcgatggatgcggaggatggccaaagagaggcgaatgaggggggaattgaggacggaaaaggggagggggaggaggaggaggagcaaaatgatggggaagaaatcaaactgctgagagaattgggggagaaagtgggccaaggccgggcacaatttggggaccgggaaaggcacgccgaactcggcaagaagttcagtctgttgaagaagtcgactagcaacgacggagcagcccatgggatggtcaacttttgtgttatctatcgaccatttctcgtgttcggctcgcaatcagtggacattcttttgttcatcagggtaattaattaattaattgagcaattagtttttgattgttggcactttttcactctccagggccttttggaaggtcatttcaatgcaaaaacaatggacgaatatttggagaatggcaagcaaattgagaccaattcgtacttgttgaccactcatttgtcacttcgaatgatgaccattcaattgctgacagtgggaaaacattttggatataaattttaatgtgaagtataagaaactgacgaaactcataattttgactgttaaatttaatatgagttatctccggattttttgctaataaa

SEQ ID NO: 80816 - DNA, 1930 bp, Heterodera glycines
atgaattcatcctttttattcgttataatgctcgtgctgcgtatttgcggcgaacaaaatgtcgcaaatcgacgctatataacggcggtacatgagggtgctcatgtactcgcactctggaggtcgcgctatggagacaaagtcgaaagcgtgagtattaataaaactttaatttatggatatatttaaaattagagatttttttttttggctctaaaaccgtcaaaataggtagaccttggtcttaaagacacaaagataggctctaattaatacaaaacaggcactaaaaccctgatttttaggagtataaaatgattaaaatttattcaaaaaggtaacaaaattaagccaaatcagtattgagacaaataatttttaaaaacgcaaattcttatcaagaaaataaataaataaattttgtgcatgaatttttgagaaaatttcatttttaatggtgtgtttttgaaaattttagggtctattcttatgggtatattttccagaaatttgtggggtcgattcttaggggtatatttttcttaataattttgggcaaaatgccaaaatagtcaaaattgattttatggctttttatgatctaaaaataaaattggcactataattcgcaaagtaacttatcaacccaccataaaaacttgtttttcatgccatttggagctcaggaaaaaataggctaatacctaaaaaatacatccctatttaatacaggtaacggttgaacgaacggcgacaacatttggtcgaacaatgttttgggctaagcgttggtacactcctgaccagctgttttcgcgtctgattgcgtcaattggtgagaactttcttttttgtaataattgccgcgattttttgcgaaaaaacccttttttttgctcaatgttttgaagaaatgagctaaaaaacgcaattctttttaaaaatctcgattcttatgtcactatccgtcactagaaatcacttttttggcgtttcgtcactaaaatagtaaaaattcactatttgcatttttcactatacgattttttgaaaaaattttcaaataaaaaagcaataaaacgaaaaatagacccctaagaatcaaccccaataatttaaaaaaactcttctaagaaatgaaaaaattttcttaaatttcattttcttgccaagactttgtaattaaaaaaaattttatttaatttttggctgaaaattgtgtcactgttcgtcaccatttcgcactttttgccaatatttggtatttttagtcactgttttagttaacttttcgatatttttcgtcatctaaaagtcgcggccctagtaataactaaaatggtgatgaaactaattttattttttcatacagcaggggaagaggctgagatcatgtttttcaatcaaggccctcctcctgagggccttaaaaccgaccaaaccgaaatggacgacgttgctctaacatgggtatgtgaataaaaatttctaaaacagttatagattataaatcagagttcccaagttttttttcaaaataaggcaaaatggctcaaaaactaagattcggaccccaatttttgcatttttatttacaaactaagaataagcacaaaacaaggaggtcgtgccaaaaaaggataaatcttctaaataaggcatttttaatttctaagatcgggcacgcacctccaaacaatgacaaatcttacaaataaggacacttgggaactctgatatagatacatcacttctatgagaactcacatgacgtggcaccatttgtggttcctgtgcgataccgaacaactgcccaagggcgattaatgatggcccaactgatagcaaaagcacgaagaacatttcgggaagcgtttggtacagaggaaagccgccaatgtttaagaatggtaaacttcaataattaaaa

SEQ ID NO: 80817 - DNA, 1198 bp, Heterodera glycines
atgactttcatttctataatagtattggcacttattaataaaataaattgcgctgccgaagttgcaatcattcaggcaacttcagaggattgcatccgaaaaacgaatgggtccatttgtcgaataaaaggtacagcggaaatgacaattcttccagctggtcagaaaatttctctggcactaaaaaatcaatacagccaaactattggcttattaaaaataaaattaaattcactcactctaaattgtgtgcaggaaacggtagcttggctacgagattacggtataaaagtaaaatcagcaagaagatgtcccactatgggtacatgtaagaaagggaaatgtgcaaatattagaacaagtaaaaatattgaagaattaaaagagtattgggattacccaggaaactcgtattgtatggagggagaaagagtttggggttcaaagtgtgccctaccatcattcgggattaatgagtgttttttttataaaataatagcaattccaataactccgacagtgtggaaacaagtaaggtgtttaaattgggattatgaaattaaagcggaaattgagctaaaaagtgaaaataaatcagtaaaaaaggaattaactctgtacccgggaattacagaagaatggaatgagttttcctttacgccccaaggagtaactccgcctatttctcctcttttaagtgattatttctttatttcacaaaaagacataatttatgccggaaaagaagtaaaaactaagttaatttgtaaaaatcaaataaatgcttcaaacttcgaatgtgatttacaaaaagatgtttgtcgtgaatgttggataaacagcaccaaagaggagcctttaatccaatgcgaatgtgaagactatttaattgaagatttggaacctaaactcccgtttactaatgataaattaaatttaagaagtgacggaagtaaaattttaagcgaaacgagttatacaccgatacaattattagtaagagtagaaaatttaaaaatagtggcggaaatagacggaaatatttgcaaagcaaaacaaattggccaattatctgggtgttatgagtgccaaacgggaggagtacttaattacacttgctggacaaattggggagaaagcattgccgagataagatgcccaggaggtttaatctttctagcaaagtgtaaaaaagaag

SEQ ID NO: 80818 - DNA, 1059 bp, Heterodera glycines
atggaaaatgggaagaacaattgcgatatttcagaaatggtaatgagcacgggcttaccaaatgggtttcagttggatggcctgaattgggctcaggttcaccaatgtattccccctccctccctgttttatcccaacccaaagataatgagaacagcgattgtacaaccgcaattattggcacaacagcctcaaccattggcacagcaaccgcaaccattgacacaacagccgcaaccattgacacaacagcctcaaccattgacacaacagcctcagcaattgccgcaacagcaaagtcaacaactgcctcaacagcctcagcaattgccgcaacagcaaagtcagcaactaccacaacaacctcatcaattgcaattgcagccgcaacaatcggttcagcagccgcaacagttggttcagcagccgcaacagttggttcagcagccgcaacaattgccacaacaagaagtaccgcagttgttgcaacgagtgttgtattcggtacaaccacccctaccatcgcaacaacgtcatcatcgacctctctttggaagagaaaaccgattcacatctcgtagaattggtccaaaccgttcacatccgtacactattcgactgccagcaacagcacaacaaccattccgtgaagcacaggaagttcagccgtctttgatcaattggccctgggacaccccccctaatctcaatgtgccattcgagattcgccgtgtcctactccgtcgcttagcccaagaaagggaacatgcatttggcctagccggagcagttcatcaatggaacccacccatggcaattcttttgttggccctcgaatcattctacagcagccttctcgccatggcggtaaatgaagatggtggatcggtgtcggcacaacactgatcagtcgcggcgggagtgtcatcgccaatcgattaaagcgatgaggaaagaaggaaaaggatgactaatcgaccaaagatcgaacaaaggacaaatcatatttaaggagtgattgttttacattcgggatcattcaaattttgctattgggaa

SEQ ID NO: 80819 - DNA, 826 bp, Heterodera glycines
atgggcaatgaacactcaaatcgctcaaagggtcatccgtcatcttcgtcctcaaaaaaggatagtccggcgactcgccttcaaaaagcgctgccgtccgcgctaaaattcggctcaaatgatctctcgtcgagtgccttacgacgccttttggaacagtcgaagaaaagtcgaagtttgcaactgaaaggggccggcatcaaaagagtgccgtcgggaattgtcgaggaggtaattaattcttcattttttacttaaaatggtcgataatttggggttcatgaaaaataaggtccaaattttcaaatttcaggtccattctttgctcagaattttggagctgtcgtcgaacaaattgcgcgaattgccttcgaccatcggcactttcagcatgctcaaacagttgtacatcgccaacaaccgtctgaccaatttgcccgacgaaattggctgtttgaagacattggaattgctcgatgtttctggtttgccttttttttgtttcccaattgagtaaatttctaacaataagaattacaaaactaatttatttaggtatttttattttttcccgacttaattttcctaaaattgaaggcaatcagctcactgaactgcccgacccattggccgcgtgcaattcgctgacccaaatgaacgcgtccaacaacaaattcagcacatttccctccgtcgtgacgcgactgctgcggttggaggtcatcgacttgtcggagaattcgatcactgaacttccggacgaagtgaatttgcataatttaattaacacgaaacttttcccatcaaaaatcactatttaaataaa

SEQ ID NO: 80820 - DNA, 645 bp, Heterodera glycines
gatttgcaaaagaccaaacaacaaatgatgatgaggggtgccaggtaatttcggatgaagaaagggctattgtaaataatagggtttttttcgttgacggaccaaaacaaatgtggtatcaatcgtaagctctcgattagacaaatcgatttaaagctgaaagaaattgaagcgactaaaccggtctaaagctcaaaaatgtaaggaaaattgggcatttctaattttaaaacggtcaaacccgaacaaatttgatatcactcgaaaaattttatgagttaggtttaaaaatcagtggatgaagtcgaatcgacggcatctaagcaccgagacaactgagtcctagtgaaaatagacatttaatggcattttccatgttttagtgctgtgagtcgttccgcccaatcgccacttttgccttccgcttcatcgagcagtttgtcctccctacaacaagcatcgactgatagtacgcagggaacattcgccaccagtgggcaacaacagcacggcactttagcgaataaatccaacacaatgctcgccatggaaatgatccaaaaatccagtataatcttttacccgaccaactccaattatggcaaccaacttctgcccgggtttccccgttttttggctgactga

SEQ ID NO: 80821 - DNA, 938 bp, Heterodera glycines
atgtttaccaactcgctttatgttggaggttcttccgaagcaatttttgctgagaatggcactgacaaaggtcaaaaacggcacggagccgggaaagaagccgaaagtaagccaaggaaaagtcaattcgaaatttaattggcagaaaattttcattccattttttttggttttaatcaaaataatattttattgtatttttgtgtgtctgatgaatttgtttttttgtcgaaatatgagcatcatttgaggcgaacaccggccgcgtcattctgttgacgaggattatttgaaggcggagaagcggcatagaaaaagtgcaaatggcacagcaaaaaacagcaatggcaccggcacttgctcaccaacttcccctttggcattagcagaggaagaagcattgccatcagcagcggagggtggcaccaccgccacgcggcggcgaatgccctccggggaggaggagtggggcgtaagccaaagcggaccccaaagaatggcacatgaatgatgaagacaaggcgattgtaatttggcacaattaacaaagctactggcgcagaccttgccactaattatctcctcctttaattttgctttttcgcagggaaatattgccgacaaatgccaaagattggtttctttaggatagggcctaatgtaatgaaaggaacctccgactcattcagttacttaaatgggcatttttcatttggccataaacccaaaaagtatgacgtgccgtcgccatccatggcttaataagtgttattactcattttgtttgcgtataaattggtagtgccctgctgaaatttgacacagcttttaatctcttctcgcgtggacatttaacacttttaattaatttcctacggctgcggctttccacaaaaatgtcgcccatttcgaactgcaacagttcactaatgtgtcaa

SEQ ID NO: 80822 - DNA, 437 bp, Heterodera glycines
atgccttaccaaatttcgatgactgagaaggaacgcatcggcgcatattttttggcgaaagataaggaagaatataaacaatgtgaagatgcgtaagatcaaagaaattttcgaagaggaaaatatttgtcgaagcattttgtttttttctaactttaaaaataaatttttacatttttaataagtagggacgtgaattttagtgaagaaaaatcccggaatagttaacttaaatagtgagtaaaaatgccaaaatagtgacaaaatagtgaaaaaaattcagaaatagtgacgaatagtgacataattttcagccaaaaattaagcaaaaataatttttattcactgattgcagttgcaaatgaatgagtagggctgggatttttaagggcaaaaaaacaaaataggtacataaaaaaataatttttaaaattaaa

SEQ ID NO: 80823 - DNA, 324 bp, Heterodera glycines
aattgttttgaagaaaggagctcaaaaaacgcatttccgcataaaaatttttcgattctgatgtcattatcggtcactagaaatcactattttgggattttgtcactaaaatagtgaaaattcactattttggagttttgtcactattttttcactatttcgacattttttggaaaattctttaacaaaaatgcaataaaaccaaaaaatacacccctaagaatctacaaaaaaaaatcaaaaagcactcctaagaaatgaaaaaaattttctcaaaaaggtattttcgtggcaagaattttaattttaaaaattattttttta

SEQ ID NO: 80824 - DNA, 270 bp, Heterodera glycines
atgaccaccactgttctgatcaccattcttttgatcaccgtcatcggcattcatttttgtttggccaaccattcccaaagtgaagactatgaacacttgcgccaatttttcaagcagctcaatgggcatgggccatcatcgaattcgtcatcggcaaactcggatgcttatgtcaataattccgtggtgccaaatgtcatcctctggtgcattttgctattcgccctggttgcattggtgatcattgtgaggctttttgatcagatttaa

SEQ ID NO: 80825 - DNA, 643 bp, Heterodera glycines
atgaaaggtttaatcgatgtttggcaaggaattacaatatttcagaaattaaattttgattgaaatgcgggaagaaagagtttataaaattttgttaaaaaagaatgaaaatttttagtaaattccatcttaaaatttcattaaaaataattagtctaaaagaaattacctattttattaattattttttgtcaatgattttaggaaaaaaatcttcaataaatttgaaaatatataagatgttaatttattaattttttttacctaatttagttttgaatttgctaatttcttttattaattcattatagataacaaatcaattacagcgaaattttgggtatggctgattgatcaatttcagattgacaaaaagagaagcaatggcgaaagcgaaaatgcatttgatgtggtcattaattgagagaagctcgacttttgaccgctttctcggaaaaaccgattaaaaaacgcgataaatggacttaactaattaaactaattaatgatattgatactgaaaaatcacattttccgaacattacacataattatttctttccttttcattgcttttcttcactatatccatccatatctgtaaatttgttttgattatttatttatttttttaaataataaa

SEQ ID NO: 80826 - DNA, 707 bp, Heterodera glycines
atgaacggcgatttgattggttatctgaacgagatggagtcaatggaaagtccgcaagtgcgaaagtcaaaatcgagcccaacgattgcggaagttaatggaggaaaagcagtggaaaaaacgcagcaaactcaacaagggaaaggtgcacttaataagcttaatcatggccatgggaggcaaaggaattcgaactcggaaaaggggccgagtccatccgggcaaaattaaaacaaaatgaaaggtttaatttaacagagaaagtgatgagaatggtgaacggacacgaagggagaagcgcatccgaagaagcaaaaggaaacaatgggacggtggtggtaaacggaaggagtaaagatgagagaaacggcggaaggacagtgacaacgataggagagacagtgagagaaaagagagagagagaggggggggagtagggggaggggaagcgagacgaaggcaaagaaaggcataaatttcaccctgacattatgtgcaagattaggcactataaaaagtcaccagcagtgccgcaaaagttactgttacaaatcagttttcgggaaaaacggcatttttttcaaatttcaattaaacctataatttttctcaaaaaataagattttttttctcgaacttgaaaaaattagcaaaaaaattaaaagaaaaaattttgtgtacaagttccctagtgcacgcctggggaa

SEQ ID NO: 80827 - DNA, 842 bp, Heterodera glycines
atggttagtgatgccaccgacggagaacagcagcaacagaaaaggaaaaagaaaaggaaacgcgggaggtcgtttttcgcttcgattgttcacagaaagaacaaatgaaacgattaattaggcatttaagtggtgatctcgaaagtgaacagatttattgaaaatgaaaaagataaattttagaaaatgacgcaagaaaacaataagtgaaagggggtaattgagtgttaattgggcaataagtgaattcttttgggcaagtgcgcttttggcttacaaatttgttagttttttgtttttttatcaattatctaatttttttttagtccgtccgttcatttgcttttctcagttgctcttaataagcaaccctaaatgtttttcatttctcaatcgtcgcacaaaagttgcgcttaattgcgggcaaaagtttgccccgacattcgccaaaaccaatgcgaatttcgcccgtcggactttcacattttcctgaagttcaaaatcagttgcttaccaccctttgtatttcaattgcaacacccgaaatgatcacttcgtcgccatccttcagaaatttacgcgtctccccactttcgcccaatttgaccgcatttgttcccttccaggagagttccaacagacagccaaaagagtcgggagtctcgaaacaatgaaatgccaaacaaacaacgcaaaaatgctaccggtccactcaaagtgccagagcccataaggtcgccgacccgaacgttgcaaccattggacgtgtgatgagccaattgttgtttcaaagtccaatagagatgctaaacaaaaataatgaggaaaagcgtgggcaaaca

SEQ ID NO: 80828 - DNA, 1234 bp, Heterodera glycines
aggcgattacactgacttttattcatctatttatcatgccacgaatgttggcacaatgtttcgtggcaaagacaacgcacttatggagaattggtgctgatatttgctcattttgccacatttaaatcacactctttcatatatatgcgattaggaaatggctgcccgttgcttaccatggcagggcgtcaagcattgttgtctccggcacggcagtcaatcgcccgtggggccaagtcaaggcggaagatggctcgttttcgcatccatcccatgcccttatcctttggtattattttcagatacccagccgaactttgtgacaagtcggttaatggactttgagttggaaatggcatttttcgtgggagggcccgaaaacgctttgggcacgccaattccaattgagaagacggaggaacacatcttcggaatggttctgatgaatgattggagtggtgggcaaaagagcaaacgacaaaatgggcgaaagacatttcagcaagggacatccaaaaatgggagtatgttccgctgggcccattcctcggcaaaagtttcgccaccaccatttccccgtgggtcgtcacaatggaagcactccgtccgttcgtcgtcgacaatccttcccaaaatccatctccgtttgcccatctgaatcattccgatccgtacagcttcaacatcgatttgaccgttgaaattaaacgtttgtcgtccatttccctccattttcaattggacatttagcggagggaagcgatcgctcagttccgatttgtcgaaccaattttcgagttttattgtttgcccacgcttttcctcattatttttgtttagcatctctattggactttgaaacaacaattggctcatcacacgtccaatggttgcaacgttcgggtcggcgaccttatgggctctggcactttgagtggaccggtagcatttttgcgttgtttgtttggcatttcattgtttcgagactcccgactcttttggctgtctgttggaactctcctggaagggaacaaatgcggtcaaattgggcgaaagtggggagacgcgtaaatttctgaaggatggcgacgaagtgatcatttcgggtgttgcaattgaaatacaaagggtggtaagcaactgattttgaacttcaggaaaatgtgaaagtccgacgggcgaaattcgcattggttttggcgaatgtcggggcaaacttttgcccgcaattaag

SEQ ID NO: 80829 - DNA, 232 bp, Heterodera glycines
atgaatgcatgtctattttgtcttatcccaacagtggccaagctggtcgaggaacggggcggtttggccgtgtccagcgaatgggtcattcaggttggtctttccattttttttaagccatggttttcccggaaagacgtaaagccatcccattttaaaggccatcgtcactggttcgctgcccgacctgggcgagcccggaggcgagaagttccgctacgattttgtttag

SEQ ID NO: 80830 - DNA, 683 bp, Heterodera glycines
ccgctccccagcccgacaccgatgccgaaaagccacaaccatctgaagaagggccgtcgacatcagaagcaacggcgcaggacaacgacggacaaccatcatcaactccaacaccggtgacaccgctggaaatggacgtgccatcggtggagatgatgggaatcggtgtgtcattcccttcaacgcctgcctacgaagaccaacaaattcaaccaatgccgtcaacatccacggcacgctgtgacgtggtggcgacaccatcgacttcaaagggcgacggtggctttggtctcgacgatggtgagtgagaaatttcaccaaaaatttagttttttaagtcgtttcattttcattacattgaaattttaattttaggttggccgctactctcatctcggcacacaagagaagatcgttgagaaactggtgaagcacacgacgatgttgaatgcactgcacgaccgtggcgttgagaacaacaaagaaaatgacatacccagatttttgaccaaattttcacctcacttttatttattttcacattaatatttcgaaaaatttgagtggtttgaaatgagttaaattgtttagctttcacttagaaaaattctccattttaaaatctttttttgtataccaaatttattcagtttagttgggtatgaagaaagttatcctatata

SEQ ID NO: 80831 - DNA, 3021 bp, Heterodera glycines
aatcacccggactcagtttttatgattccatcaccgtaaatcattctcctgcatttcaatcactgggactcaaccctccagcatttcaatcactgggactcaaccctccagcatttcaatcactgggactcaaccctccagcatttcaatcactgggactcaaccctccagcattccagtcactgggactcaacacaccagcatttcaatcaccgggactcaattctccaggacttcaatcactgggactcaacacaccagcatttcaatcaccgggactcaattctccaggacttcaatcactgggactcagtttttatgcatttcaatcacagggactcaagacaccagcatttcaatcaccgggactcaattctccaggacttcaatcactgggactctattctcctgcgtttcaatcacccggattcagtttttatgcattccaatcaccgggactcattctcctgcatttcaatcactggtcaattctcttgcattccaatcactgggacctaacctcacctgatccttcggcatcgcaatcatcgagactcaattctgcgacattccaataactgggactcaactaaccagcattccaatcactgggactcaattctccatcattcctattcccgggactcaatcccaccagcattccaatcactgggactcaattctccatcattccaattcccgggactcaatcccaccagcattccagtcactgggactctgttctcctgcattccaatcaccgggactcagctctccgacattccagtcactgggactcaattctccagcattccaatcaccgggactcaactcaccatcattccaatcgctgggaccgaacctcacctgattcttcggtatcgcaatcatcgagactcaattctgctgcattccaatcactgggactcaattctcttgcatttcaatcacagggactcaaatctccaggacttcaatcactgggactctattctcctgcgtttcaatcacccggactcagtttttatgcattccaatcgccgtgactcattctcctgcatttcaatcactgggactcaattctcttgcattccaatcactgggacctaacctcacctggtccttcggcatcgcaatcatcgagactcaattctgcgatattccaatcaccgggactcaattctgcgacattccaataactgggactcaactaaccagcattccaatcactgggactcaattctccatcattcctattcccgggactcaatcccaccagcattccaatcactgggactcaatccttcacttttcacggattcttcggcatcgtaataactgaggactcagttctccgccattccaatcaccgaggactcaatccttcactattccaaacaatgaactcaattttacggattcatcggcatgtcaatcacgggacttaattcagacctgttcagcataattttggaattttaaaaacgtatttctattatgaaatacaatttgcgtagaaaatccttttcattataaatacttgttctcttacattttaataatttcttttacataaacatctacgtacaaaaaaagaacaaataaactgaccttatatcgttaaaagaaacttatttttgtcaaaacaaacaataagtgcgataaatccatccaattaaaaccgtatccattaaaagaggcataattgacatccgctttaattacaaaaacaaaaaaactccatttcaaggtcaaacaatttctcgaaccaaaactttttcaatacaatatcaaaactaagtgtaagatcatttccattgactttgcatatacaaaaacaattctttttctttacaaaagtgttaagagcattcatttccaaacgctttttgataataacaaaaacaaaaactttttctcttaagaaatgcaatagaaagcattcattgcgatttcattatcattaataaacatacaaaaactattttgtcattaaaaacgaaaaaaagagaaatttattttaactgtgctttttgcaaaaactgacaaaacaaaaatgaaaaaaagcaaaaatcaaacatttcattttcaaatacatttttaacgcaaaaactaaacaaatcgccacacaaattcaaaaacggacacatacacacactcaactttattatataggataactttcttcatacccaactaaactgaataaatttggtatacaaaaaaagattttaaaatggagaatttttctaagtgaaagctaaacaatttaactcatttcaaaccactcaaatttttcgaaatattaatgtgaaaataaataaaagtgaggtgaaaatttggtcaaaaatctgggtatgtcattttctttgttgttctcaacgccacggtcgtgcagtgcattcaacatcgtcgtgtgcttcaccagtttctcaacgatcttctcttgtgtgccgagatgagagtagcggccaacctaaaattaaaatttcaatgtaatgaaaatgaaacgacttaaaaaactaaatttttggtgaaatttctcactcaccatcgtcgagaccaaagccaccgtcgccctttgaagtcgatggtgtcgccaccacgtcacagcgtgccgtggatgttgacggcattggttgaatttgttggtcttcgtaggcaggcgttgaagggaatgacacaccgattcccatcatctccaccgatggcacgtccatttccagcggtgtcaccggtgttggagttgatgatggttgtccgtcgttgtcctgcgccgttgcttctgatgtcgacggcccttcttcagatggttgtggcttttcggcatcggtgtcgggctggggagcggctaaaaattgtaaaattagagattttacgaaaaaccaatggaaaaactcacctttcttggcccatcggacgtgtgtcgccttgtctattttggttcgtcgctcctctcgcttgttctcccttttttgccttgatcttatttgaattgagcttgtgtggcgaatttctttt

SEQ ID NO: 80832 - DNA, 723 bp, Heterodera glycines
atgtgcagcacagggcagtataccaactccgagtgtcacaacacccaatccactgtaccagattccaagcttaacccccaggtaaatggccctattagggttctcgccaggtgctccagtaggctcagtatattggggtcaggagagtgagtactcgtctacttttgccttgaacagtttgataaacgtgccatccatctgccataacagaatagtgacaacgacaagcaagtctcgcttaccaacccatataaaggaatttctccgagcccacccgccctggacacaccagcgcacagacccaatcgaacgggtctgtcgttggagccaacctcagagtttaaagtccagaggcttggactcctgacacctcttagacctgcaatcattgcatggctaatcgctcgtatcattccattcacgtgcggcgaacccttagcgccaaccactactccaatattcattcatgtgtaatttcaaagcaaatgtcgctcaacagattccaaaaacagttatccccagcgccacagaccccctcgaacggtctggcgtccacaagcggcagacgggcattttgtgctgccacgctagtttaacattaacaccagaaatacataatccaaactcgcacgcaatttccatttgtacaaaatagctctgatcaagagtctagctaattttcagaactcggatttatagtgaaaaaaagcaaacgtcaataaa

SEQ ID NO: 80833 - DNA, 832 bp, Heterodera glycines
atgttccaggtcagagtcctgtaaaattttagaatcagaatcaggaataaaaaaacatttaccggttaaattcactaatcctgatccggaatttagcatgtgtttttgcttaccttctgtaccaacctcacgatcagatcacatgcattacatttggtcttcataataaccaagaaagcatacagcatttgtcgtgatagaacattttgaactcttaaaagcgaacataagaggaataaattcagtaagaaattcaatttatttttatattattactttttttaaaacgctaaacaagtgcgagattcctctagcttggtttaaagcttctatggtggagttccatatcaatgtggacctaaaaatgaaattttaggcttggaacgaaacgtgggtaggcagtgcgcttggcttcctcaaaccagaaatacatggaataacagacgatttaaaaacagtgcggtatcctggtgatgagaagtttcctacgtatctggtggacttaaaaaagagctaagaacagatagaaacaaaatatttttaattagtattagtgaaggattcttatgttctctcttttttttgctaatatttatcttatgaaaagctcaaaagctttttacttattcaaatcaatgcgacgttttaaaatataaaaacaaatttttgactttggctataagactgggttttggtagttttaacacttatgtaggagattttaaaaaaaaatatattttttgacaaaaaaacttatggaaaaaattttcagcaaacagactttaatttcaaaaaattttctgtcgcttcctacggtgtttttgaaattaaa

SEQ ID NO: 80834 - DNA, 1202 bp, Heterodera glycines
atgatcagtcaacctttgttgttgctggttggggccgtacttcaccatattgttcgaacgacagtaagccaggcccaagcaaacaattgatgtacggtcaaatgaaaatcagtgcatcagagaattgtcaaagtgcatcaatcaaatgtaattaatttcaaattgaaaaaacaaaaaattaaaattgaaatccttgatttagcaaaaagactttcaattgctgatgatgatgataattcttctaatgataatgagcatgaccaaatcatttgtgttcagcctgggccgagcataatcgaaactgtaataaatttttaaaaaattaaaataatttttacttttagggtgacagtgggagtggattaatgaaaaacaacaacaatatttgggttcaagtgggcgtctcaagccaaacgacttgttatcctacagatcctacacgaacagaaggcctcacaggtgataattatagtattattttttaaaaattaattatattttttgcaattaaaattgccaacattttcaaaccttcttttatttttttagaacaaggtccatttcaagaggaattaaaaatcaatttttcaaaacattctatgccgaattatgtgttgtttttttgcatttaaggacgtattcacgctttagaacttttttattcccccaaaaatcataataaaaaattttatttaattattttggtacttttggggattcctttgcatatttcgtatgctcgttcatgatttatgaaaatttgagattttttttttgtcaaaatttatgaaacatgcaaaaaggaattgatagtccaatcgccagggaaattttaatttttgttggaataagttaagcaaaatttttcaaggattctctactaaatatagctaatggctcaaagctgattaaaactttataattattaggggtaaaattttttcgtttttgaggaaaattaaagttttaacgaaaattgagaaaatggacagattatgacattccactcactcagcatttatcttcatttttgtctataaaaaataaatttccaggtcaatttgctccaattgattgtgcttggattgagaaagcgacaaatggcgaagtgaagtgcaaaaataattaaaaacaattttttgaaaaatggaaatggaaatccaatgtttgtcccataaaatgcactttctcgaccaaataaa

SEQ ID NO: 80835 - DNA, 1565 bp, Heterodera glycines
atgttggcaaatctttctttgccaatggttttgcttgctttttattccatcaacagcaaacttttgattgtgtcatgccaacaaagttcgaacttttcggaatgcggcatttccgacttcgaacctcaattggccaatgtgtcaaaaatggcaatcggcacaaatcatgtataaaagagaaggaaagttccaaattaaaaaataattaaaattttaaaaaggtgtataaagggcaagaagttggtgatgacaaggcacttccatggatcgtccgactgatttttggaagtaatcatttaattaattgaaaattatttaaataaattaatttgataattaaaggtgttctaaacaggccaattataattaatcttttttttatttataacattttcatattttttaagagtcgtattgcagcggaacaattatcggtccccgacatattttgaccgcattgcattgtaccgagcacaatgttgcagaaagtgagtgaattattaagggcttaattttaattaaaatatgctttctttctttacattttttgtaccacttaaagtgtgcaaagtttctcttccaaaaattaaaaaacaaataactcattatggtcggttatttacttgcctttgttagtacaaattattgaaaaatttgtagactaaagaatgaataataaatatttcgtgaatatgtaatgatatcattaatatatataaaagtggttgctgttttttgctgatttttttagatcaaattgtcattgcgtatggttccgcaaatttgaaacaacagcaacaactcacgggcgttgcggccgttaaattgcacccaaagggcaccgacgcgcaacgcaatcaaattaatgatgctaaagcagataaaaacgtcattataaaagcgcagagagtgcaaccgaatccatatgacatggctataattgaagtaaaaattcaaataaatcgctaatagtgaggaaaagcggattaaaatgataaaaaaagacgaattttgaattcgttttttatgcttgctttattaattcgtcttctaatttaattccttaaagaaacaagacaatttcctggatgtttaggaattttaagttctgtaaaaaccagaaaattgtaattatgggaataaaaaaattcgtttgtcaattattattttggggtttttaagcattttttcaaattaatcatgagaaagcagataaacattataaagtgttttaggacacgattaattttaaggaaaatatttatatgaatttttctggtttctattcggcttaactcaggaaaatctaatgggaaaaacttttataatttaaaaaacattttttaattttttgatagttcagtccgcaaaagttggttttttagttttttaatagatttttcattttctttatgaattctttatatacacaatataaaatgtaatttaatacaataaaattttagttgaagaacccacttgcattcacagcaaatgctcgtcccatttggtttatggaaatatggttgccaaataaattttaaataacttttttaaaaaataaa

SEQ ID NO: 80836 - DNA, 646 bp, Heterodera glycines
atgatcagcccggaaattttacgtcaaaataatattgttgcactcgaacggtaagattttatggtaatctaatccaaaaaaatctgttttaggttcaaagacaaggagaaggcataataactttgccgggagcggcaccttttggattttcaaccgtaaattgtcaggttgtttgggatcttttacgtatttttagggtgttaacaccgccatcgcgtggaacgtagggccgctaagctgggcgccctacgggttagactccaagccaggatgctccgatttcttttaccctgtcatcgacaccctggagcttattaaaaaatatgtattgagacaaaaaggagtgaacggcgacgaagcaaaagcacaagagcaatggaatgaactgaccgtggaaagacacaaaacatattacttacaaattattttattatatgatggatattctagctaagtgcagataatttgcttatacgcaatataaaaaaaatttgagaatatttttccattttagtgcctgttttgagggttttttagtaacatcagcgagggagtggtaaaagtttcctaattttcttaacaaatgcctcattcaaaatcgatttttcgcagtgtcaaaaattttgtgagaattttaggaattaaa

SEQ ID NO: 80837 - DNA, 1948 bp, Heterodera glycines
  unsure (1)..(1948): unsure at all n locations
atgttgttcaagaagtcgtcaatttttgacgaaaggtcgtcagccgtgggtaccaaagtttttgatccctcgattgcttcgtaggtagtcattatttttttagcgaggatttattagcaataaatatttattattttaattttaatatgtgaaaaaacctatgaaaatttttttaaataccacaaaaatctacatttaccatttccaataaacaagttatatcctgcataaacgataaaaagcagtgtttaaacccgttctccataatcattctctcatcatctgcctacttaattacgctaaaggttaatgtctctttgtcgtcgacaacgaattagttgacagtttaagtgaaatcctcttttttacattttcccgatccatcatgtatctttctttacccgtttgtgaattaggctaatgatgatgttaatcgtttttagcttcatacaaagattagggaaatccgctttttaaacctccatatttcgggcttttttaatccatattttatgtttatgctttttcgaactttttttttggcctatgatttgattttgtaatgctttttcactagaaattattgggcataaaaaggtgtcattcgactctatcgtagagaggagccatatggttatattttgaaaagcaaaggtgcagtttacctaaatgtaacaaattctaaaagaaaaagtattttctctgataattttcgatgttttttaccaccgtttggatttaattaattaaataattattttggcctttcccatttttgcagttatttgcctcagtgtcacaagtattggcctgcctgcatccctttgattctttcatcttttcaccgattttgagatggtttgaacagtgcgttgttggacagttttttggccaaattcactctgaccttttaaaaatgttgataaatttcttagaaatgatccaattcagggtgaggtacttttcggttttgtgacccccccccctgagttttctaataaaaagccttaacaaaaaaattttcgaaaaagggggatatcatacgtactattaccaaaaaccatttttgttcgagttcgggtttttcgggttcggcgttcataatttcgccaaacaaaagcaatattcgtggtcagcgccacaaataacccaagaaaagactttttattaaaaatttcaggggggtcacaaaaccggaaagttgatggcagatggtcttttttgccatgttcactctgaacttgaatctattaaaaatgatacacattttgcgaattcttcaaattattttcttagatttaaatctctaaaccagaaatttctgctaaaaaagtttaaatatgttaaaaagctaaactgtaaaaataaatggtaaaaactgggcataaaatgtcaaaaattttgaaaaagctattttcccaaaatgattaaattgagctttaaattttcatgatttttgatcacagcaaaaatatgtgctagaaaaccccaaaaaatgttttttatgagttaaaattcactataattcgaaaattgggcgaagaaaatgtgttttatagcaaactttgagcaaccaataatagaaaaaagtagggcaaataatttcaacttttagatcctggtaacgggcgttgccgattcttaccaatggtaattactgattatttactatcacactgggatctgtctactgtgatcggtcatccctcacccattgttctgttccccacttaggcgctgcttcctccctcctgatcagcgcatttagtgatcacagtcaaacaaatagcattcatcgcaccgtttggtcggcacaaggcatttccagggcaacaattttgtaggtccggcatttaattcctctgtgtgcacttaattttgngaatttgaacatcggaaatgagatgcatttcatcatgttgagtgctagtgcttattacaccataaa

SEQ ID NO: 80838 - DNA, 471 bp, Heterodera glycines
atggcacaacagtttgataagaagcatggagcaaaaagggtagagtttaacatcggcgacaaggtgcaatttgtgaattaccgtgatggaaaaacattatggttatttggggaagttgtcaccaaaaaagggttaatttttggcattcgttccccacaaattgcaaacagaattgtcactcgccatgcaaacgccatgcgactcacacaagcattgggcactgatcaaacatggccaaattttgatgaagagcccaagaagaacaaatcacccgttcgagcaccacaaattcagcgaaatgtcacaccaacaccaccagccgaaagaacccatgatcaatttgaacagaacgaagaacaagaacagaaccaacagcaaacaccagtgcttcggcgatcagaaagagttccaaaacgtgtccgtttcctgagtccaagcatgacgggacaacggcacaatattcgccagtga

SEQ ID NO: 80839 - DNA, 142 bp, Heterodera glycines
tcatttagatttctcggttctcgattcccgagtcgagaaatttctcgggttttttgggtctcggttctcgtatcgtttcccggggtcatttctcggtctcgtttctcggttcccagtaaaaatcacttctcgcacagcccta

SEQ ID NO: 80840 - DNA, 179 bp, Heterodera glycines
atggatgatgaagaaatgggaacgaacccaaatgatcaaatgagcgaatattacaatgaaaataataccaaaagtgatcaaaataagaaagcagagccaaatgaccaacaaaagagagaaataattcaaaaatttgaagcaattaaagaaaagttgaagcaaaaaggaaaataccaatg

SEQ ID NO: 80841 - DNA, 1001 bp, Heterodera glycines
atgcgcggaaagcgaacccatcgaatgtatttgccattcttgatcgtttttgtatgttttatgttttcaaagaacaattcttatttttataatttatacggctaataatttgtataattatttaattaattttttaaaataatatataattcatttttaaaaatatttaaattgaataaaatggtttatttagggaatcggccttgttttcatgatattttatggaggagctgatatatttgtgaaaatgaatgaaaatggttaaaaaattattaaaaaaaaatattgttaaaaatttcccgcacaaaattcagtaccgaacaactcaaccaacgcatcagcagttgaacataatcgcaccataaaaaaagctgacaccgaactgagcaaaaccacacttcacacaattagtgaaaattttctatttgttttaatttgttttcagattaaattaaatgttatagtaaagtttttatcattttggcattttttcgaagaaaaatagtcattgaattctttgaaattttttcttataaaaaaaatttattgagattttgaaattttttatttaaggctggctactcaatgacacttagtagctttaattaattcattatggcaaaaatttttgtcaaaaattatcaatatggcggaatttttattaaatggccaatattatacaatcaaagatttttttttcttattttatattttatttatatttttcaatttaaataaatttgaaatttttgtttaataattgttttagaaattggttcctatttcttttcttggtttctcacattggctctgaatgtttggctttattcaattgttcttcgtgcctacttttttatgaagcgccaaaatcaaaatatgaatggcgcagaacgaaaccaaaaatttgaaaacattgcactttgattactcaaaatgtgattcattgacaaatttaattgatattaattttctaattaaaacatttgaatgttgacatttaa

SEQ ID NO: 80842 - DNA, 1423 bp, Heterodera glycines
atgattcgcgactaccaatcccagctgatctaccggcctttgtcactggaggacgaagtaatggacaatcgtatttgcgtctgtgtgcgaaaacgaccgttaggtaaaagggaattggcgagcagagaagtggaagtgatcaccgtgccgaaccgagaccatgtcattgtgcatcaggtgggacaccataccaagatgtccatgtgtttttttaatatgtcacataaatttagcctcaagtgaaggtggacttgaccaagtatttggtcaaccacaaattccgctttgactacgtcttcaacgaagcggcgacaaatgaaatggtttacaggtctgtttagctcgacaaaataatcagattatcgaaatgggtgttttagattcagtgcccagccgcttgtccgaacaatttttcaacgaggattcgccacctgttttgcctatggccagaccggttctgggaagacgtacacaatgggagggatcatcgaaggacgacgccaggcaataaaaaaacatttatttggcaaacaattatcattaatttcaggattgctcaaacggaatttacgccatgacagcacatgatgtgtttgcgatgcttcattctcctgagtatgccaatcagaaactgaccctctcgtgcagtttttttgaaatttatggttctaaggtgaaaagggttaaaaacatatttgaaaaatacattttaaggtgtttgatctcttgaataaaaaatcggtacttcgcattttggaggacggaaagcatttggtacaggtggtcgggctgagggagacaaaagtgcacagtgttgacgaagttcgtcataatttctgattaataaatgtactatgaattgaattgtccgtttttaggttttgaaactgatcaagcttgggtcggaccagaggacggcaggtcaaacatcggcaaattccaattcatctcggtcacacgccgtcttccaaataattttaaggaaatggtaagtctattatttttagtggcgttttctttaacatttttttgcagggaaaaggagcgtgacaacctttacggaaagatctctctaatcgatttggctggcaatgaacgaggcgcggacaccatcagttcggaccgacagacgcggctggagggagcggagatcaacaagtcactgctggcgctgaaggagtgcattcgtgcgatgggccaggacgaagggcagcacattcccttccggggctcaaaactgacgctgatccttcgcgattcattcattggccaaaatgccaagacatgcatggtgagaagaaatgcacaaaagttgggcattggtctttcattcatatacattcttcaacagattgcgatggtcagtccgggcattagcagtgtggagaacagcatgaacacgttgcgctacgctgataggtaa

SEQ ID NO: 80843 - DNA, 358 bp, Heterodera glycines
agcttggacttcgctcgttgctgcgttttcacaacaaacgttacactgcgccaaagtcggaggagaaaacgcagcggagtctcctcgtggtgctgctggacgccgacttcgcgaagcccatagcactgcgtcatgtgttcgctttgcttgcactcgggtccttttactcaccctaccacattcttaagtggtaattactctaattgcagtcccaactcgccctccttcttccttctccccggtctctctacgtctctctccgtccctttgaatttgccacgcatttccaccgtttctttcacttccgacgggcctccagaattagtctgtctgacagcgaagatacgaaaactgttaa

SEQ ID NO: 80844 - DNA, 1422 bp, Heterodera glycines
atgtggactgtacttgaaaagtacttccgatcactgagagaccgagattgtcccaaatttcttcgtcaaatttttgatgatgaattgacgccacgatcagaagaatggaaagtggttgtgtgtgttatgtgttttgccttcgatcagttcaatcaattgaatgttattagccaggtagtactaagtacttagaaaattactaggttaatttttataaattcagaaaccgacacttccgtttcccattttggccaaacaaattaaaacattaaaggcgaagctggaactttcattgaatgaggaattttatggggaagagaccagtgaacttttgaaacaattggaaaatgatggcgcgatttatcaaaaaaaacaaattaaaagccgcctttaaggtgttttttcattaaatatttgtttagctttgatttttcagcaattttacgaggacgcatatgcatatttgtgcaaatggtcacggcaattttctgagatggatgaagtgattggagattgggtcatttttgagtctgagccaacatctgaaaaagttcggaaggcgtataggcatttttgtggggcgtcaactgctgatgaaatgaatgatttgtttgctgagatcgctgagttgaaacagacactgaaggagctcgagggcgagcggttcaacaggaaaaacgtggatgaaaaatggccggctattttcaaaaatcctaattttgtcctgctcaaatcactagtctctgcaattctatcaattttcccttccaatgccttttgtgaatctgtcttttctgttctcaagaacatcaaaacggacgagaggaatagtattggcatacctttgttgaattctcttatttcaatcaaattcaattcaaaaatttcgtgcctaaatgttcacaattattttctttcattgccaaacttgctcaaacaggtgaaaagtggtgataaatatgttgtttaaatgtttttacgttgttatacattgaattattggctaaaaaaatatgccgggtttttgaaaatttttgccgggtttttcaactcgcgcgcccggtttttgggttttggcgatcgcacccctggcgcccaaacgagctggcgcccaaacgagcgcgcccaaacgtgagcgcccaaacgcagtggacccgcgacttttagtgaccgaaaatcccaaaataattaactaaaatagtgagtaaaaaggccaaaataatgacataattttcagccaaaaattgagaaaaaataatttttattcactgattgcagttacaaatgaggtaaatttcctttctaataatttcttggcaaatattgacattttaaatcaaaaattttcaccattaccaattcggagactgcaaagaaattcaaatgattcacaaagacaccgatagatcgcattgagccaaa

SEQ ID NO: 80845 - DNA, 1113 bp, Heterodera glycines
atgggaaaaaggcatcagtgtccctactcaagtttatttaccagacatgaatttaaaaccgccgggggcttgggaaataaaattaacgaggcattcacacatcattacaaaatcaaaaaacaacgtggaaagagagaagccaaggctgaagataccaaagattcaaaaattgatgtcgcaaagagggccgcagaacgcgccgggagagatgtagaaagacatctcaatcatatcaacaatgtctcgagttccatccaaaccaaactaagcacactaagagaagtaaatcctcaaattttagaagagcctgatataaaagtgtggtttgacaaaatggtagagaaggggaccgaaattcaaacataccgaaatgaacttaaatcttttcaagaagaagtagataaagccaaaaacacaacattagagcatgtggaaaagaatgacttgaaagaagcaaagaaatcagccgacgtcgcaaagggaatagccaaacaggcaaaaagcaaatattcatcaactctcgaggaatataatgataaatcggaaaagggttatatcggaatagtgaataggcttaatgaggctttgggtgagcatattaaacgtaaagatattgaaaatagacaagtatcggaagctgagaaaggaccacaaaaaagagagagactagccaatgaggatgttcaatttcaatatgacagcattgatcaaaaatttattgtctatctttctgctgctgtctcccacatagatttgtcaaaacacctcgcctatgtgcttggttttaagaacacaaggctatttcacgcggaagaggcgaattatatgccagatttgacgggaggcgtaaggcagctatacatttatgcaccaaatttaatagaaaacacaattatcgggaaccaaatggctccactcttaagaatagttaacgtcgtcaatgacccagggtcgattagtgaagttatatatagcaccgagtactttcatcgtctacagtcgaaacgaatttcagaaattacaattgaaattcacacaccgtttggcgaattcgttaaatttcactggggaagttgtattctcacattacattttaagaaaagtatattttaa

SEQ ID NO: 80846 - DNA, 262 bp, Heterodera glycines
atgaaagatttggaaaagttagtaagtttcttctatttttcagataaaaataaacaattttaaatttttagctattcttagtcgctaacaaaacgtcagtaactaatccataagcaaatttattttttaaaacgcccatttatttaaaatcatgtgaaaattaatttttgtcaacactgatggattgtccggaccccattttaatcacttaagagaccaacatcacattttgaccagtgaaattaattcttagaagttaaaa

SEQ ID NO: 80847 - DNA, 1183 bp, Heterodera glycines; identical to SEQ ID NO: 16444

SEQ ID NO: 80848 - DNA, 201 bp, Heterodera glycines
attcacaatccctttgtcagtttatcattctttgttccatttctaaactgttataatggcacaatatttttaattgatattttttagaatgcgttttttaccgtcgtgattatttaaaattttcttaaaagcaaaattaatgggaggcaaacatctgaggcgcaatcatagtcactagaagtaattggacgataattatcg

SEQ ID NO: 80849 - DNA, 753 bp, Heterodera glycines
ttttacagtaaattggcactcaaattaacggaatgggaatgtccgaggactcaaagcgaatttgataataggtaaaaacgatactaaaatattatattattattacaattaatgttggtaggctccaacttttagactaggttgtttttaagctttctcaaaaacaaaaagtcgaaaattccaacatttaaaaattctaaatttattgcttaaatgccatttcatgattaagccactcaaatttattaattaaatgccaaattaatatttcccttaactttcagttacacatttaaagtgtttctgttccaatttgtcaacttttactcgagtttgttctacatcgctttcataaagggcaaatttacgagtccgtctcatgtgaatcgtgggatcaacgccgatcgaactgagctcagatttgggtatataagaaaattattgcttaacattattatacagatttttatgtttagaaaatcagttttttgaagttttctggcgccataatttttatgaatcttaacaaaaattttttgatagagaacacttagggctattgaataatatctcgacaatgttggatttggttggcaaaaaaaaagttatagccaaaacaacgcgctggggcccaatcctagactagattgtttaacatgtgaagtttttaaaaattaatttggtataaaaaagctatggtcaaaaaggtgtgaaaattgtgtaaattccattttttcatatataattttggta

SEQ ID NO: 80850 - DNA, 358 bp, Heterodera glycines
atgtcttcagataacgaaatgtaaaaaattaaacagaaaattttgaaaatttcttcatttttcagctttatctgcagcgattgtgggcttttggtgttcgattttcttgcgccttctcaactcggcctcgaaattgcactgattagccgtcgctttgactgcatcgtcaacgaacacttcaaaacacgcaaatggaaattgggcaaaatgcaaatttgccacgaaattggagagaatggcactaagcaaatgcaaattgtcaattccgatggaaatccattgccaatcccgcaaaatccgttgcccaacaaagtcatcggattcagacgcattcatatcatgtaaaaatttgattaaa

SEQ ID NO: 80851 - DNA, 742 bp, Heterodera glycines
atgcggaaaaatggacaaaatggtgagtgtcagattagtgttcagcgacccagaaaacccttagaaactatcaccagttttgattgactttaatatagcaaaagcagatcgtaatgctttttcgagataatttcaatttgttgtgcccatttcaaatcattagtaaaataaatgccaaggtctctgactggttcgtttccgggatttttaggaattggaaagtcatcaataaaataatttattttttggtttttgtgtcctaaatgtaaagttaaacatttatttgaagcgattttaaggccgtttaatttacagtatcgattaaatttgttaataaaattttggagtggagaaaaggaaatattgaaagaacatgataggccttaagatcatcggcaaatagtttaattttaacattttcagtttcgcagaattttggtaaatcgtaaatgtaagggtaatttattcaattgttttgtttttcgtttggggaatagtatgttgttaggctacttttcgagttattagtgcctattttctagatttttatttttagagccagaaaattttgaaaaaaatatttaccatattttctctaattatcgccccgtctccattaatgcccccgtctctaattatcctcccctttctgaggagattgaaaaataatgcccccggggtgataattagagaaaatacggtaccctattttgatgaattttttaacaaaaatggcaataaa

SEQ ID NO: 80852 - DNA, 521 bp, Heterodera glycines
tcggagggtcaacaattgaaagaggtggccctgatggttgctgccatattttcgttaaatgaccgactaattgattgatagtctttgattttcgcttcctttttgttaaggcatttctccgtgccaccgcttcggtcagctacaaaattaaatttacagtgtggaatacatcaattgagccatttgaattggtgaacgaccgaaccaaggaaaagctgacatttgagaaaatgccacgttacggtgctgctgatgaagatggctgtgaattcactgaaagattgctgttgaagcgatgcccaattagtgaaaaggcgacggcggttcaatgggaaaattgggatgccaatttgaacaaagtcacaatttttttgtgggctgacatcaataaatccattgggtgagcgcagcgcagcaacagcaatttttgattttgtcgaaaaaaaatatttaattttaggccattatcgccaccaacggaagaagagaatgaagaagcggatgaaagcaacgaaaaataa

SEQ ID NO: 80853 - DNA, 303 bp, Heterodera glycines
atggccaatcaaaatgcgtttattaattcgttcactttccatttcagcagattaagttgggcgatggaagcgccttcctcagtcgcggtggacgacgcctcattcgattacagcgccggtggcgatgaattggccaacaaatccacgccgaggcgtcgtcgcgggtacattccgtactcgaccatttacgaacggcaaaagggcggctattgggtgccgggattgcaagtggaggcaacaattgtgcatgtggagcgcgatgtttcgtcgagttaccacattctgaacccattcatgtgctaa

SEQ ID NO: 80854 - DNA, 451 bp, Heterodera glycines
gccaccaccaacaaccgtggttagagtcaaccaaacagtgcccgggttgggtgcagccgttcggcctgatctcctggccgttgacgaacaaaacaaaacggcgctgatcattgacgtggcaatgccattcgaaaaccgctaccaagcgtttgaaaggtgccggcaggggaaacggcagaaatacgaagaccttgccgaacattaccgcgcgattggctttgatgttcttctcgaagcgttcattgtcggaccactcggcggttgggacccgcacaacgaatttgtcctcaataaaatgaaaattggccagcattatcgccaattaatgcgccggctaatggtctccgatgccattcgttggagtcgtgacatttatgtcgaacatttgaccggtgttgcacagttccgagatgatgatgtcgaaggagtccgcggcgaggcaccgaattga

SEQ ID NO: 80855 - DNA, 167 bp, Heterodera glycines
atgggccatgagaacggccgaggaggagttggaggccgattggccgaatgttttgcgggtaagtgccaaaaaaatacaaaaaaaaattaatgctaattaatgatgctcctaattcagctctgtgacctgctgatggaaaggaagacctttttgtttgttggaataaa

SEQ ID NO: 80856 - DNA, 899 bp, Heterodera glycines
atgcccaagctctccttttcaaattggaggtgagaaggatgaatttatttttaattattttttcattatccatttttgtttaattttcggtaattttatgcattttttaaggattttccccgcaaatctttgcgtttcatttgtcaaaatgtggcccaattgttcaaatcagatctttttgcaaattgatcaggaaatattatgtgtacttctcgaccatgaccgtttgttgctcaccgatgaatttgaaatttggaacgctgtaaattcgataaatttttcatttgtattttaagttagtttttttttaaatttaggcaattcattgggccgatgaaaaatgccgccaaaagggcatcgaatgttacgatgaaaaacgacgcgaaatgcttggttcggcattgttcaaaattcgttttccaaatatccaagaggaggattttgccaaatgcatcggtataaacctttcacaaatccatcgatgcctacgggcatagtcacggaattttaacaattttgaattttttttttttagatttccatcagatgtgttaacagaaaaagaattgctcggcgtttatcagttcaattcccatccgtttctgtatcttcgtggagtgcccgggctgtactcgctggatttcccaagccatggacgaatttctgattggaacaaagccaaaagcaaccgaaggaggacacttgcgttggaaattgaaaaagtgtcggaatttgcgggagagtctgtcgggagaagcagattcagtgatgccgtggagataaatggattcgaatggaaaattgaagcagaaattacgaaaggcattgatgagaagaaatatttgggattttacttattgtgcgatgcaaaagaaggtccaattttaataatgttttaa

SEQ ID NO: 80857 - DNA, 150 bp, Heterodera glycines
atgttttggcgtctgaactgcttggccgccattctgtttgcactgtgctgcacctctagcactttttggctcggttccgatactactgatgaacagaacaaagcgccacatgttgaccaccatacgctgaccgaaacacaacaatatgaa

SEQ ID NO: 80858 - DNA, 698 bp, Heterodera glycines
atgacagatcgccaacaaaaagcgatggcagcgtttcgtgtacagaaacaattggaaaggcatcaagcactaacggaagagaatgtgcacgttggccttatgttcggctcaaaggcattggtccaactgttggccaaccctctgtaagagggacggagggggggggggggaattggtggccaaaaaagggcgggtgattggctaaattgtcaaattatatgccaaacggaggaacacttttcattcccttttcagcattggaccacttaccaacaagtcagtacatatacacatttacattcacttcttgataagtaattctgattaaattttgccagaatcggctacactttgccaatgtttgccggtgagcggacaaatggcaaatcgcttctcttttcgctctattttgcctctcttttggctccctctcctcctctttcgatacctttttttctctcttttccctctccctctccctgtccctctctctctttcttcctcctttctctctctctccctttctctcttttctctctctcttttttctggccttttatagttttttccatgttcaggcttcgtaatcatgtttctgtccacgctgctgttcgcctttggcacttccttcttcactctttggctcgcccgttctttgcaaggcgtcggttccgcctgtaccagcacttcaggaatgg

SEQ ID NO: 80859 - DNA, 111 bp, Heterodera glycines
atggctgcttggttggatgccttcgtgcaaaagtaccgttccaatcgtcgtgtgttgctatgcattgtgtacgttgcgcttttcctggacaacatgttgttgaccacagtg

SEQ ID NO: 80860 - DNA, 990 bp, Heterodera glycines
atggaagtagaacaggacaaaccaccgaagccaagccaaaaagaacaattaaattccgatgcttccgaattcgctgcttctctttcagctgctacgacggggcttgatttgggtcaaacagccgttccaaaagaacaaccgaacaaggctgatgcctcgggatttttttcagctgtttcggccgcaacaatgggaataagtagtgaacaacaacaacaaactacaaccaaaaaggagaaggagcagacagaccatgaaattctcgatgaatttctcgagagcgtgtcggctgccacgactaacatggacgtttcacagaaaagaaagccaaagaagaaagtaaagaaggatatggaagatgaggaaatgacagcaattgcgtcgatcacccgtaaataataaagtatttaaaagcatgtgattatttgatttagcccttaaacatttatcatgattggaaaccaattttacacagataaagaattaaagctaaaaatgcccttcggtatgcttatttctggtccatcggggagtggaaaaagcagctttctagtcaagtttattgccgagtcctcagaacttattgaccctaagcccgcttccattctttacgcattcggtgaaatgtccagcattgtgcctaccctccaaaaatgtggtattagtgtgtattcgggagtccctccggaagagttaattaaacgcttacctaaaccactgcttataatccttgacgaccttttgctatcgattgatgaggcctatttaagtgcattattcacaaaaaaatcgcaccatcagaactttgccgttgtttttgtcacccaaaatttgtttgaaagacggattaaagtggcaagacaaaacgctcaatatttggtactaatgcgggcccccaactcagcacttgctgttcggaatattggagttcaactctttcccgggaaactggattattttctctcggcataccgtattgcgaccaataaa

SEQ ID NO: 80861 - DNA, 587 bp, Heterodera glycines
atgagtatcaacctccacgacaaaaagtcgctcatggacaacattttgccggtggttgagataaatcaaaccaacaacggcattacggttagcagtgaacgaattgcgataccacgaacggttcaattcgatattcttggcaaatgtcgagaatgtaaggcaaccgaatgtgagacggaatggtgcgtttccaaggaaggcgttaccatttggtgcacacgcttcaaaattagcccacgttttgtgccatttgatgtgatctacgatttgcctggttacacatttttcaaggtttgtttctgtgttttgttttatcacaattattactcaacagattcgaaacaaaggacgggttttcaacgttgaccacggtttccgctccaatgcgtgcacccagaccccgactcccgtgtaccatttgcctccacctccaccaccgcctcagctcccgaaaagaaagcaggaaagtcaccaagacgcggaacaacgtgttgcccatcaattcttcgactctgtgtcggcagcaacgacgggattagacattgcgcggcaccaaacgcgacaaggcgacggcaaagaattttttg

SEQ ID NO: 80862 - DNA, 386 bp, Heterodera glycines
atggctcgccaatcgacaattttaccaatctacaaacgacaatcgcgaagacagcagcaacattttcatttcgacaatgtaaaaaaaattttttgaattcaaaaaataattttatttatttcaggttttggtgtttgatggaggaagccgccgacagttccaacttagctggttctgcatcgcactgatcgtcatactttttgttgcctggttcatttggtaagtgaataatttttaatttacaaaatttctatagttaaattttaagaaagcgccgacggagacaatccaaatggtgcatgaaatggatgatgagattgatcaaaaattatcccaatttggttttttctatttaataatattttaatccatttctctcagggcaa

SEQ ID NO: 80863 - DNA, 311 bp, Heterodera glycines
atgttattaattatagtcaggttagttaaataatatttccaaaaacattattaaaaaaattaattaataataattttacagaaaagaaaattattttaattgggtgagcattatttttttagaagaattataaattatgttaattattttgtattgattattcctctctcttttcattaactaaaagtctaatatgtttttatagaaaaaaaaagatttacctttgctcttttatttatatatattaaaaaaatgaaagtcgttaaataatacattatattcttataaaggataatagctttatatgagaa

SEQ ID NO: 80864 - DNA, 623 bp, Heterodera glycines
atggaggcggtgcacaacgaaactccatctggaatgccgactcacaaacggaccatcaaagtgaacaaaattttatttgattattgtttaaccaataaatccaggtgggtagtgttgaaagcggccccggcgctttcacagtgccccttggggccttggttaaataataataatgaaacaaacaaaatttagaatgaatctccgaaagcgaatcaaattcagcaagtcattgcgcgaatgaggaaacataataaaagcaaaaattaaaagcaaaaaataaatacaatttcattatataagaaataaatagttatttttttaaaaatttaatgggattaaaaaaccatattaatattatatagaatcatagaattaaattatttaatgaatctatacatattaaaaaaaaaaatatattaatttaaggttaaaactcaattcattaaattttaggacgagattcaccatgagaataaatcacaaaagaattaattttctcaattaatgaatataaatcaacaaataattttaaacattgaaaaaataactcaaattagggactaaataattaggtaacaaatattttaaaattaatttaatggtcgacaaatgctgaaattaaa

SEQ ID NO: 80865 - DNA, 1700 bp, Heterodera glycines
atgagtatcaacctccacgacaaaaagtcgctcatggacaacattttgccggtggttgagataaatcaaaccaacaacggcattacggttagcagtgaacgaattgcgataccacgaacggttcaattcgatattcttggcaaatgtcgagaatgtaagtcaaccgaatgtgagacggaatggtgcgtttccaaggaaggcgttaccatttggtgcacacgcttcaaaattagcccacgttttgtgccatttgatgtgatctacgatttgcctggttacacatttttcaaggtttgtttctgtgttttgttttatcacaattattactcaacagattcgaaacaaaggacgggttttcaacgttgaccacggtttccgctccaatgcgtgcacccagaccccgactccggtgtaccatttgcctccacctcctccaccgcctcagctcccgaaaagaaagcaggaaagtcatcaagacgcggaacaacgtgtttcccatcaattcttcaactctgtgtcggcagcaacgacgggattagtcattgcgagtcaccaaacgcgacaaggcgacggcaaagaattttttggtgcagtttcagcggcgaccatgggaatggacattgaacaaaaaaacgagaagcctaaactaagacaacagagggcagacgcctcagatttcttttcacccatttcggccgcaactatggggatgaccgctgaatatctaaaacccaagcctaagccgagacaacagccagttgatgcctccaacttcttttctcccatctcggcagcaaccatgggaatggaagtagaacaggacaaaccaccgaagccaagccaaaaagaacaattaaattccgatgcttccgaattcgctgcttctctttctgcggctacgacggggcttgatttgggtcaaacagccgttccaaaagaacaaccgaacaaggctgatgcctcgggatttttttcagctgtttcggccgcaacaatgggaataagtagtgaacaacaacaacaaactacaaccaaaaaggagaaggagcagacagaccatgaaattctcgatgaatttctcgagagcgtgtcggctgccacgactaacatggacgtttcacagaaaagaaagccaaagaagaaagtaaagaaggatatggaagatgaggaaatgacagcaattgcgtcgatcacccgtaaataataaagtatttaaaagcatgtgattatttgatttagcccttaaacattcatcatgattggaaaccaattttacacagataaagaattaaaactaaaaatgcccttcggtatgcttatttctggtccatcggggagtggaaaaagcagctttctagtcaagtttattgccgagtcctcagaacttattggccctaagcccgcttccattctttacgcaaatcgtggtccggcggtgccgataggtgccgccgggcaaatttttttttaattttaatgattttattaagaaaaatcgacaaaaaaatttaaaagtcccaatttttcctgtaaaaatttttaatttttcatttcgggcgggggaaggggggaattcctcccctcacctggctaaggttttatgaattttcataaaatgcgtgaaaaataggtgtgacaaaaaagtgatgcctctattttctaggcgaactacccaaatagccttaacaacaacaaataaa

SEQ ID NO: 80866 - DNA, 1828 bp, Heterodera glycines
gccatcggtcgtgcgctgagtttggcactttcgctgcgcgacgccatggccggctcagtcaaattggacgttcaaaccagcactgtacaggtgagccaaatgacaaatttaccactaataaaagttttataggaatggagtagtaaaaaataaaaataacagccatcaaataaaagggcctaattattttttcaattttttgttttccttcgttcaggtctctgatgaagttcagtctctgtctgattgtgatttggccgatgttcgccttcgtatggtttcttccgtccatattttgctttctcgcgtttgactgtttccaatttccccgtttattccattggtcattgtgtgtgtgtatttgtttctcatttgttccaataaattgttggtttttgaaatgtatttcatggagagttaattttgccattattttcctcaatttaaattcatattccaattttgaccctttgtagtttattaaagtaatgttctcgcggcgaaatcttttgctttggcctggtcaacggtgagaggttttctcgagacatttctcttcttgtacttttaaattcatttagtctgctccaccttaatcggccttgttcttcatctgtgattaaaggtataaaaaagggacacataccgaactaagagggcaaatttccatgtcccaccacccgataatcactgaacaggaacctgactcattccgcacccaattccgaacctcgagctaaatttcaaattccttttgtttttgcttaatttttcggtcccaatattgctgtgattggttcgggcccgtctgggttgtatgtgtgtgctcgactgcttcagcggttgccacgttgcagaatcgatgtgtttgacaaggcacaggcgccctacggactgattttctacggggtaattcggctttttcgagaaatccataatatacttccgttaattatcaggtggcccccgaccattttgacatgaagaaaagcatgaacaactttgagcgaatgttcaacgacaaccgggatcggattgagctgttctgcaacgtggacatcggtcgtgatttttcttatggagtgagtgagaatgtgaataaagtttgaccaattcttacgttaaatgtttataataattggttttgtatcattacaaccataaaataaataactccctcccacaaaattatcgctgcattttaataaagtttgtcttaatcataaaatgagatttacaggaactttgtgacagttacgaagctgttgtgctggcgtatggggccaaccgcgcgcgtcgaatgtccattccgaatgaaaatgccgccaattgtttgtcggggagcgcttttgtctcgtggtgggaaataaaaaaaggaacatcaaaacattccacttgtgggcaatcagttcaaaactggatgactttcttataaatctctaaaatacttttttcaggatcttttaccccattttatgtgattttgagacaaaaatgttttcaggtacaacggcgcgctgttgagcagctccgagccgctgttggacactgaagatgcggtaaaagacaacctctaattgaatttgtaattaaaatagtttttattttgtcatttttcttaaaaatcccaaggtgattattggcaatggcaacgtggccatcgactgcgctcgcattttgctctccgacccggacgtgcgcttggccggcaccgacatcacagagaaggcgcttcgtgcactgcgacagtcgcgcgttcgacgcgtgcgcgtgttgggccgacgcgggccacaaaacgtttgtactgaaccaggcccgggttaagggt

SEQ ID NO: 80867 - DNA, 2727 bp, Heterodera glycines
cttctaccaagcaaccgaaaaatgatgatgctaattatgctgtagaaagtcaaaaacaaaaagttcgagcatcatcatcaatagaaatttcagattcatcttcttctggtgtccagaactctgatgaaaagcggtacttaaaacaatacttattcctaaattttgtgactaaacgtctcaaaataattaatcaaatagtgaagaaaaaggtacgacggcattcgtgactactggacatttcgcctactggaaattttgcctactaaagcaaaatcacgctttttctgtaataaaaaattttattttctaaatgctgctttttctctgattccgattttggattagttggtgagatattcaatggtcgaaattcttaccagtgcttatgttcaatcctgatcctgtcggggttgaaaagtcgcgatcgggatttgatttttttaaaaccaggaccgggattgggttctgaaagccgggattacgggaccaattacagtcgggaccttgatcgcgtgcaaccctaatttaaatccgctttttgtttaatattcaactttacctgtcctactttactaatttacaatcaacttgctttcagattcaatgtggcaacattaaattgcgggttttttcttttataaaattatcaatacaataaattttgaatggcaggcttttacctcttccttggccaatcggaaggaacgacatacaattccgtttgttaaaattgatcaatgagctcaaacattcacggcatgacgtcattgccttgcaagaggtcggttggggcagttctgtaaggaagaagctggctgggcggttaaagcgcggaaagcgggggttgataacatccgtaaaagaaagtgcggatgtgcctcggtagctcaatggtagagctgcccacggaaagggtgcacgaatgggttcgattccaacccgaggcctaacatttttcccattcttattgttcctttaaaatgttttttcttaggtatggagtgaaagaatgttccttcaagttgctcacgaaattaacgaaattttctcccattcgcactatttccacagtggctttacgggtagtggcacttgcgtgcttagcaggttagcagtgaatcagggcttggcgtaactggattttcaaatacggaaatccgtaattacgcccagctctgcaatgactggattcttcagcacttggtttttcatttgatttaaggcatcctatagtgtccactttgctccacaaatactccctcaatggctttcctcatcacgtccaccggtaaaatatttccgaataaaattctcaaccaattatcttatattcttaagcggtgattggttcggtggtaaaattgttggaatggttgagatcatggtggagcagtaccgagttgcattttatacgacacatcttcacgccgaatataacccagagaacggtttgtgtaatattcaaaatgaagcggctgtggtacaaatttcactccgtcttctattgaactatgattttttgatgtcacaattcatccgtcatacctcgcgggggtttgtttgtactgtttatttttaaattgtttttttatactctctaattagacatcttgcttttaggtgctgatttctagttgcggtaggcgacttcatggccagaggctcgattatgtaatgtacaggagtggaaaaagtgagttttgtgaggcaatcgtaaagaatgcgacacctatttcttctttgtttagtattttgtaagagagatggcgcacggaagatgcgtcagtggaaattttaataacttccaatagcaagatgatttaattagattaaatttaagctaaatgatgatttattatagagcaaataaattgaaataataattaaattcaaatatttcaattcattgatacttctgccacttcggctcaccacggacgtttagattaatttgatttgtttattttgccttttctagcggaacttaatctcgttgagtgtgtcaattgcttcaacaaaattcccgggtctgaattgaatttttctgatcacattggcgtttctgccactttttcgtttgtcaaaggtattaaactctgactgacaatgaatctttttttcaaactttagaaaaagtttcagaaaccctttctgagcgaatgcggcaaattgtgccggagaaggaagttttgactaaatcgctcaaaataatagaggagggcgaagttcgcgtgctgggggaccgtcggctttttcttagcctctgtgtggctctaattgctttaactgtcgctacagctaacatccatttgaaagtgccatacttttaccctgccgtttgtatctttcaaaaaaggacgaaattgaaagtttttctttgtttatgtcgcattgttacggtttatgctccctttgttcataggcttctgccttttgtacggtttcattggtgcgtttttttaattttttgcttctatacttgggaaaaccatcgattattattttgtaaatttaggtttgacaattgaaatgaaagcactgaaagaaacgaaaaattctatcaagaagcttttgcgttccttgtgaatttttatagacttataaatttttaaaggtctcattcggtgctaggtcgtaatataaaaactgtcaacatgggcgtttcgtaacattgcttacagatttttcgagaaaaatccgtcataatttttcttaaacaacaccaaa

SEQ ID NO: 80868 - DNA, 320 bp, Heterodera glycines
atgcagcgcaattttctctccgcccttttcctcctcctttttgtgctgctttatgttcatcaaacattggccggtggttgtgcttcctcaatttcgcttaataaaatcaagaaaaagaagaagcaacagtcatcaactgccgaagaagaagaaactgtacatacaccacggaaccgtgccaatgccgaacatggcaatgtttctgacattggcactggcccagcggggaatgttggcatggcatccacgtcggctgacacacgtctgaatgaggaggaatcacccctaagaaaaacgggtaaaatttcaaaagatcgggt

SEQ ID NO: 80869 - DNA, 406 bp, Heterodera glycines
atggaggcagcagcgcgggccaaactgggaacaaagaaaccggcgatgatggcacgaaaaacaacaacgactatggccgtcatgacgcgcaagccgatggggatgaagcgactgacactaaaaaagaatcacagccaacaacagcagcaaacagcaatggtggcggtggtggtggcacagcagtgttgtccggcattggcacttccctgttggacggagtgatcagcacaatcggtggccgagtggccaatggggcggtgaacaaagcgatcagtggcggacggaggggacggaaaatggcataaaacaatggcacaactcagtgattattttcaatgctttcatatttttctatgaaagtttattctcttacttggccattgtcatgtttcacatttataataaa

SEQ ID NO: 80870 - DNA, 129 bp, Heterodera glycines
ccatttgcgcaggtccaactgggccaatctggcacatggcactgtgccgatcgctgatggaagcagaagcgcgtcgaacggcactttgctgatctgatcgccgttgtcacaaagcagacgggccaaact

SEQ ID NO: 80871 - DNA, 84 bp, Heterodera glycines
atggctaatcccaaaagcatatcccaaaatcacattatgccatttcacgactatttgttctcggaagcggagaaaacccgttct

SEQ ID NO: 80872 - DNA, 143 bp, Heterodera glycines
ttttaatccacaatttatgaaccacaaagaaaagttatatttgtattattcgagctgtccgaattgaaatgcccttcaaactaatcgcataattcgaacgggacgatgacagagaacgaagacaaaaaagcaggaacagggta

SEQ ID NO: 80873 - DNA, 1012 bp, Heterodera glycines
  unsure (1)..(1012): unsure at all n locations
tctgcggtacacactgtggaaaacccggtatgtaaacatgccttggaatttcctgattcgttggataaaccgggatttgtaccgagattcggattgtgtagatcaaaaaatctgtttaaaccagagtagccaattctgctgatttaccatcattttgctgatttcaagaaggggtcagtgatgattttttttttctgagatgctgattttcaaagtgcaaaattaacctaaaaattgccaattttcagtggaatttgtttaaaatgctcaaattaaaaaaaattttccctgagccgccggcccctttgttcccaaaaagttttttttttggaaaacccgcttttttcattcggaaatttttttctaaaatgttgctttttgaccccaactgctgattttgaatattttcagttggcaaccttggtttaaactcagtagtctgtctgtattcagattgggtttgttttttaggtctgtattagggtagaccagaggcccgggcagatctatacagtgatgatcgatcatacagtacatcaatataatttaattctttactgtgctttgacagccaatgccattccgatggccaattgagtacggcatgcaaactggtgccgaactgatcatgacgggtgccacatacaatggccaacagaagcaatttgttgtcaacctgaacggtcgtggtgatgatgttgtgctgcatgtgaacccgcgcttcaaattcttggaggacacaattgtgttgaacaatcgcagctatgctggctggcaaaaggaggaacggcaccggaacaagtggcacatttttaaagccagggatggaaatggatttcggtttacgaaaaattcctgggtctcgtaatccgatttcccaaaaaattttaggctcgaattcggtccgaaaattttgaggacttgaatttcgtagtcagttgacctgtaccaagccagggnatggagaggaatttgatttacgaaaaatcatgggcctctgaatcccgatttc

SEQ ID NO: 80874 - DNA, 1292 bp, Heterodera glycines
atgaactcaacgccaaccaatgtgacagcagcacgacggacaaaacgccaggccggctatgaggccggtggaggcagcggtgccgcgaccaacgttgccgtagacgcttacggcaccagctgcgattcttgctgtttaccgggaccgcaagggcctccgggttgaaatgatttttatgaaaaaaatctggcattctgttctatattgtttgaataactcaatttttactcacaggagcaccgggaagacctggacggcctggaaaacctggtgcgcctggcctcccaggtaaaaatggtttttatctgatttatagtcattttcatatgaaaatttaattttttaatttttatcttttgctagactaaaagtttttaataattaatggtttttgtggtaattaatgattagtgttcctccctgatcagaattattttttatattgtacaatcatagcatatatgtttagggccacttgctattccgataaaaacgcattcataaaattttcttacagatttttcaatgctcaaattcgagattcaaaaacttttcatcaccatatgaccatacgaaaattggggtgtggtacacacagtcaaatataatttaggcaataaccattggaaatccaccaaaaaggttgcaaaaatattaaatcaaagaactatgaaaaattttatgaaagattatttttttttatcagaatggcaagtggtcctgtgtgtatatatgattattactttaaaacccattaaattgtcaggaaatccagggcgtccgcctatgcaggcttgcgagcccataacaccggtaaagccaagactatatggagattgaaatgacacaccgaaagtagtcgcgactaacatccttaaaacatttttcagcccccctgcaagccgtgcccgcagggtccgcctgggccccaggggccttccggacctccaggcgaccccggaacacccggcatgcctggcagcccaggacgtgatgcacagcctggcgagccagggccaaaaggaccacctggtgaaatcttgcaaaaaaatttccatatttcatgttttcatttttcataaatttaggtcctcccggagagcctggacttcctggaccccccggcggtataaattgacggggaattggagaagaagcacattcttggcatttttatagacccgggagtgccggcattcagtgagccacttctgccaggcgaacctggaccgccaggtcaaatttttggaaaatttaaatttttaaatggtaatgaatttcaggcgaccccg

SEQ ID NO: 80875 - DNA, 160 bp, Heterodera glycines
atggttggtccatgaatttttccgttttgcagttctccgattatttttcactttcggctcagtttaaagaactgctgttcgacagttggctaatcgtttatttcttttcaatgtttgggttgtgtgttcagttcgtttatcgttttttggtgttgaacag

SEQ ID NO: 80876 - DNA, 1195 bp, Heterodera glycines
atgaaagaaatgttaataaacgtcacttgtaatttgttcgctaaatccacagtgtaagaaaatggaaaaataaactcataactttggttgaaaagtaaataattttcaattcttaataaaattcggcaatatatgaaaaatgcgaattttgtcaccatggaaattgaaaaactttaaataatgacaacgaattaagaatatttgttggcacttttttaaaacgggtaagaatggcgagtggtctgatgagagaaataatttttgaaaattgagagaaaagggaattttttgggaagaaataattattttaatcagttctttttagggattttggaatttttcagtaaaaaaaaattcgtgttcgtttttcgtattttcgtgtttttagggcgtttcgtgttcgtgtttagtattttatttttgtttcgtatttttcatttttcgcattttatttttcgattcgcaacaaccctgttgtagataatgattctgagcttttcgattcccaaactaaatgcctttcttcatattggaatcacgcccgactcaaaattaggcatcatttaaatgaaacacataaagcttaaaattcccaaagacaaaaattttagaataattgatttggttggcagaaatatcaaaaaattgtattacaacaactgcagcaaaatgtttacatatgtacgaatgatgtaacatgaacaagaatcgcattcgaagagagcactgccctaaaaagaagaaggatggatttttaaccataaatgaaaatatccagaaaatttgcttttcaatgcaaaattcaggcataaaaaagcctttatgaaactgagattcggattttttgaattgaaaaaccgaaattctgagtctgacgggtcaaagccggaaccgaaaattatatcatttaacgatttggacaataagctgacggattttcttcaaatatggattttgagaaaaataaattaaatgcctttcttcatatttttggaacagactactcttttgcaaaagcatatcttgtgaaaagttctgaccttttttaaagcagatacatcaagccaaaaatttcctggtagcgcctgttggaactacaagactaaatttttttttgaatttcaaaaaaatcccaaaacctttctaaatagtttgtggcaaaatatattatgaattttagtgaattcaaaaaata

SEQ ID NO: 80877 - DNA, 371 bp, Heterodera glycines
atgagaatattttgtattttgattttaattatttttacttgtttttccaaccaatccattttctttctgaatttatcaccaccatcaccacagcacttttttctatcaattttagcggttttcgaaacagcggcactttttacaccggtggcattaatgccaaccgccggtgacaaagcggacgaggacgaggcaccactgttggcagccgatcggatggcagaggagtgatcatccaacagagaggaaacactccagccacgaattttaatcattttaacggataaattttaacagaaaaaattcttatgaagcaacaagtcgagagaaaggcatatttttcgcttatgtgaaaaaggccaaaaattaaa

SEQ ID NO: 80878 - DNA, 1289 bp, Heterodera glycines
atgattaaaattcgtggctggagtgtttcctctctgttggatgatcactcctctgccatccgatcggctgccaacagtggtgcctcgtcctcgtccgctttgtcaccggcggttggcattaatgccaccggtgtaaaaagtgccgctgtttcgaaaaccgctaaaattgatagaaaaaagtgctgtggtgatggtggtgataaattcagaaagaaaatggattggttggaaaaacaagtaaaaataattaaaatcaaaatacaaaatattctcatgtttataatctctacataatattatttattttatatttttaagcattcattttttaatttctatttcctttcttttttataatgaaattttattaattttaaattactttagcgagccacacaccagtttttgcttgctaaaatggtgtctatgaatattgtttcgccaaccgccgctggtccaaaacttccaaaacacaagccaaagcttgggaaatttatctatttggtgggatttctttttatttcttaatataaattaaaatttggtatttataataaaatattcaaaacaaaacaaaaattaattttaatgtgccaattttatgctttcagctcgcttttattgctgtcattggtggttttttgtttggttatgacacaggtgaaaaacattcttctatattgtaaaatatgataaattatattctaaatttcaggggacttaaattaaaacagtaatttattttttaattgaacaattcaaattaaggcattgtctccgctgcgatgctttacgtgccaaaaaattcggacctgaagccgatgagcaacgcatggattgggcttattggtgaggaatttttgttttagaaaattaaatttttattatagtttcaattacgccgggaatggccggggttggagcactgcttgccggaaaagcatcagacatttttggcagaagaaaagtaaaattgtttaaatgatggaatttaaaaatagtagaaatttaattgattcacaaaatcttttatttaaatataaaacataaaaattaattaattttcctttccagatgatcattctttccacaataattttcacatttggtgcaattgtatgtgcaattggtgtaagcaaatggattttgttggccggacgaatttttttagggatagcaattggtattatatcttaataatataataaaaaataatattcaatttgtaggttttgcctcaatgattgtcccaatttatgttagtgaatcctcaccagcgcatattcgag

SEQ ID NO: 80879 - DNA, 987 bp, Heterodera glycines
atgcaaatatggtatcattgtaaagcccataaaaaatgctatccaatggtatgctacttatctgttgaaattggaaaatgacaattttatacgcaatttttttttcaaagcatgatgggacaacacttatgaccatgactgtatcaagtttttccaatttggttgggaaaacccttcaaaaataattcccaaaattcgtcattttttaatattttggacaaaaataaataaaaatattcatgttgcacaacggactcgaaccaccaccctttgtccctttactatcttacaaaaaccacttcgccacacatgcaaatctttttggaactgagaggccaaaattgaaacggtgtgcgtagaacccatttaagtgaacagattcgagataagaattaatgcaaataggcgagatgttcagttggagaaggcatagataggtcaagataagggttgaaagtgcctagtcacaacacataaaaataaaaaaggactttattcgcaaaattagtgtgtgctaacaaaatagcgaccttttagatgttgtttttattttaagtgtttacttttttttcatattttcatttaaattacagtctatgaaagtgaatgcaattttgaaattggtttgtagtgacggattttacaggccatacgaaaaagatttaagccattaattcattttttgtgtccataatgcttttcatttttactgtacttaaaaagatactgtaaaattaattgacgacgaggaaggtggatccgagatagcgcctatttttaatgtgaattttgcatattcacaaatttgtgtgcgtacactttcaatcacatttgccaaaatagtgatttctagtgaccgataaagacatcagaatcgaaaaattttaatgcagaaatgcgttttttgagctcctttcttcaaaacaattgagcaaacaagttttttcactaaatttgcggccctatttattacataaaaacattaaa

SEQ ID NO: 80880 - DNA, 321 bp, Heterodera glycines
atggccaaaacggtttgaagccggttagaaatcggagcatgttgtccccccccccacggaaaaatttaaaaaattttctaattttttttttgtaaaatttctgttttaattttcaggggggaaatgaagtgcacccgttagaaatggctggtttataaatccatctaataacctagttgattttatcttcaatgcaaaagaccccatccgcaaattagggctcgacctattcctaatcattggagccccagttagcaaagtctacacggttaaaaatcataatacaaaaaacaaacaaactaaaatcatcctttgacttta

SEQ ID NO: 80881 - DNA, 176 bp, Heterodera glycines
atgactatcgcagagacgagaaaaatgccgggattcagaccggggtggccaaaatctttaggttcacgattagggatgagaaaatctcgggacttggatctggacggcaaaattcctcgggtagtggattggagaaaagtaatttatgccctcattaatattttatcgctgttact

SEQ ID NO: 80882 - DNA, 403 bp, Heterodera glycines
atgcccatttacagtattttggcggcactttgcaatggcattgattataacccgcaaaatcagcaacaacacaattggacatatgaagggagtcagtcgccatcgccagtgggccctttcgccgatggttccacggatttttcgttattcgccaacatgtcgcagccgtggcacagccaaagcgatagccaaaccgaaccgccgaagccaacggattcatatgccgaagtcgccgctaagccgccgacagtggcaaacactcggtacaactcaataatttatatggatatgagatttacaagatgataaatcatttttttctcaagttctgctcgtgatcgaaactttctcgatattcgagaaagactttttcaaaatattttccatattctttcaaaatcaa

SEQ ID NO: 80883 - DNA, 1072 bp, Heterodera glycines
atgccattggcttcagtggagccaaaaaagaaatctccgactgtcggagacgaagatgagaaagccgcaacggataaccttcaaaagagccaaatttgtcatttttgggaggcccataaaagtggaaaaagtcggaccaaatgtcagaacggcgccaattgtaaatttgcgcatggggagaaggaattgaagaagattgtcccaccctacttcaagaaccatctttgcaaggtcagtgctccgttcgggattatcaacaatgtccgggttcagcactggagctcgggcaaatgtctgaacggcgaaggatgccatttcgcacatggacccgaacagttgcgtaaagttggacttactaaaggtgggtgattggcaccgtttgcattctttcttttcccaaatggactcctttcgacccatcaaaattaagagtcgtcaaatgtgcctccgtcaccctccaaaagtcatcaaagtcgtcgtaagacgtgaacacgcacaaaactcacacaattcagccccaccgatgattttggcctctgttcaatgccccgatgatttgttacgatttaaaaacttttctttaaattctttctgttattttcttcccaaaagatcagtgtaaaatctgattttcttaaaaatttctttactaggattattttaagccctaacacgaatctgacgtttatttgaggctatcacgtattttacgcgacttatgtgaaaatttacatgtgaattttaaactttttttaaaattagcttttttcgttgatccacaaacgggggcacacacaaaaagttcgtcgatatttttgccattttttggctcagtttaaaaaaaataatatttcatgacatcattcaatagctctagatgttctctaccataatattaatttagaagttttttaacaaaattataaaaaagttatggtcataaaatttcaacaagtcttgagtcaaaattttttggccagatctttcgaccaatttcgaacgacgtgaatttgaacaaaagttcgaaaattcaaaaaatacgcgagatcaaaatcaactcattaatacttca

SEQ ID NO: 80884 - DNA, 2280 bp, Heterodera glycines
  unsure (1)..(2280): unsure at all n locations
atgggacatacaatgaagagattgacagagaatttatggacaactgagaggccttcaaaagttgaatatgcatggattggtgaaagatgtgagacaacagtgaatgatttcattgagaaaggacaaggcggaattctggatttttatttggtaacatcgtttggacataactttaatccgtacaacggatgggaagaaggacaaaaatggacatttatttgggaaattccggaaccaagtgaggcttattgggcaactcatttccctgtcggtgattttgtggcagaagtaacggagaacgcaattgtgttagaaagcgaacaaagcgtgttttattttgaaaaagaaaagggcgatgaaagagagggtattgttggcgtaccagacgaggcgtataaaatgtcaaatgacgttttcattctgatacacactccgagtccacaaaaagcgagagaaaaaagggaaacaaagcagaaaagtgaacctcagagaaaagagcgaccagcgaaacaggaagtgtttctgaaaatcaggccgggtcaaaattcaaaatttgaaaatttggacccagcgtccagacccaaaagcaattggacacgaacaactttgagtcctaaaaggaacacaacggagctaataattttgagtaccccggttccccagtccacaagcacagtggggagtacgacaaaagtaaccatggcaattccgaccaaaattattacaagcacggttccaacgactataaggcctaagacagaagtcaaaaaaccaattttcgagaaaattcagataaaaaatgagcaaaaaactcagtcagtatacaaggcagttgggaaaaaggtggaacaattggtagctacgacaactaaagctccttttacaacgactaaaaaatcgaaaattgaaaacacactgaaaaaggcaacaccaaaaccaaaaattgtgggtttgaagagcacaacgcagaaggttcttagcacagttagaccaagcactaataaagtggtcaatgagctttttccaaagtcagttacaactccgagtacaattttggcagtaaaaagcgcaaataattccaaaaatttttctaagcatgtgctgggtaaaaaaccggaggttgaactgaaaaaggccacaacagcaagtctatttccaaagacaattaaacacacagaaccaacaatgaatgtgactgagattccagcacttatgactccaattcctccaaccactcaaaaaattgtggaaaaggtggaattgccgaaagagaaagtggaaaacaaatcagacagcattaaagctgaaaagaaaaatgaaaagttattaattccatccacggcaattacggttgtgaagaaaattgaggacgaaaaagtaagagaagtgtcggaaaagacagtaaagaataaaaagagtgaggaagaatacagtcaggaagttgaagctgaggtcattgagagcttagctaatgatggcaatgaaatggaagaatttgaaaattcattcgaggatgaaagcgatgaggaagttagtgtggaattatccgatgagattgaaatcttcgacatggatcgaagaaaaagaacgacagttacaacacctgacgcccggtggattaaaaaagttgagaaaagcaaagtgcgaaataaagcaggacaggaaaataagaatttgaatacgcgagtcaattatgcattgtatcgactaaatgaggagaaaagaaggcaatacgatcatatttataaacaagcgtgcgaaaatactaaatttcagctacaattggccaaagcggttttacaaattaatccaaatgagggagtcagaaaaatatttaatcgagacgatttagtggcacgatggaaaggagataatttggaagttggtttttgtgcaccggttacaccagaaaaaatattctgggacagaaaaatggggaacgattgttacgaatggataccaattttcgcagaaaatacaacattttttattcggccgggtaccagagaattgagcattataggcaaaagaatggagtgtacagaaatggaaaaaaccaataatatgaacaatgcgacacaaaaggaaattgttcaaagattaactgaaaatttgggaaacattaaaccgaaatacagaaacatacaaaatcctttggtcctgagagcgggagctctttttgaatcggacagcttacgtttagaagaagcgatgcgagaatatcgctctaaaatgaacaatttgccattgtcaattnttgagagttgttcagagacctaa

SEQ ID NO: 80885 - DNA, 1089 bp, Heterodera glycines
  unsure (1)..(1089): unsure at all n locations
atgaaaaaacaattgtacaaattaagaaatgaacaagagtcaaaaattatttcccaggggcaaaattcagttaacaaatttatccgaaataagttatcaaaattttttgagattcctactctaattgataatgctggaaatatgttttccagcaatgttcaaaaatgtaagatattagcagaaatatttcaaaagtcttttttaagaaaatcaattgttaatggtccacaaactcaatcaacacagaataagattaaactttctgacattgaattgaatgcgggaataatttggaatatattaagaagacttccccggcgtaattccacttcaccggataatgttccttacattttattaaaaaattgtgcataaccaattacaaaaatattagcagatatatttaggcaattttggattccggtcaaattccggaaatatggcgaacatcattatttgtaccaattttcaaaaaaggcgaaaaaactgatccattaaattacaggccggtttcattaaccagcactgtctgtagagtttttgaacgaattttgagtagcaaaattttagaatttctgaacagtacaagattctttgataaagaacaatttgggtttttaaaaaatagatcgactacaacccaaatattaaaaatgatggacgatatatataattctctacaaaaggatcaacaaattgacattatctatattgattttgtcaaggcgtttgattctgttctaattgatttattacttcaaaaaatcaaaaagattggaattgaaggaaaaattcataattttttaactaactttttaaaaaaatcggagttttaaggttaaaattggcgaagaattgtcagaaagtttcagaatattttcaggagtgccccagggaagtgtcttagggccattactctttttaatttttataaatgatctgccgtcctttattacaattgaagcggcatcagttggcataaaaatgtatgnccgatgatgttaaattatattatgcccacgaaaatgatgaccattcgaatcagttggataaagcaattgaggctttggaaaaatgggcaaaaataaa

SEQ ID NO: 80886 - DNA, 1283 bp, Heterodera glycines
atgattaccgaggcaatcatcaactccgaacaactgaaagagaagtccactcgtgcggtcatcgaaaaattgccggaggcgatggaccaacaggcagtggtggagcaatttgcagaacaatgcggtgtcaaagacaaattgtcgcccgacattcaccgccacccaaggacacggcctgaaggaggggtaaaaagggatcggattttaaaagtgccgttttttggacaaattttcacgtgacaaatttctctttaatttccgtaatgctgtgaaaaaattgcccaatgtgccccaacatatcaaagtccaaagggatatgacccaaagtgagctcaaaatcttatactcccttcggcaacaagcctatcaggccaatattgccgcaggtgagtataagtattttgtggttgacttggagatcagatctctgaaagacccccgcccgctcagaactcgctagggatacgcgagcaaatcaaacaaaaatattgggaatatgggaaagaaaaatccttggatttcttgcctattaataaacgtccgatcgataacaaataaaatagttgacatagaacttataacccaaaaatacgatccttttataattataataaatgagacctggttaaacttcagaaacacagtagaatcagaatttacagtaaataatcaatatcaaataatctttgcaagccgaaatgataaaaagggcggaggatcggcaattttattaaaatcaaacatcccttatcagacacttttctctgggacaaaattccaaagcgaaattattcacataaaattactttttaaaaaacctattcaaattataaatatatatcgtccaccaaattgtacattcagaatactaaaaaactactcaaattcatttctgaccagagcgattctgaaaataccatattctgtggtgattttaatatcccaaatatattgtgggatgaaaataaggtaaaaaaaataaaagatccggcgtctaattctctatttgagtttatgcaccaaagacaattgatacagcatgttaaggaaccaaccagagaaaaagcaattttagatttagtaattactagtgaattagaattaattaatgaattgacagttctagaaaatttttcaacttccgatcacaaaatggttggatttaaaataaaagtaaaattcagtcataaaaatcctaaaatttacagaagagattttaaaaatattaatttttcgaaattaagtcaggcgttacttgaaaatcgaattgatttatcaataaa

SEQ ID NO: 80887 - DNA, 1647 bp, Heterodera glycines
tcatacgtgtgcaaggggggggggggtcaggaaaagggtcgtgcgttcggcgatgaccccccctagtgggggtcagcgtcaaattttttgcggccgaccatttttgccccgttgaagacctcttttttttttgcttttcaatacttttttttgcggaggccttttgtcagcggccggccaattttttgcgcgaccattttttgcatttttcatgtcagtttttttgcgttgcacttttttcgaaaaacttttggggaacgggcggttgggtcaggcggtgccgataggcaccgccgagaaaatttttgaaattttgattgtgctttgttaacagattttcaccaaaaaatgacaacatttttgcgattttgggtcaacttttaagagaacttaggaatttttattgagatttaaaaaaataggcaagattttaggaattattcagatgtcgaacgcagaaaaattggaaaattttggccaaatttcttagggaaatagtcaattttcaagtctccacttttgcgttcgacaaatcgccctcatgtcagggttagtcgaacgcaatgcacgaccctttccttgatctcgccgctcccttttctctctttctcccttttttctttcccttttctctctttttttttctttcccttttttcctttctcccttttttcacgaccccccccctgacccgcccccttgcacagctatggtcacagtttcactttaggtccaattatctgttcaatgacaaaattgcaaacattgagaaatgtgatgcacttttattggttggtactaaccctcgttacgaagcacctgtgctcaacgcccgaattcgcaaaacgtaagtgtggaaaatgcctcaaaatataagactggtaaaaaacggattaaattaatttaaaactcttgtccaatgtttgcagacgcatattttcttataagttaattttgttagacaatttcttaaactatgtttgcctgtttacatatgcgaggatgttttacaaactcattgggagacttcgtaccatgggaaaaaatgtaaattcgagtacttgccctaatataatttttttttaattgctttgaaaatatgtatttttcctttccttcctctctttcagatatttgtattcggacattgaaattggccttatcggtgcgaatgtcgacctcacttatgactacacttatttggggcccaattcttccgttttggacgatcttttaaatggaaagtcgtcattttcaaaggtttttttcttcccccattattttcacggtcagtgtcaaataagaaattggaaaatgcgaaacatccgatgattgtcgtcggagcacaagcatttcaaggcgaaaactcctcgtccctccttcaaaaacttcatcaattggccgaaaaactccgttcaacttcacagacgaaacaaaacaccaagggtttggggggaggtgaagccatgggcaacgccgtatttactacaaacattcaggcaacggacagccgaaagtgctcaatttgcttcatgagttcgctggccacgtggctgcgtttgaccttggcttccgtcccttcaatgaattaaattcggaagtgaagagatccatcaaattgctttatctgctcggttctgatgaaaa

SEQ ID NO: 80888 - DNA, 646 bp, Heterodera glycines
aatctattttttcaagtgtccgtttggggtactcaaacaattatggggagcaaaaatccaacgcagaattaaagtacaggctatagggaagctattcccgaaggattcggtctccccataaatctgggcgcatcggttcggggggactgccccgaaaacaaaaataaatcgattttttcaagtgtccgtttggggtactcaaacaattatggggagcaaaaatccaacgcagaattaaagtacagactatagggaagctattcccgaaggattcggtctccccataaatctgggcgcatcggttcagggggactgccccgaaaacccaaaaaaaaattttttggataaaaattatttaaatgaactgactagataatatttaaaataggttatttctcttcctttcagtatccctgcaaagtttggtgcgcttctgatcagtttctgaaaaaaaagttaagcctaaactttttggcctgtttaaaaaggaattaaaaatttttaaaaattttattcatctccctttttgatagaaaaagcatcagagtgcctaaactaacatgtaaataaaatttggtgcgtttcagagcattttctggaaaaaatatttatgaattaattatgcaaaaaataaacaaataatgaa

SEQ ID NO: 80889 - DNA, 1450 bp, Heterodera glycines
atgcattttactgcaatagttgatgctttttcaacaaattctcaatgctggccaagtcccgaccgtagtcttcagaggcgagcagtgtttcgacctgaaaaaatgaaaattgtataaaaaatgtttaatacattggtaatatcaaaaaacaatttaagagatagaaaaattagtaataaaaaagtaaaaaaaattaactaattaaaaaataaaataaaaaagtttttatcatttttatcaaaaatgattttaaaaaaaaatcgcatcattcaaattgatgtttttaaatagtcaaaaaatatcactaaatctcggaattcagtttaaaaaaatattcaaaatccttaaattcttaaatttaattgatttatttgcggcaaaaactaatttgaccgctagtttcttaaaattcttcagaaaatttgtaattttatggcgtagtgtcacttagattttcataatttttttttgaacttttgcagttaatagagaacatttagggctatcgaataataccaagaaattaaaaatttggctgctttagagcaaagttataagtagggataacatttatagttgctaaaaactgccaaaataattaatttttagtttctaaaaaaccccaaaatagttgctaaaaatgggtaaatagttgctaaaaacttcaaatttatgggggtgtaaaatcgtaaaattttaccaaaaaaggcaacaaaattaattcgaaccagtattgagataaataatttttaaaatcacaaattcatgtcaaaaaataaataaataatttggagatgaatttttgagaaatttttcatttcataggggtgcatttttgaaaaaaaatttgagtccattcttaagcgtttatttttgaaaattttcaaaaagttgatccttaggggtgtattttttctttttattgcatttttgttaacaaattttgggcataacgccaaaatagttgaaaatagtttttttcaaaaattttatagtttttttagttgctaaaaataaaactgcgactgcgaagtttaattttattatatttttaacatttttgaaagggattttgaaaaacttgacagctgtgaaagtgattacagataaaaaatgtacagcgataccagtgaacagtattgagaacacaggctaaaaaatatcaaattttcagtatacaaactgcaaagacgaagccaaaggaaattaaagcgattgataaaataattgctaataactcgaaaagtagcttaacgacagccgaaaaaaacatgtttttcgtgcatttcaggctacggggagctcaggaaaaaaatagtgaaaaaattataaatgttatccctagttataagcaaaatttttataaattttgtgaattattataaaaatcaaggcattttcgtttttaacattaatgtcaacaaaacgagaaaaaattgaataatattta

SEQ ID NO: 80890 - DNA, 930 bp, Heterodera glycines
atggaacgcacattcatctgtttgaggcccacaaatccgtcgccggttggacgagtgattgcccgctttgagtctaatggactcaaattgatcgccatgaaaatggttaaaaatttaggattttttaaaaatataaattatattttttttcagtatttaaattaattaaatctttttaactttttttaaattatttaaattaaatttttagattaacgctacacgaaatcaagcgactgagcattacaaagagtacagagacagaccgtttttcaacaaactgatcaactacatcacgtcagggccagttgtggccatggtctgggaaggtgattaaattggaattttttttttaaatttaacctattgggtcaaacaattttattaaatctaattcaaatggaaaaaatatcataaaaaaataaaattattaaaaaaacaaaacaatattttcataaatctaatggttgccaaataaaaatttgtcagcatataatttttcgtgttaattaaaaagtaatttaaaaaattagtaggacacatcatttcaaaatttaattcaaatggcaaaaattaaaaattaaatcacaaaaacaattagaataaacttgcattaaaaatttaatataatggttgcaaaataaacaattttcattatttatttctcatattaattaggaattaatttaaaaattaaggaattgactcagtcaagaaaagtctgcatctgctggagtcggcatgtttctacaatttgagggtgaatttgatttaaaaaattagaaaaatttttttattttattattttagaatatggatgagtgccgtgacattgtgcgccatggttcgtgcaatgtgcaggacgcacaacgcaaaatcaacatttggttctcaccaaatgagttgcgcattaattccacaagcagataa

SEQ ID NO: 80891 - DNA, 320 bp, Heterodera glycines
cggagtaggacaaaacgtcgtcagccgaaacgtcgtcgaacgaatttttcgaccataacttttttctttctcaaccaaattaaccattcttggtattattcgaaagcattcgaaaaatgctattagcctgcaaattttcaaaaatttttatttatgcacaaaaaaatcagagcaaaaaaagttcgaattactgggtttttgagttccttctggccataacttttttgaaacttaaccaaaatttttgagattttgcaaattaataataaacacatagagctatcgaacaacaccagcaattcttaatttgattgacagtg

SEQ ID NO: 80892 - DNA, 1130 bp, Heterodera glycines
atggccgaattggcagcgaaaaatttgatggcggcgaaaggggcgacggaaagcgcaagacgaagcaacggcggaacgaatgcgaacggtgtggtgggcgcggggggcggctcaaaaaagaaacggcgccatcgcaccattttcacacaggcgcaaattggtaaggaaaacaggcgaaaatggcacaaaatgaaaagaaatgcaaatgccaaaaagtcaaaaagcaaatccaatcagtaaatcattcattgctttgttattttctgaatcaaattctgcattgattcatcgaaataatttcatggcacttttgagatgagttggaatcggtgttcgaaaaggcccactatccggatgttgtgcaaagggaggaattggcaaacaaaacgcaattggcagaagatcgaattcaagtaaagtgaagtcaaaagaggaaagagcacaaagatgggcctaaattaaggtgtggttccaaaacagaagagcaaaatggtaaaaaatagtgaaaaattaattaaatttcttttaaattaaggcgaaaaacggaaaaaacgtggggaaaaagcacaattatggccgagtaagtgagaaaaagaaggcaaaacgaattgagccacccaaaagatacggattatacggggcgatggtccgccaccaattgccattgcccgacaccatcacgaaatgtgttggcaatccggacgacccccaagaatcagccgctccctggcttttgggtacgttcactgctcctccatcgcaaatggcattttcctatgccaaaacattttgaaggaatgcataagaagagtatggaggctgccgttcaatttgatcagatcggagaccaccaggacattgatgagatgggggaggaactgaaggcgatggtcgtgggaggggtggggacgaagtgcggcgcgggggcactgatggaattctcggaggacgagaaattcccgaaggaagagcagcgcaattgcagtggccaagggcacgagaagaagcggagaccgcacgggaaatacggcggcaagggaatgccaacggcgaacaacgacagcacattggaaacgcaattggggggcggcgacagtcgccaatacatttttggaattagcggacaataa

SEQ ID NO: 80893 - DNA, 269 bp, Heterodera glycines
atggctctctgcgtggcgatttatgataagcatgtgagtgagtgtttgtttatttgttcgattaccattaattgctcccaactttctctttttaggatgccctcctctatttacgcctcaaagatcgaatgtccgcttctcccttggaagtccaacgtttcctgcacagttcgtgtgacattgttgcggacaaaatgaactcccctggtaacaaggccacccaacaggaaaattttctcggtgcacttcttttgagtgatcgctttcgg

SEQ ID NO: 80894 - DNA, 624 bp, Heterodera glycines
atgtcaaaacccggtggaattgtacgcatcaaaaatgtcagtgatttcgtcgagccaagtcaggttagctgcaattttgtaatgttttgaccggaacaattcaaaaaaaaaccctgaaatttcatttgaagcggattattaaatatcaaatttcgaatctgaccatgagaaagtcgctgacattatattcgtttagaaatgcattcttccacttcgtcaaaacggggaaggccaaaaggctgtggtcggcaagcgattggtcggaatccatgccaaatccgtcccctccgccgcgacggccaaaagggtcaaagtgacgctggacgactgtttggtgtgcagcggttgtgtcaccacgggggaagtcgaattcttctgaccttccatttttttgtttttcttttcatggtaaaaaaatgtgaaaattttattatgcagaattgtatttgtttaatagtaataataattaaatcgtgattcgatcatttccatttgaaagtttgatttggtacgttcagccaacattttacttttcttcactccgaaggccacacaattcgcacgtcgcgctgtgttaagagaaatttatggtggttttaaagtttaaacattcctctaaaacaa

SEQ ID NO: 80895 - DNA, 398 bp, Heterodera glycines
ttatctgacaacaccggtacgaagttccttttggtcatcgatgcggaggagggcactctcaaagatcacgaaattcggctctttttcaaaaacattcacacaaaatattgcagcgccatttcaaatccgttttattcgtttggaagtactttgcaatccaggtgatcatctccttttgcaatgtcactgctattttggagggcggaaattgaattggaattgtttcgccttcccccccccccatctcctaatcgtttttcaaattagaattccctcttttagtaaaatagatgccgtggttaacgaactgcttgcatccttttgactgttcagaaaagcagtaattgatcacagaaaagagaactattgcaaataaatataaattattttcttttgag

SEQ ID NO: 80896 - DNA, 1691 bp, Heterodera glycines
atgggatgtatggaaatgcacttttgtcgcgttgactcgcacattgaatgcctgtacaacggcggtgcaatccttcggatgtgcgacgaatgcaatggcgagcagttgtgcaacgcgaaggagggggccaagcttgcgcaccattccccctcgcttgccgcctttttgcgtgaccgattgcagcccgtagttggacaacaacaatggctgcagcagcagcaagctgctcatggcatacatcaggctgctgcgaatgcgatgcaataccaacgcgtacacccggcgcccaaggctgcagcggcagttgctgcattttttccacctcatgcaggctcagttcagcagttgcaaccacctgcagctggtggttcagtgcttacgcagcaacctgcagcagcgcatgccttaagccaagcacaagcagtgcagaagcagcagcatgcaaatggtggtgcaaaaggattgcaacatcctgcacatggttcaaacattttgctgcattctgcaagtggctcaaagcatttgcggccgcgtctaagatgcttcgtgggcagtgaaggtcaattgcaattggtcacatgcagccaaagcgagctgtgcacgagcagtttatgcgatactggtaggaaaaaatttttttattaaaaaaatgaataaaaatcccaattattatgcaattttatcatgaaattttttatttttgcaatataaataataatttttttattttaaaaataaaataatttaaaagttaaaaaaaactattttaaaaattaacaaatattttttcagttacatgcaaaactaccttcaaaaaatgtgcaatttttttacatttatatttgcatattctttgacattgttcggttgccaaaaatttggcacttttacattagcataattttttatttacaaaattagtagatggcgaattgacggaggtgaagttctgtggcgtgccacagttttgcacaatgacaaacgatttgtgcaaacgatttaaccgtggcatttcgttgaactgttcgcagtgcgacaccgattcgtgcaatgggaacagcgcgttcgcactggcatcattggtcaaccacacttttcgggatatcatggccgcaaaaatcaacactttgacagcactgaatggcacaaaagtgtcaaagaagacggaggacgataagaaaagcaacgacacaacgccaaatgtttgtgtttaactagagccagaactttgagaatatccggaacagggcccaggtttgcgagtcagaatccggacagaatttcggttaaaaaaagttattttaacaggacttcgggtcatgttgcatttttgaaaaaaaaaataccggacccggtctagggcccaaaatcttgtacaaaattctttccttccatataaaaaaaattaaaagaaaatttaggaaaccaagatgaatgccagacagaaaaaaaaggaggaggaagaaataaaaaagaaatttgaagagatcaagaagagagaggaggaagagttaaaaaagaggaaggcagagaaagagaggaaggcaaaagagaaagaagaagcggagaagaaggagaaagaggaaaagaaggaagagaaaaagaacagagagaaagtgaaaggaaatgaaaaggacaaaaaggagggagagaaaagagcagaagaaccttgtagagaatcggtgttacaa

SEQ ID NO: 80897 - DNA, 811 bp, Heterodera glycines
atgcctcgcttctgtttgttcggcgactcggtgaacaccgcgtctcggatggaaacttcttcttccggtctgtttcaaaaataagaattttttttaaataaattcttttttaatttcagctaacaaaattcacagttccaaggaaacgcgcaatttgttgctcgaaaattctaattgcggttatataattgaaagcagaggagaaatgatcattaaggtgagaaccagccgaagaaaaaacatttgttttggtcattaatttaattggcatggtaatgaatggatttttagaagcctttgatatgaattaagggctttataaagagttccaaggtttttttcatcttttatttcgcgaggcgaccaaaatgaaaaaacttttataaaaattgctctatttttcaacaaaaaagtaagagagagattgttcgtcctggcgattgagccaaaattaaattttgtattgattaatgaaattcttttttatttttttttgaaatacttttatttatttatttttatttggggaaaaggtgtaatggaaactttttggttgttggacaattcagaaaatggtggtggcacaatggccataaattagaagacaaaaggcaatgggaaaagacaacaaatgggaagagaacaaggaatgatggcaaattaatgccaaaacggcaccaaattatcagcagagttggataggcaaggacaacaaaatccatttgaagcaattcatgttaagccccaaaacacaaaacaaagcacatgaaaaataatttaatttttaaattttctaaacccctaaaataaa

SEQ ID NO: 80898 - DNA, 1794 bp, Heterodera glycines
ttctcgcccaacctctctggaccaatttacgaggaaatttaaaaaattcaaaatgccttaattatatgaaatgttttgtttaatttcagcttggtgttggtcaacgctgtctatttcaagggcaattgggcggagcgattcaacgcaaaatataccaagaagaagacattttttgtggaccaacagaacaaaaaagaggtggcgcaaaaaaacgattggaaagactcatcccaatcttagaaattaagtctttcaaaattttacaaaatttggcttaaaaatttgacaattttgtacagcgaattcaccaaaaattcagagaaaatttgcacggcggcggctcggcaaactccaaatgctttaaatgaattaaaacgaaaccaaaaattttttgaaacttgaacacataaaaccgtaaaatttgtaaacactcaaatggattaaaaaatgaattattttattttttttcagttggaaatgatgcacaagacagctgatttcatttattttgaggatggccatgttggtggtgtttgccgttttccattgtccccttttctttaaattgtgtcccttccttaatttgaacagctccaactgctcggcatgccctacaaaggtggtgaagtgttcatgtttgtgctgttgccgaaggatcgctttgggttggctaaactgttggccaatttggacgggaaaaggctgctggaattgaccaaaaagcgggacaaaatgaaagtgcaggtaaaattatgcgccaaatgtgtgcttggcgttatgtttgatcatttatttcgcaaaaatctatcattttatgccattcatccccccgtcttttcaggttgtgttgccaaagttcaagttggagtccacgctccaattggaacaatcgttggccagcatgggaatggcgaacgctttctccgacagtgccgattttgacggcattgccgagggcgattcgttgaagatcagcgacgttgtgcagaaagcattcattgaggtgaagtgaatgcccaaaaatgaggtcatgcccggtggggggagctgctctatttccgagctgatgaaactaaaatattattattatctttcactaacacgaaacgaaatataaatttagaattaatttttaaatccgaaatgaaacgaatttggcacatacccctgtttacgaggggagggtacgtgcggcaacacatccgccggtgttcagcgggggttgaaaccgcggacaatccatccgtcagtggaataattatttggaaaaatgatggtttataaattttttattaattaaaattttttccattttggcttttctgttaaaacattattcaaactttcatcttttctttgcttcttttcacttgcttttataactttatttatgtttactgcttaatttgtccttaaatttccctgcatttccaatgcttttccttttgtctctctgtgctaaattttgcttagtttatccactaatttctgtcttcgctttgctattgccttgccttctcttccttttactgaattttttccctgcaatgcctctgctgttaatcatatttatagcactatcagtgtcatttagtaattactctgtccattcattcatttgttaggtcaatgagcagggaactgaagcgaccgccgccacgggcattcgattggtgccattaataaatgccaaaaatagcccggctcgtttcattgcggatcgtcctttcttcgccgttgtcgttaacagtgatgcccttgccctttttggcacaattttccatggataatttg

SEQ ID NO: 80899 - DNA, 324 bp, Heterodera glycines
gtatccaatggcttcacttcgttctcacttaaaaaatcaccatcaaccaaaattgaaagaattggaagaaaaagataaggctgcagaaagcctcaaaaataatgaagcgaacccgagacaaccgacgttaaaacgaatttttgcgacttcaagtccagtgattaaaaaaatagcgagggctgaatctgctacctcgtcgcaattaaccatcgaaaaaaccttttgtaggaatttaattttaaatgaatttacataacattttcagctcaatggacacccgacggagaaatgactaagaaaattgacaaggcaattaacgatttg

SEQ ID NO: 80900 - DNA, 101 bp, Heterodera glycines
atgatcaccgcgctcgcatttgtgccaattcagcatttgactgctgcaattactgcgctgaacgatgtcgtgggacaagccctcgagggaattttgggatg

SEQ ID NO: 80901 - DNA, 289 bp, Heterodera glycines
atcggcaaattgctcttagcctatcgcattatgatgattcaacggtaaatgacgcacaaattgcggaagccatgggtaaagcgtggcaggagcaagcggatgccgaattagctagacgattggctgatcaactatagtgtaataataatttgggcagacaatttttaatgactaacaataacaagttatccaaattaataattaattaagaattaagaaaaaaagccaaaataataattaaatgctcggtcaataagcagtcaaaaagatagatcagaacgaaaataaa

SEQ ID NO: 80902 - DNA, 630 bp, Heterodera glycines
atggagatcaaaatggcaaaaaatagtaagtttctgcgaaaacggctaaacattttgtaaaatacaccccccataattcgggatttaaaaaaatgaaaaatacacccttaaaaattgactgataaccaaaaatacacacctaaaaatcgaatttttaacttcagcccccaccccccccccccccccccccgaagcaagggcctggctaatgtgctttaatttgttattggcatttttttttgaatttatttatgtattaatttgctttaatttgttattggcatttttttttgaatttatttatgtattaatataacttcgcaatttggcaatttttcagcaggaattgatgcttgtccttgttttatttcatctaaacagattgggcattcatcatttgttgctgttttatgtttcgttggagcggtgacaacggcattttttaattttttccatatctttggagccgtgccagcggtatgaataaatattattatgatgcatagaataattaatgaatggcaaatagacatcgtgaacaaattgttaaatataattaaaatgacaattttgggcaaaaaaatggttcaaaaaatgcaaattgaaaaatggacaaatcgaagctctata

SEQ ID NO: 80903 - DNA, 382 bp, Heterodera glycines
atggctgccattgctgcccataaaaagccgtggagaaagcttgttgcgactgccctgcacgagggaatccattgtggtgcagtttacctgggtggttgttccaagcgagataatatctgccgagcgatggccaaggcctacgggaaaaaagtgacgccacaatttgacgctctgagaaagattgtggagaaggcgtttccttttgtcaagccccatctggacgtatacgaatgtaaaagaaaaatactaaataccatttacaaagagattgtttatagaggagctcctccggcgacaacggcagttgtgtggtggtggtaggtgttggttgtgaaatgggggtaggtgttggttgtggaaattttaagagaacaacaacaaa

SEQ ID NO: 80904 - DNA, 1131 bp, Heterodera glycines
atgcctccaccgtcacttgcgccacgaagaacatcaagccgtctcagccatacaccatctctattttcaacgcccgtctcttcgagaccatcctttcttccaataacgtcccaatgtgcatcacggcattcttcacattttggatatggttgcggggccaaaagtgcaagacatcttccagaatattacgattccttgaaaaatgtatttaaatatatttaattttgttaaaaaaataatttaggaacaaatcagttgtccaaagtgtaatgcgctattgttaccgtcagaagccaaagggccaactgcattctcaaagtgttgtgcaaaaggacgtgtgtctctcatggagcgcttcaacgatctgcaaaaaaggccttcaagcattatggcactttttaacaacaacgacacaacaaacattcgttggcattcccatctcacgcaacattcaatggcatacaacgacagccttgcatttggttgtgtgcggattcagcgagatccaaaactgcaaaattccttccggatcgtaaagtgcaacaacatgattcgttacgttctctgggacttcaatgcgccaaaggacgatctacctcaattgcacggtcaactttttacaattccgccagaacatgcacgtctacgcttggatgaaattgcaaaagaaaagcatcttgatgtaaacttattaaaaaatacgacaatgaaaaaggcttttaggaaaacctgcttaactatctgcatgctgttttgcgtgagcatcatccttacaggaagatttatttgacagctgcgcaaacatttaaagcactcaatgaggatgaaaaagtgaatttcaaaatgttggttgttgacacgaacaaaaagggcgaggaacgatgtgtcaagaccaattgccaaaatgatgatcaactttgctcacaagaacgacaaatttccgaaattcatcctggtcgaattaatgtcgaaactgtcgcaggcagtaagctggtcgcacaggtaaaaatattttttaattaaaaaataaaataattgtagtttttccttgactcgggagcaaacgtgccaccatcccatgaatacgacattattttacgaggaaaacacggaactggtcaacacatttga

SEQ ID NO: 80905 - DNA, 1837 bp, Heterodera glycines
atataaatgcaaggaattggaaagtgaaactgtcccagtttgggcgccgatattcaaatcaaaactgtcggaaaagcatttagtgtaccttggtagaaagctgtcgttggactcgtcccaaatgggccaagtcggcctttggtttggcaacgatcgaatggccaatgaaagcgaattgtcgcatagactgcgcattctgagcacaaacagcgaatttgacaagttgaaagcggtcaaaacattcatggaactctttttgatgcaaaactcacacattggcattttggtggtgcgtcatccgctgacattttcggcaggtgaatgaatggatgggtagtggacggatgccgatttgcgatttggaacttttttaaggcattggaattccaattttttggggaaggggggggggggttcggattacgggtgaaggggtgctattgcgttgattaaaaaccataattgcttataccttttgaagcttaatgaaatattttaaaagttataggctaatagagaatatttagtgctattgaatgatattaaaataaaataagttactttagatcaaagttagcaaaatttttatgtgataattttttaaaatacgccctttataatatgttggacccgcccccccccccccattctctttgtcagtggttaccgtaattactgagaccaaggagtaacaaattcatgagggagtagtaaaccgataagtacggtatttggttccatctcctaagggattaaaagattaactggaattttgtttttttaaattcggctcatgcgaccctattaaaaataatattgtaaaattcattataatccacagaagtaatgcgtgaaaatgaattgtttatatcggtcagcaatctgttggaagcaaatatgaacacttcttcaaatgccgttcgatggctcgaattttattttattttcggaaaaactttctcttatttcaaacaaatttataatgatgaagttttaaagacgaaaattcaaaatctgtgggaatttttcaccaaagttttgaaaaaagtgcaggaggaacagcaaacattatcagtgaacgaaatgacaaattcaatctttcaaattttatcgcaattagaaaacaattttggcacaagaaaattggggcaaaagagtgaagatttgttcaaaaaatatgcacaacatttgtcggcattttacaaagaaaatgaatcatttcgcaaaaaatttgacagaaataaattgggaagagaaaacataaaaaagatttttcaacttattgaccaaagtcaacgaataatgccacgcaaattttgggaacttttcgataatgcaaagaacgaattccacgctaaaagctcgtcctatttggcatgtccaagtggatcagaaatttgggagaagcctacaaattcatcagaagattcttccgagtgtaattataactagggatagtatttttaggttttagcctattttttccctgagctccctatgatctgaaaggcacgaaaaaaaacctttttttggttgttgttaacctacttttcaagttattagcaactattttatttttataatttttagaacctaaaaaactaaaaatatttggacctattttgaggtttgcccaaaaatttattaccaaaaatgcaacaaaaacgaaaaataacacccctaagaatcgaccacaaaaatttcagaaaaatacacccttaagaaatgaaaaattttctcaaaaattcatctccaaaatttattattcctttttaggaatttttcgtttaaaaattatgtatctcaatacggggttggcttaatttgttgctattga

SEQ ID NO: 80906 - DNA, 1924 bp, Heterodera glycines
  unsure (1)..(1924): unsure at all n locations
atgttccccgatgacgatggctacgaatcggaagatgatgaaattctcttgccacctccgccgatccccccgcaacttggccaccctccgccaaatgtgccggtaatttcggtttcgcttttcgttgctttttctcaaatttccgagtgcttttttcaggcagttcgtgttcagccaatgcatgttgggcagcagcggctgccgctgagagacttgccacaattcgaggaccatccgcaaaatgtgccagtaattttgggtcgattttcgctgcgtttttctcaaatttctgcgtgctttttttcaggtaattcgtgtccaaccgatgcctcaaccattgccgctgagagacctgccgcaaattttccaccctccaccaaatgtgccggtaattctgggtctttctttcgattgctttttctcaattcccgagtgcatttttcaggcaattcgtgttcaaccaatgcagcaacccgtagcaatgagagccgtgccacaattcttccaccctccgccaaatgcgccggtaatcttgagtctcgttttcggttgctttttcataatcccgagtgcattgtttttcaggaaattggtgtgggaccaattcatgatgggcaacaaccactaccactaagagcgttgccacaattcgcccaacctccaccaanatgtgccggtaattttggctcgtttttttgttactttttttaattcccgaatgctttttttcaggccgttcgggtccaaccagttcaacaaccgataccactgaaagacgtgccgctatttgtcaacccaccaccaaatgtgccggtaattttggctcgcttttgttacttttttttcaagatcccgaatgcattttttcaggtaattcgtgtccaaccgatgcctcaaccgttgccgctgagagacatgccgcaaattcaccatccaccgcgaaatgtgacttcaatttggatcaaattgtggttgctttttctcagtctctgggtgtttcttcagggaattcatgttcgacaaattcaacgggaatacgccgtaccgcaatttgcccatccgccgccaaacttaccgtatcatccaccagaaaacgttccggtagttgggtcttgtttttcgtgcgtttctcatattttcggatgcttattcaggtaatccaaccacggcaacgaccgcgccagctgagagatgtgccactattcgaccacccactgccaaacggacaggtaatttcagaccctgtcttttacctaacaccgaaacatcttttcttaagcaaatgtatgccaaccccccgagagtgctggaagtgatccgacggctgggcgagtggagaggaagaccaagggacccaagacgtccgcctcaatgaatgaatggaatttggattttgataaaatttgttgttttaattttttgaattgataagggttaaatcccgttacctaaattgtttgaaaattattaaaattttaagaaattagatgctaaacctaacctttgacaaagattatgaaaaaatgaaaagaaatgacgaaatttttggaatgttccttctttttattatctatggattttttttcatgtgcattattttggtgctagtaagatattgtcgaatgaattaattggtttttttcccttcattttaaaaaatttcacgtccccatgccctgcccacttcccgcggaattgatcaaggaaataattgacgctctcccccctccaaaaacacatcggcttttgcgcgtaaattttgttttggcatactttgttaagtgtcggttttattccatgatgagaagattgtttcgcccagagcatatatcaataccaatggcccgaagaactggaatttatttctttttcgatgtttatactccccctatttattttccactctaccaataataacatttaa

SEQ ID NO: 80907 - DNA, 505 bp, Heterodera glycines
atgtcttctgtgagcaaatttatcaccaacaaagggccctttattgctgttggaatgggtgtggttggaatgggctattttggctactacaaattttggcgttcggtacgttctccaattcctttttggattccaattgttactgccgttttcacttaatgattacttaatttttaagtcgcgtgagattgctatgtcttacaaacaagaagacgaatcggatggatacacagtgaaacgcattgaggaggcatacaaaactcttcaggaggcaaaggattgtaaatccctgttgaaaaagcactttactgctgatgtgaaagacaaattgaagtacaagaagacgaaattgggtgcctctctcttcgacgtcatcagatcgggttaaattattaatttttattcccgggctcctattgcagttcacacgaccataaaaaaagacacgaccataaaatttttttgcaagtttagtgaaccataactttttcaagaagcatccaaa

SEQ ID NO: 80908 - DNA, 1986 bp, Heterodera glycines
gttccgtcgcttcaattgatttggacacattttttgaggtcgatcgcatctgctcatggattttgtcaaacaaatttcaaaggacggctttacaactgcccgatgaacttctcgaacattcattccatctcgtagaagcggttgaacgtagggtggaatcggcaggaacttgggaagaacagagggggaggctgtatgtgttggccgacacgtcctatcgaaggtgggacaaatcaccggcaaccgtggcgaatggttcaggactttagttgtcagaaatttgtgtgccttgttattatattcccaaaatcagttgttgtctggatgagattgcggctgaacatgtcgcgtgcgactccatcgttcactttggagacgcgtgtctaagtgcccgcagcagttccattcccgcgctatacattttctgcaggttggaaattaagattgaaactaacaaaaaaagttacaggcacccattcgaattggaaaaattcgtcgagcagtttcgaattgaattttctgaatttggaactgaaaaacagtgggatgactgtttactgttatgtgaagccgcctatacacacattcaaagtcatccattcagagaaagattttataaaaaacataatttaaatgaacaataaattaaatttgagattcacttggaagtgccatttctcgcattcttccgccgtctgttcgtctgttcaattttgaagtgtcggagccaaattcgccctcttcctccattctcgggcgccaggtgccggtcggattcgtcatcgatcagtgttctgagaaaaagcggcattgttttttgctttttgttggatctactgacagtcctttattgcccatcgcgcatatgacatttcgacacattgaaaaggtaaatgatcgtttttggttgttcttcatttaacaatagcaatctttgaacatgttctggttcttttggaaaaagctgattattaatttaagaccattgtctacacccccgaaacaggccaattcaatgcttcagagtgagtttctttgcccgcttttttcttagatttggattagcttcaatttgtcatttttgtttgcaactctgtcttccatttctgataaaagccaaactgtttttccagcactctgaccaatcggatgttattgcggcgattgtatttgatagagcgactacgcgacgcgcgtacggttggcttggtggttggagcggtggcattacgcgggtgccgtgaggcggtggcccgagtgcgcaaactttgcgaaatggccgggaagaaactgtacgtcatgtacataggaaaggtggggagcaagggtttaaacacttggtattttaaattgcgcagctgaacgaggcgaaattgtccaactttggcattgatgtggaggtgtttgtgttgctcagttgtccctttggcattatcctagacggcaccaaattttgtcgacccattctcagtgtgtttgaggccgaaatggcgttggacccggcacaaagtaattggctggccgaaatgcgatggacatcggacattgaacggatttctatgggtaagtttaggacgaaataaaatattttaatgaaaaatatagtcgacattagctgttgtaacaaaagcaagaaagagggcaccgatgaagatgtcggattaatgagtttaacatcgggcaacattcgccgttgctacggtcctacgaatgccgatgaggaaaaaaacaatggcattggaccaacaacgggtggcacttctaacaccaaacaagtgatggaatataccgcaggtgtttagactcatttttgtatttatttgcaaaaaaattctaggtgatcatttcgcaatgcgttcttggcatggactcgaggacaatagtggcaacaacttttgcatttctgctgatggcgtgacagaacgacaatgcccatgcgaactgaagcaaggaatggatgggattgccacgcgatatgccaatgaa

SEQ ID NO: 80909 - DNA, 614 bp, Heterodera glycines
atgcgcggattggccgttttcatcagcgacattcgaaattgcaaaagcaaagaggcggaattgaagcgcatcaacaaggaattagccaacatccgatcgaaattcaaaggtatttagaaacattcaattttgataatttataatttagtccatcaatgtccaaaaatattgtttttaggtgacaaaactttggacggctaccaaaagaagaaatacgtgtgcaaattgctattcatctttctgctaggccatgacatcgattttggccacatggaagcggtcaatttgctgtcctccaacaaatacacggaaaaacaaattgcaagtttccccatccaataaatattgcgatgatttatacgaaatttcgtcaaaaatttctggaaatttcactcaacgtctttgcaactttacagggttatttgttcatttccgtgctgatcaatcttaattccgacttgatgaaactgatcatccaatccatcaaaaatgacttacaatcgcgtaaccccgtccacgtcaatttggcactccaatgcatcgccaatattggctcccgcgacatgtgcgaagcgttcgcccacgacttgcccaaactgttgacttctgggtaa

SEQ ID NO: 80910 - DNA, 1599 bp, Heterodera glycines
atggcgcaacggcttgcaaaaattgttgatgattttttacccgaagacattgatcgggcgaatggacggctaatcatttcagtgacgaaacagagagtgagtggatttggtcccttttcggcctcggatttgttatctccaatgatttaattagtatagccaacattttaggactggtcaaatcgtctgatttcagaatatccgagcagggaataccttctgcagtgcctcaatgccacctgttatgtccccttatattcgagcagtactcctcccgcaatcgatggcgaagtattgttaattaattacgctcataattcaattcaacttttgcaagcgctacattgacggggtttattccaacaatttgcctgtccccgatattccaaatgttcacaccattacgatcagtccgttcagcggaggagcaatgatcgcgccacgtgaccaaagcgctttcgactggcagatgataatgggacagcagagaataaatgtgaatttgaggcttttaattgtaattgattttaaagttaacgggtccgggcttttatgttacgcaattggctctattgcagtttacccgaccctaaacttaaaatataatataaaaaaatttatatttataattttggatatggttagtaatttattgtgctttttcaatggtcatgaaatttcccaggtaaacatcagaaatgtcatgcgcggtgcacagtcacttttcccacaatcattggaaagactcggccggctttaccgagcggggtattacgacgcaatgctttaccttctccgcaagggctgtttcgaaagagaagttggaagtgaaatttgattctattttttgtattttctggtgtttaattgagagaacattgttagctcaaatgttacatatttttcaactattgttcattcaaatggttatttattaatttctcgacaataatggatgtttgtttgtctcttatagtaccaacatttcaataacattactcactccgtttcttcgaaattctttcctaaggacgccttttgcttcggtaagttttcatctgtcgaatggctaatgttttgttgagttcagattgttattttgaccatgggcatcaaggatttgtcaaaggtcattgcggatcattcgccgttcgccattaaaaccaacgaaatgaaagcgtatttcggacggcgcatcgcaatcgacgcgtcgatgagtctttaccagtttttgatagcaattcggcaggatggtgctcaattgacaacggaggagggagaaactacgaggttttacggaaaaatgccattgttagtgccacaattacatcgactttagtcatctcaatggcattttttaccgcaccatacgaatgatggacaacggaattcggcccatttatgtcttcgatgggaaaccaccggagcttaaggtcaaccattgagcaaacgttttgccatttcgtgttttcagtcaatcgaattggacaagcgaatggaacggagggcggaggcggagaagcagcacttggaggccacagagaggggcgacaaggcggacattgaccggtttggacgtcggctggtcaaagtacaaca

SEQ ID NO: 80911 - DNA, 137 bp, Heterodera glycines
ttctttccaatttcatcactttttctttcccaatgtaattgtaatatcatccttttaatattataatttagcgattgaattcaataccccttcaatttggctatcatgcaaatcttcgtcaaaactctcaccgggaa

SEQ ID NO: 80912 - DNA, 367 bp, Heterodera glycines
atggcacactccacggaaaggttaatttgacaaatgggggggggggggtaattagactcaacaaattgagaccgatggccgttcagcagaggatttaaaatggagtaagggagggaattgtgtcatatttcagcacagattggtcggcatatgaaagaaaacaatgggcaatgaaagacaaaagagaggaggacaatggaaatgccggtcaattggaaggataatcattaaaaaagaaattgctaaaaatatatatttatgtgcaattgtggtattcatccattttagttgcaaagttttgcattcgataaaaaagcacgcaatcgcgtgacttggaaacttagcgaattaaaagacattgaataaa

SEQ ID NO: 80913 - DNA, 963 bp, Heterodera glycines
atgacccaaagtgagctcaaaatcttatactcccttcggcaacaagcctatcaggccaatattgccgcaggtgagtataagtattttgtggttgacttggagatcagatctctgaaagacccccgcccgctcagaactcgctagggatacgcgagcaaatcaaacaaaaacattgggaatacgggaaagaaaaatccttggatttattgcctattaataaacgcccgatcgataacaaataaaatagctgacttagaacatataacccaaaaatacgatccttttataatcataataaatgagacctggttaaactccagaaacacagtagaatcagaatttacaataaataatcaatatcaaataatctttgcaagccgaaatgataaaaagggcggaggatcggcaattttattaaaatcaaacatcccttatcagacacttttctctgggacaaaattccaaagcgaaattattcacataaaattactttttaaaaaacctattcaaattataaatgtatatcgtccaccaaattgtacagttcagaatactaaaaagctactcaaattcatttcggaccaaagcgattctgaaaataccatattctgtggtgattttaatatcccaaatatattatgggatgaaaataaagtaaaaaaaataaatgatccggcgtctaattctctaattgagtttatgcaccaaagacaattgatacagcatgttaaggaaccaaccagagaaaaagcaattttagatttagtaattactagtgaattagaattaattaatgaattgacagttctagaaaatttttcaacttccgatcacaaaatggttggatttaaaataaaagtaaaattcagtcataaaaatcctaaaatttacagaagagatttaaaaaatattaatttttcgaaattaagtcaggcgttacttgaaaatcgaattgatttatca

SEQ ID NO: 80914 - DNA, 1045 bp, Heterodera glycines
  unsure (1)..(1045): unsure at all n locations
atgcggcagagcatcaataacctaacaaattcccaggtctcaacgaacacgcctgctcaaagaggagcaatgacttccaaaggcgacagcaaaacggacaagccaaaggacaagaaagaagcaacatcaaaaggcggcagcagcagcaccaagaacgcgccgaatgccatggtagatgaagcaacttcaaaaggcggcagagcatcaataacctaacaaattcccaggtctcaacgaacgcgccgagtattgccaaaggaggaggaacgacttcaaaggcgacagcaaaacggacaagccaaaggacaagaaagaagcaacatcaaaaggcggcagcagcaccaccaataacgcgccgaatgcccaggtagatgaagcaacttcaaaaggcggcagagcatcaataacccaacaaatttccaggtcacagcgaacgcgcctgcccaaggagaaggaccatcttctgaaggcggcagcaccaagaagccaatcacagacaaatcaaattatatgagtcaaccataaactttcttggaaaatgatcctgtatttatgttatttgtggtgataagtttataattgatccgtattttatgttattgtntgatcattctatgattcgatccgttatttatgtatttattgtttcattgttgattgatccccgtattatgtatgtntttattcactcatatacgaaatataaaaccccaacctcagggtttgtcagatctgaggattttatcctcattttgtggctttattgatatgtcaatgagggatttttttgaaaaatgatgattttttgtggcttttcgaggcctgtgggaaaaatcctcagaatcttttaaattttgataaattggcataatgaaccaaaagactgtattttattaatttgaatgctgtttgggtatttgggattgaaaaattgaagattgaacccgattttggacataggcgccaatgtcgggacgcaaatgtgggataacctttaaaatataacatttcatgttcgcttaaaaaatttatcaattttttaaaa

SEQ ID NO: 80915 - DNA, 1060 bp, Heterodera glycines
atttcgcccgtggcgatcactttgcttcgtgacgagtcaaatgagcacactctgttggtgaggcataaacgcagtgctggccaagtgtacacgtgcattgccggtttttgttcggtcggtgggggcatcattttaaaaatgattttttccaacttgtaaattacaaaattgaaaaattataatattaatgtaatccttcgattaagattatagaaccatatgatcggggctccatgggattttcatgggatcaccggccaataatttaccctgtcgttttttttaaattcatcatgtctcttcttgttgttgatgaatgctatatttggcttttcttttcagccgggcgagcgtcttgaccaaacagtccgacgagaggtcgccgaagaagttggcattgagtgttgggatgttcggccgctggacggttcgcagacgtggccattgcccgccgggtcgctgatggttccatttgtcgcgactgctaacatgggtgacgaagtgtgtgttgtgtaaaaacatgtggaagcatttttggggcttttttcttggaagttttacgaacaaattttaatttttttctattattattttccgcaacatattgccactgtttttttttgttgaagatccaagcgagcatttccgagttggaatacgccaaatggtttagtcgacaagaagttgcggaagcattgcgccgttctgaagaagatccgctgctgatcaagctgtaccgccatcttagcggttgttggggttaaacaattaaattacagtttcaatttgatcggatgggcgtgccaaatattccatcttggacatgagaaatgacgttttaaaatatttttaaacagaaagtggaaaggatcccgagacgagaatccaactgcgatacattccgccccagggcgcaattgctcatcacatcatcaaagtgggtgatcgagatccagaggaacggatggatattccctcatgtttttttaaaacgcacttttcagaattggcttctacgagagttctaattgcaagcaaaaagtccatcttgctgttttga

SEQ ID NO: 80916 - DNA, 2409 bp, Heterodera glycines
atgaaacctaaatgccacacaaatgccaacgaaatggcgccaaattcaaaattggccaacctttggccctccaccgattgtgtgcatcgcatttgtccatttctgttcctgttgctgttcgccctgttactgctccaacaacacatgcacacggaacagttggagcagcgactgtcccggttggaacagcggtgcaaaaatgttgttgaactgctcgaagaaccggtaaattgattgaaatattattttgcttttttaatacaggggaggggtaactgggtgccgtaaaaattcccgaaaattctgcctctaaaatttgcagattaggaaactgctcggttaaaaaaaatatagactttaggaagatatttatacttaattaaaggatttttatgaaaaatctataattagtgggatgccataacatttgggccaaattttaaatttctctaggtgctgaaaaagcattaactaattaatttgtttttatatgaaattatatttttacattaaattttaaattgtgtaaaaaattttaaaaatagggttttctaaaaataaaattaaaatagaattttgaaaaaatttgatctactttttgagatccctcaggaaaaaaccaaaaaaaaaaaaaaaaaaatcaaataattcaataattaattaccaactagagacgcgatttgactttttgccattgtaaaaaaaatttcttgtcaagtttttaataattaaaattaataaaatttgaataataatttttttttggtccaaataatttaatttaattttaaatatatttgttttttaattactttaaattatatttttaattattttccttctttttttattatttaattaatccaattaaatttggcttgtattttgttttgttttttttgttaattggtaatgtatttcattaatcggcacaaaaaaaggtgccaattaaatttctatttggcccccgcggggattaaccggtgtcagaaaatgggcacggatttgcataatcggaaattggaggttttttgggggataatctccccgttgcaaaatccattttttctgctggtgaatgagatgaatgaatggggaacgcaaaagaaaatgagaaaattgagaatctggaatggaaaatgtaaattttttaaaaattaattattttaattaataaaaaaacattttagatttaatttttaataattttttaaaaataacattttcatgtgactgaatatttataagcatgatttgttatttgttaatgaattgtttggtttttcaacgaatggttttgtttaatataaaaatccgtttatctttgtttaccttttaaattcacttcaatttattatttattaaaatattttatgttttaacattcattttttatgtaaaaatgtttttttttatataaaaaagtttcaaataaatgttttttatataaatggtttaattttactaatttcactaatgctactaggtaaaaaatttttaatgaaatttttgacaaaaaaatcctttgattccaattttttatctaattaatgaattaattacatatttatttaaatttttttggaaattgatatttcattaataaaaatagaaaaaaactgctttatccgtagaattcaaattatacacatattttgtgcaaaatgtaaattgccctactttatccctccgacccaatcaatttttgtctgtttgtttatcccatcccaagccatccttatcctctcatttttgtgtcccccctccccattgtgtcagtacaaaaaaaaattttttgctttgcctttggcaatccttttttaaataactaattaattgcatagagactcatcaaaaaatggtctgagatttttggccccaaaactattcccgattttcaattgaccattattttgccaatgctttttcttcaataaatttctctctctgaaaacggtaatttgaaatggtttaaagccttattaaacccgtggacacaacaaaaacattagaactcattagaattttacaaattaattgccgattaaattttagaatggctttttaattgtttaaaaacttttggcttacattttgtaaaattataatttatttattttttttttattacatttttaaattgtattaattttagtcggatgacgtcttcaccattgaaaatgctcaacagttgaggcgaacattgcgttcactgtacgacgatcggagacggcaaagggacggcggcggcacacggcaccaccaaaatcggcaccaccaccacaatcagcagcagaggacagcggcggcaacaacaacggcatgcatgtgccctcatggtaattatggcaattaaaatattggctaaatgatttcagggggtgtggggaactcagctgcccatcggaa

SEQ ID NO: 80917 - DNA, 996 bp, Heterodera glycines
atgtcaatttcacgaattgcatcatcccattcttcaatagaaattggtaaatttaaatgaaaaactaaaaaataaattatttttctaaaaattagcgcctaaaaagtcggtcgaagcaattgaaaatcaaataataaaacgaaaatcagaaataaatttggaaaatgaattggatggacaaagcgccacaaattcaaacatttcgccaaatttcaaatgtcctctcaacgaatatttggccgctgttgttgattataacggcttttatttcaatgttccggcgaaaacaatcgcaaaacttgcaatgaatttgatttttgctgttctgtcatcccaaaattggtccgccaaacagcaacagaattctgatcagccaatttttgatggcattttgacatttgaccatttttcggtgattcgtcaaaatgaatttgaatttggcgccgaagaattggcgggaaatttgaaaattgaatttaacaaaatggtggaaatggtcaaagacccacgggaaaggacacttccgccagaacagagaccaaaacagcagataatttggctcaaagatgtgctgtttatgagtccagagcaaatcaaagtttgtcattaattgcttaattacccatttaattacccaattaaataaatatttattaaataattcaggataaaagaagcacaacaaccggcaaagacttggtgtggttcgtcggtttgctgctctaccgaatgttgttcaacaacaaacaccccatggacaattgggagccaaagcgccgtttggacatggaattcatggccaagatgggcttctccaagttgaagcagttcaattgcatgtacaaaacggacgattttgtgacgggagactttggcatcgttccactgaagccgaaaagtcggtggatttggatgccggagagtgggcgagacgaaactggggaaatggcactggtggaggaacggattggcatggaacaggtggctgccaattaa

SEQ ID NO: 80918 - DNA, 741 bp, Heterodera glycines
atgattacccaacaacagcagcaaaaccaagaagttcaagcagtacaacaagaacagcaaattttgatgggaaacgagatgaagatggacaacagcaaaaatggagaaacaagggaagaggagggaaatagcattgaggaaggaggagagacggaagagaaagagaggaaaaggaaaaattcggcgcaaaaaggaggagagaatgaagctgaaaagagaaaagaacagcagcaaatcggcacttaatgttgccggtgctaattgctaattttgtgtgtcgtaaatcccgcgtcaaaatcccgaaaattaattgccacaattttcaaggagaaattcatacattcgatagatagcaagccatttttatacaatgttggagtttttttgcacttaaacccatttttgaaacttattaggaccgtgaaatggggtccacttcgtttcggtgccagctcgtttttccactaaaaattttttctgagtcatctaaatccaacattgttgatattagagcccggtaaaaaaaaatttccgggagcgggatcgggagttcaaaattttccgggacgggagtcccgaacgggattcccgtaaaaatcccgatcccgttcaaatcccgtctatttttaacgggagtcccgggcgggagcgggagtaattcgaaaatttaattaaaactcacaaaaatatttttaatgcacaaattttgagcggcaatacgtttattaaagaaaaaataaa

SEQ ID NO: 80919 - DNA, 1197 bp, Heterodera glycines
gtacatcgatcactccgtcatcgcttttcttcgttcaaatcatcaaattttcgacaaaagaggcacctatttacacttgcggattccatcatcacacaccatggaagagcagccaattttggatgtttttgttcgtgaaatttggcccattttttcgacaaacattcgctgtttgggcttttcctgtggtgatcatttggacaatttgcgtagtctcatttcaccgacaattctcactgatctcaaccaattgaattcaatcgattcatttgatctgttgcccgctgcgattgatgctgattttgatgggccaaattcaacaatttctgctggccaagcattgtccaaatggttgcactctccgagaaaagctggccaacccaagcgatttcgtttttgcagaaatttgaaggacttctattgggtcaacagtttcaaggaggtgtggtccgggggggggggggggggacaaaacgtagccgcaaatttttattttaatttaaaaaattatttaaaatttagttatctagcctaaatcaaaaaaaatagataaattcgaaaaaaattattaagaaaattcaaggaaatgtaaaaaagtcgttttttatttatctggaaattcagaaaattagtttttatacgagacggcgacgttttaggggtgtacccggtctgtggatggcattctgagttattttctgaaacctgaccccaaaaaagttataaatcgaaaatttctgaaaaattccgaattttatcaaaaatttcggaaatcggaattcagtgccatccctggtgtgttccaacatttttggcaaatcactgattgttgttttccaaaagctgacattgaccaaagaaaacgaaaatgaattggacaaaagttggataatgaaacgatgcaaaattatttgggagaccgcggcggttcattgggaagacggaaattgggacaacaattttaacaatgtgtctgtccatttggcttttcagtactgattgcattgggtgagcaattaaaaaaaacatttagttttgttaaataattcaaatttcgcataattaaggccattgtctccgccaccggaagaagaagacgaagcaggacaaagcagcgaaaaaggggcgtcgtctgctgacaaaatgagtgacggacaaaagaacaaatacagtgatcagccgcagaagaagaaatga

SEQ ID NO: 80920 - DNA, 762 bp, Heterodera glycines
caatttttccaaatctgagcacatcggaggaaatgagtgttctgattgcccgaattgctgagctgaatcgagccaaaacaatggagccatctgttgccagttttgaagtgtttggacaagacggatacggtagggaattttgtataattgagtggatacagtatgaaaattatacaataaaagaaatggttttgaaattttaaaatcaaagaaattattttgaaatttattaataaaaaagattattttgaaatttattaataaaagaaagcgaaaaatttggccctattgctgcagttcacaggacaataataaaagaaatggcctaaaattatttgaacacttgaaactatagcattttatagaagcaccacccaaattaacattctttgtatcatttatagctccaagagtccttttattctgtaaaattcataaaatttgttttgttcaaaaaaagtaatggccaaaaatatttagaaaataacttttttatttaaaatagagccaaaattattattttaaattttatttcataaattttattttgaggaatgaatgatgatcagttcagtctggaagaagaagaaggaaaagaacagcaagaagacaggaaaactccgacaaaagatggtaatatacaaatattagaagacattttcagaataatttgctaacttaacgacaatttaaaaaataattgaaaattgcttcaaatttcagtttcggaagatcatttgaaagcaattttggagagaattg

SEQ ID NO: 80921 - DNA, 130 bp, Heterodera glycines
gcaggcgacggcaacaatgtgtgacaatttgaagtggcgcgacgcgcaggagggcatttcggcattcatcacacgaccaaaacggcagccccagtggacgcacactgatcagagagtgatcaaggactga

SEQ ID NO: 80922 - DNA, 250 bp, Heterodera glycines
  unsure (1)..(250): unsure at all n locations
atggtgntgantggangtttnttggaagntaanagtgagttttatttattgttaatttttgtatttaatcaaatgttttcggtccattttttggatttttttgccaaaattctttcatttttttcattaattttttttttgctttgtccattttcagttttccatgggttcaatcttcattaattttggtattcttaacattttctgtatattcttccacaattaagaaaaactgtttttttgaaataaa

SEQ ID NO: 80923 - DNA, 2160 bp, Heterodera glycines
atgagtcaagcatttggccaccaattgctgcaccgttttcgtcgtccagcattatttgcattatcatcatcaaagttttgtccattgtttcgtgccaccgccgccttcgcaacggatggagcagcaacaaaacaaccaactgcaagtgctgctgcacaacaccaacatcaacaagttgaacagcaacaaccgtcgacgacaaagacggaatggcacctgggcaaccgggtggcaaggctggtcagtcagtaatgggggtttttttttttttgttcggtgccgtcggtgagtcagtcaatggcaactcgtacaactaatatatataaaaaacgcctgagcttaaagcttaggcctagcctaagccttagcgcgtttcccatcgccgactctaaaaaattattgaattttacaaaaaatggcactcaaatttcaaaattttccttgccgactctaaaaattattgaattttacaaaaaatggcactcaaatttcaaaattttccttgccgactctctaaaaattattgaattttacaaaaaatgtcactcaaatcaaaattttcctcggcggcactcactccctgttcatcagttttcgccgccccaatattcccctccgaactaaaaaaaaaatttttttttttagtttttttctttaaactagggagtaggctgtctcggctcggtatgaagcgcatgtttttcatttttggcaggttatggacgacaagcgggtcaattcgctgtccttgtccgccatggaaatgttgcacgacacactgcgcgagttggacgctcggccggaggtccgggtggtgatcctcgccgcctcggggcctgcctactccggtggacaccatctaccggaattggcacggttttcattcaaattttacttgatgggcgagggaaaagttggcactaatggggggtcggtcaactggatgtcggccccggtttttggggtataattccgttcatatttctccgaattgaatgaatttgatagcatcagataggcctaagaattctctatttccttgcaaaatttcatgaaattcattacaatatcaaaaaagttatgacccaaaaagcttcggaaaagcaattttttggtaattttttttcgaaattttgcaggcaaattgagaaaacttagggctatcgaatgcttaacaaatgctttcaaaccgaagtaaaagaaaggacttataccccaaaaactgtcctctttcaagttttggcgctcagtcatgccaatattcgaagtttggcagaattacggaccgagattttttccaaaaaaaaaaatactgaaccgaacatttatttttatttatccctttttaaattttacttttaatttcattttagacggccgaatccggcacagaaatgcaccgcaaagtgttcaacaaatgtttggaactgatgacattcattcgacaaatgcaattgcccgtcatcggtttgtgattttttgtttcattttttttaatttgtaaaaccgacgctcgaaatccggaccccatccctaccaaaatatatcagagtcgagccaaacactcatttttaaatgtggaattcatcaggtttattcaaaaaaaaaactttcgaattatcgtttcggagccataaactttcgactcagatgtgtttttctgcaatttttctaatttaaaaatttttttattcgcatttcacttttcaatgcattgttttctaaatttttcatttgtcattttatttttgtaatttaacaagccatttttctgcccggattgcgataatcctctacttttttgggtcggttcaaaaaaaaatttttttttttggccctccgatttatcgctacgaaaggatacgagcgatattgtaaattcttgattgccctttaacactttacccatgacaatttgttggtggctccgttcacattttgacccctcggggttcatggttcgaggcccaccggcggagggtggtccacaattttttttttttaattttttttttgtttagccgaggttgacggcctcgtcgctgcggccggcacgcagctggtcgcagcctgtgacattgtcattgcgtccggtcgtgccagctttaatgtcgccgggtgagtgacccccagggaaaagggagggggaaattcattaaa

SEQ ID NO: 80924 - DNA, 425 bp, Heterodera glycines
atgatttgttgttcgaatctacacccggatatccgcatacttgatgcgaacaatttgatggatctcaagtttcgcgtccattataaatgtattaatataaatcttgaatctatcttgacaaatatattacagggctcatatccagggacctatttcaattcggaccaggtcctcgacttgatttttgcgaaatggactgcaaaaatcctgtttcaattaaatcgaaaaaatcgagtgtcgcacttgattttggcatcaagtcctatttttttgttgcaattaatcaagtcgaggacttgatcaccaagtcaaatgtaaaatcgactgccacattcgattttttaatttttgtttcaattcaaataacagtcatggtgaatgaaaaaagttttcaaatttatcgagagaaaagttaaataaatcga

SEQ ID NO: 80925 - DNA, 118 bp, Heterodera glycines
acaaaaggggggacccttttgttttgcaaaattttttaagataaaaaaccatgataattttttatccggggttttaaaggtcgctaatcacgaatctgacatgtattttgactaattt

SEQ ID NO: 80926 - DNA, 1971 bp, Heterodera glycines
atgcggcttgaactttcagtggcagacaccgaagcgccgagcatcatgggattggattggatcatccctttcgagcgtgccacccaacagccaattgccacgactttggagcagcagtcgctcattgtcaacagtgtgcaaccaacaaatgatccggtcaaattggaagggcaaatcaaggcttccttcccgaaggtgtttcaacctggcctcggacattgtgtgaagacgaaggccacgctgcatttgaagcaaaatgtgaagccagtgttctgccgtgcgcgacctgtgccgcatggagtccaagcagcagtcgacgaagaattggaccgacttttggactcgggagtgctgaagcccattgatttttcgcgctgggcagctcccgttttggcagttcgtaagaaaagtggtaatgtgcggatttgcattgacttttctacgggactaaacgatgcgctggagttgaacaggcatccccttccgcggaccgaagacatttttcatgctctgcgtggagccaaagtgttttcgcagcttgatttgcgtgatgcttatctgcaggtcgaactggacgaaagttcaaagcagttagtcggcatcaacacgcaccgcggactttttcaatatcagcgtcttccttttggcataaaatcggccccgtctatttttcagaaagcgatggaccaattgacgtccggtattccaggcgtgtttgcctatttggacgacatcatcattgcttcggccgatcactcgcagcatgttgctgctctcattgaactcttttcccgaattcaggactatggatttcgagttcaattggacaagtgccactttttgaaggctgaattgaagtttctcggacacgttgtctcgtccgatggtctgaagcccgatcccgctcgatccgatgccatccgtaatatgccgtcaccgcatgacattggcactttgcgctctttcctgggtgcgctcaactattacggtcggtttgtcaaggaaatgcgcgatttgcgtgcacctttggatctgctcttgaagaaggacactccttggttttggggtcctgatcagcagaaggcttttgatcaggccaaacaggttcttcaatcggatttgttgctgacgcagtatgatccgagtttgccgatcattgtcgctgcggatgccagccaatgtggaatcggagctacaatcagccatgtttttccaaacggagtggagcgcgtcatcgagcacgccagtcgaacgctcactcccgctgaacgaaattacgcccaaattgaacgtgaagctttgtctctgattttcgcggttcaaaaatttcacaggatgatttacggtcgtaattttactctgttaacggatcataagcctctcttggctatattcggtaataaaaatgggatcccgatctacacggcttcccgattgcagcgttgggccctaattttgtccaattatgattttacaataaaatatgttaaatctgcaaattttggacaggccgacgttttgtctcgattgatttctgagcaccggacagacgaagaagtcattgtcgcccacacatcggacaacgacgtggacagcactgaagaagtcgaatatgctcttcttgtcaacttggagcagctgccagtcgatgcaaaagaagtgagcgaactgacgacttcggacgatttgttgcagcaggtggcacaattcgtacgttccgggtggccaaacatgttcaattttgacaggaaaccgagtcattgttcctgcgccgcttcgtcaacgtgtactcaaagactttgcactttgctcatcctggcattgtgcgaatgaaggagtcgtacaaaacagaagaggattgttgtcaggagcttttaataatgttgttgcactgcacacggcaaaacagacaacagcccaaagcaaacagcaaaacacaaaacaatgccgaagataatttattaattccaa

SEQ ID NO: 80927 - DNA, 1210 bp, Heterodera glycines
atggaggagcaagaggaggaaacggagagagtggaagcggaggaggaggaagtgatggaagcggaggaggaggaaacggagagcgtggtgggaatggagcggtaggaggaggaagtggcggaagcggaggaggaggaaacggatagagtgacgggaatggaggaggaggaagatgaaatgggggagagcaaaacggaggttgggtaggaggggaaaacggagcgggcctaggaggaggaagaggagaatttgacgagtttggcgggaaaagtggagggagtggaggaggaagaggacaaggatggagcaacgcggaagcggggggcggtgaattcgatcttccatcattggatgaaatttatgggtgtaaaatggttactagggattgcaaaaggattatataattaatttaaaaaatccgaccggcttgccgatttcggcttgccgacttcagcttgcctacttcggcaagccgaagtcggcagaccgatatctaactaaatggattattaactcacagacgatccaatgctccgtaaaacgggaatgtctcatgacttttccacctcactcattagttcaactaaaggaattagggacaatcaagttgaacaagtctcacgaatttcatcacccaccgagtgccttgtaaaactgatgaacgcaaacggcagtctgtccaaaacggcctgtgctccagtacggttcaccgttgcgcgaatttctttaaaaggaaaaaatacgcttttttcaacaagttgcattaaaattcctactcaaaaaggcgatggtgtctcggttcaagtgatagtggaatctccattttcctgcacaatgactcgtcgatgttggcgaacacctccacagctttcttctccgttgacgtgccaatgaagaggaagcctttttgtcttttgcgtcgtcaattgcagcgctaaatcgtatgggcgacagcttctcaacgtgtacaatcagcaaaacactgggaagggcaaacggggcctctctaacaaaaattaaatgaaattatgcaatagaaaaaggatttttcaggaaattggaaaaacaagattttaagattaatcaaaagaaattctagttttgttttcgatttcgtttattttttggatgaattgaaggtaatttggtaatacttagtttgtccccccatttttttgaaaaaaaattttcaaaaaaattttgcaataaa

SEQ ID NO: 80928 - DNA, 387 bp, Heterodera glycines
atgcaagaacacctgggcaaccgcaacgaatggttattattggatgtgtgttttttggtgggttgccatctttttaattatttttgacacatcaattatatagatttttatatttttgagaaaaaattcaaatagtaaattttgaatttacaattaaaagagggttttcactaaaatacaagctttttgagttttataaaaaaatcttatttttaattagtataacaaaaaaaattttagcgtaaggaagcattatacagtttgaatagtgcgtggcataagtatttgaggacgggagagaggatgaacagcgatgatggtggagatgatcagaacgaggaagaggagagcgaggaagaggaggagagagatgaagaagaggagaga

SEQ ID NO: 80929 - DNA, 1536 bp, Heterodera glycines
atggctaaacgaaaagcaaatgcatcagaagaattgcgcgttttgaaggcgagaattgtggaattggaattggaatgcatggagcaaacgaatgtttccgaggcgtttgaacaaagcagaaacggtaggaaaataattttaaatttgggatacggtaggaaaatattgcataaatttgaaattcagaaaaactgagtttctaataaatataagagaaagagagcagcaataacttacaattagcttaaaacaatcaaaatttgtatcatccgatagcccaccttttctctattagcctgtaaaatttcaaaaaaaaaattggtcaatataaaaaaaattgtaagcaaataacaactaatatttctgcactaacttatgttatatttgctagtgtttagttcaaattttgcaggctaaggctaatagagaaaaagcttgcttatcgaattataccataaatgtaaatttgattgcttttaagcaaagttatgccaattttttgtcgaaaaaaagagttaaaatgccggattttacgactacattacttaaatttcatttaaattgatctacacaatagcaaattcagtagaagtgatcgacgacggcgtgcaaatcgtggaaattcaaggacaaattgaagccgatccgcagcagaaagtaatttttagaatattttaaattgcaaaaaatttttatacaaataaattatgttttttaaattagttatttattatttgtttaatagaaattccgtgaaaatatttcgaaaatgaaagaggaattgagcaacacagaacaattgtgcatgattacgcagttgaagaatgtgggttatttattatcatttaaaattatttggttgggaaattttacaaattttaaaaccatctttttcacatttcaataaatattcgtttcatcaatcttaattaatttcactcaattggttttatgactagggcgaatatttttaggctctaaaaaccgccaaaatcggtaggctttaggctctaaaaacccccaaaaataggctctaaaaatggaaaatatgctccaaaacgcctcacaaatttcgtggtgtaaatttttttttagatttttgagaacatttttcatttcttatggggtttatttttataaatttttgggtcgatgtatttttaaaattgccaaaaaatagattcttattagcacctattttttggggtttttagagcataaagccttcttattttggcggtttttagagccaaaaattgagtcctaatataaagaattatctgttaaaaatgttccattgatctttttttagctaacgccttaggttatcatttgggttcaatttatcgaaaaataggtttttttttaaatcttagattttagaaattacttcaatcaaagttgaagcatcatgagcttatggaggagcaaaatgaactgcaagcgaaggtggccaaaatggtggaccaccaccagcagcagcagaagaagaagcaaggacgaaaggaaggcgagcaaggacaatacggtagatga

SEQ ID NO: 80930 - DNA, 733 bp, Heterodera glycines
atggcattgataaatgttgtccttttcaacagcagagcctctccatcggcaagtgttgttggtgaagaggggcctccaattgtccaattcggtgccgctcgacgacccggaaagtgccgtcctggtaacaaacagcagcaacaacacaatggtaatgatgaacaaccaccaccaccaccatcagcaccagcagcagcaacatcaaggtgggcaaaatggtcacatatataacaataataaactttggatgttattaatttatattaatattattttttttattttcattttctattttaattaaaattatttttaatatttaaacaagaaaaaaatcttttttaatatttaacataataaatatattattttgaacggacgaaattcaattcgtaatacgtctagactcgtactgtttccgacaaaaaaaaatagtcggtcattttttggcaaagtcaaccaaataaacaattttattctcattaaatgttttacctattttgttatctcttattagcatttattatacacaaaagatgaagctcattagtgacaaaaaatgtactccttttcagtcgctcggctcgttttacaaaaactttatcgataaaaactttttttcacaatcagaaaaattttttcattaaaaaactcaaaattgatttttacacaatttttaaaatcacaaaatttgggtattagattttcaaaatcaaatttttatatgaataaa

SEQ ID NO: 80931 - DNA, 228 bp, Heterodera glycines
atgtttgcggttggcagtcgcattcaaatgcacgccaaacggcgccaatccgtcgctgttggcattggcggcatgccaaaaagtgggttttccgtccattattaaataatgctcttaaataataatatttaaatttaattatcgagttttctaagcttttatatttctgcaatattttacttttctatatttttattattaaattattaggtgtttttagaggtttaa

SEQ ID NO: 80932 - DNA, 543 bp, Heterodera glycines
atgcagcgcatctttctcgtttcgcttgctttgttccctctttcccatgctttcctcttcggtgggctcgtcggaggcagcagctgttgctgcccccctccctgtcctccgccatgttgcggaggaggtggcggaggaggttgcggaggcggatgtggaggaggcggaggaggttgcggaggcggatgtggaggaggcgggggaggatgcgggggtggtggtggaggtccaatcatagtaaactgtggaggtaagtaatacgcaatcaatctttggcggccaactatgttaatgtttcaggcggaagtcagggaggaggatgcggtggaggcggaggttgcggaggcggaggaggttgcggaggcggaggaggttgcggaggaggaggaggttgcggaggaggaggaggttgcggaggcggaggaggttgcggaggaggaggaggttgcggaggcggaggaggttgcggaggcggaggaggttgcggaggaggaggaggttgcggaggaggatgcggtggaggtggcggatgcggtggtggtt

SEQ ID NO: 80933 - DNA, 62 bp, Heterodera glycines
atgttctccgaggaagggtcggcagagataattagacggaaatatctggggaatggaaaaag

SEQ ID NO: 80934 - DNA, 1031 bp, Heterodera glycines
atgacaaaacggacggaccaccgattggattcgatgaaagtgaacagcaattgcaaaactgggcaaaagcaatcagtggacatacaaatggctattgaattattacgtggcccaaaaattgtgcccattgcgctccctccggtgataaaagcggtcgctctttggcgatcgcttggcacagtcaacgaaatgccgtaggatttgagaagcccaatttgggctaagtataaaataaattacgataaattagtttgattatttaaaacccaatccaatgccagcagcaattcgcgaagcgatgagaacgaaacgaatccaatgggaggggaaaagcgaaacggaaaaatacagaaaattgccacagaataaacaaaagttgcaaaatatgctaaaaggggagcattttacaattatgaattttattaaattatttttacagcggcggtttaaagcgacggatgcgattggaccaaacgccgaacaaagccgaggcgacgatcagcgaaagggaaaacaacgcgatcaaaaggcccaaaaaaccttcagagagagaagtgtccagctgaaataaacggtaatcaaatcactttccaagtgattgcgtacactgtcaatcattttctcactaattaactcattaacattcggtggccctttttgttgcctcaccgtcatcaaatatggccacattgacgctgttaacagagtgaattggacagatgccacgaaagtgaacaaagcacagagataaatggaaggccaagcggtgcactgaattttggtccgttctttgaccaaaggggcgattggcaaatcggccaaaaaaggcattggcccagcaaaagtcactggtggcaatgtcgacctgcagctgcggcagttgggctgatccaaagacccataaaaggtcgttgtcggagaggggacggatttgaaattggggggcattcggtgaaaaagccaaaaaataattgaacttaaaaaataatggagtaaattcaaagtacctaattgatatgagcataaataaa

SEQ ID NO: 80935 - DNA, 1347 bp, Heterodera glycines
ttaaattctgggaagcaatatcccctaattgttcgattattgattccaaaaattaactcatcgcaagaaaaatccctaattgacacaggggccagtattagtgtagcaccgaaattaatggcaaaactctggggttgtacattatacccaacttcagtcagtgtaattagtgcttcaggccacactttcacacttaaagaaaagggcacggtcattttttcaattgggaattattcagttgaaggtattattcattttgttgatgattttaaattcaaaactcatttttataaggcacttattggctgcgatattcttggtaaattgccagccttcacttttgattatccaaataaaaagttccaaattggtgactatatcactccattaggaattcaacagaataattgccttattaataatttgagaattcaagcaagtaactcaattatcctccctccaaacaggggtatgattgtccaggcaaatatagacacctcaatagacctgaataagcctatttttatccattcactcgatgaaagacttaacaatatttcctttggtctaattcctgtaattgcggcgccctttcgagggacagtgaaaatgtttataattaacccgtctgctatgccatttcaactttataaaggccagcatttagcttatgctgatgaggttagacaaatcagtaatggtgtaatgactgatagctctgaaaaagtgatgagtatgtcaccaatgatggacatagtgattgaccccaatttcaaaatagatttttccaaaagttctgtaacgggttcagacttagaaaaattgaaaatactatgtgaagaatttcatgacattttcagtcattcccaatatgacttagggtcatttacagagggtgaacatgaaatagttaccacaacaaatgagcccatgtctgccaaacctcgcagaactccttataggtatagggcagagctgcaaaaacatatcgatcagcttttaaagtctggagtaatggttgagtcagatactccttgggtcactccttttgtcatagtacagaaaaaggacgggggaattcgaccatgtttagactttagacaattaaatgatattactgttcctgatcattacccacttccccgtatggacgcaatcatggaaagagttgcaaattgccatttttactcctctttggatttatctagtggatatttacaaataaaattaagtcccgaggcatccagaaaatgtggagttataacagaagataatgtatatcaaatgactcatatgccattcggattaaaaaatgctaccgcagcattttcaagagcaatggctcag

SEQ ID NO: 80936 - DNA, 1386 bp, Heterodera glycines
atgagttatgcttttcgtcatgttgcggcctccacgtgtgagctcatgggagagacgcatcgttgggccgaaacggcattgcttactgacccaactgctttggctcgcatgctgttcactaactataaattaattgcaaaaagggttggtgcttcacttattaaagtttggccatgtacacaattaaaaccaaaggattatcacttcgttcctactaattccgaaaataattgttttgaatttataccaattgcatttaagactcatactgatgaaataacagcatttttaaatccacaatccatgattattgtaccttactcccgtaagacggactgcttagaaaatagggaaattattctccaactcgacggagatgttttagtcattgaccaaatcacggctcgaatttcaaagctaaatattctcagggacgataatattaagtggaacctaaacctaattccccaaattccaacacacgcttttcatcacattgttatgtttaatatcaccgatataaatttgcatgccttcatcaataatttagtcaaagttagcgatattacttatcagattcatcaaagggacacgaaaatttcttcatctatttctggtacatgggaaaaaactaaagaagagttaaaaagggaactctttggcgactggtcttacatttggaaagtaagcataacaattatctcactaatcactatctgtgatgtccttatcaggtttagtgtatttgctttacagatatacctgggagagggacgtttaggtcaattactcctaggaaatcgaggtgctagactagctcagaatgttgtacagtcccaatctcaaaatattgtctgtaatcctattacatcaccttccgctgatgagaccccggacattcaatttgttcctgttaataggatagcctcatctactaatgacttgaactctcttcggagagaaagaaaaaatgcaacaatttgtgaatcagtcttaatgctcagagtttatccaaatcaagagaaaattggttttacttcagtatgcttagatctctcaatcactcgaattaaggtgaatggaattgaattagtatcagtaattgatagcgcttcacagacttctattgctcctttacgaattctcggctcattacgagtacctgaatttaatatgatggaagtctgcgttaaattaagacctttcgggatggacccggagaaagctgctgataatgcacccgagggcaagactgtggcgtgggttctcttctcaaaaggaggggtcattttgggcgaggcaccacttttatttattaataatgctttctttgagaaggaagggtttgatttgatcattggtgccgatctgatcgatcaaatggtg

SEQ ID NO: 80937 - DNA, 1746 bp, Heterodera glycines
  unsure (1)..(1746): unsure at all n locations
atgcgcaaggagcataaggagcggcccgtccgggtacagctcagcaacggcgctcaactgctaaataaaacagtggagacgggtgtgcaggtacggcctggtccggacgaaccgaaggacaagtccgtgatggttaccgacgaagatgaagaggaagaaattgaagtgccaaagtttttaaccccaacaagccagacgcagggaagcagccgatcacccaggaccaataagaaagcagcaaaacagcaaaaattgatcgagaagaaggaccacctgttggccatcattatgtctgatccgcagagattcggcgcaactgaccgtgtgaaaatcattaacccaaagacgggccgagagttcattgactcggacctggcctggtcaattgaacgcctggtggaccctcgcccggagaatgccccttcgccacgcggaaccaaagagttgaagaggaaactcgcacagaatccgcttgccagtagcctactcaatcgactgtttgttgggtctgggttcgtcggacaagtcaaacaaagcgggcgttttattccctcaaaatggacaagaaaataaacaaaatatacaccgacncggccaatccgggcgggtatgcgggtgcgagtgccctgtacgcggcggtgaaggagaagcacccaaagttaaagcgtaccgagtttgaggactttttgcagaggaacaccacctacacgttgttcaagccaaagagagacaagttccgacgcctacgcactgtgcctgcgggttttatgactggtgagattttgtgcggcctttttacagtttattcacgggttcagatgttcaggcggacttggccgatttccaagccctttcgcgcaagaacagcggctaccggtacctgctgttggctgtggatgttctatcgaggcgaatgttcggcacccccgtaaagagtaaacgaccgacggacatgaaaagggcttttgaggagctatttgagcaaatgccaagggtgcctgacacactgtacaccgatcggggactggaatttgtggcaaacccgctgaaggagttttacgctgataagggcattcaaaagtttgagaccagttcaaagaagaaggccgccatggcggagcgggccatccgcaccgtaaagactcggctgtacaaatatttttccgccaacaacacgtcggtgtgggtggatgtactgccaaagtttttgagtgctatcaacaactcggtgtgccgcgcgaccggacttagacccaacgaaatcagcgacaccaatgcgagggaggtgtggaagagggtgtacggcgaaggactcgcacaattggacaagacaccaaagatcagagccggggaagcggtcagaattcccgagcctaagcacattttcgaaaagggtactgtaattcacacattttccgatcaatttattttaatttttaaggctatatccccaattactctgatcacgtgtacactgtggatgagacccgctcaaccaacccccagcactatttgctcaaagactattatggcacaaagttgaagagaaaattttatttgccagaattaacaaaagtacaagtggatgaaaacacaatgtatcgaattgaaaagaaatacaaagaacgagtgagagatggaaaaagagaagtattggtgaaattcattggatttcctgaaaaatattgggtgaaaaatgatgaaataaatgaataaaaatattacaaatttaatgaaaattaaaaa

SEQ ID NO: 80938 - DNA, 1542 bp, Heterodera glycines
atgtacccgcgcggcttgatcgaccccgagtacaattgcgatcattttgaggactctgaaaggggtgagtttgaagcttgtaattaagcaaatattttttcttaataggcttttcgacaacagtcacacacattgagctggaagccgctctccgctcgtggtacaaggtgacgcatgtgtaccgtgcctatatctggcctctggcgtgcgattggagcaatgggctgttccactcgtacctgctgaagtttctcaaaatgaaatttgaaggtaaaatttaaaaaaaaaattaataaaaatcattaacaaaaatttaagcaagcggatatccagcgtcttgtacggaggcgggcatcagtgaggaggagtcggaacggcgcaagcaggaccacagcgacaaggccaaacaaaaggcccacgttcatctggaggctgaccggatcaagcacaatcccgggctccgctacctgtccaagttgtgtttaaactcgctgtggggccggttcgcacttcggtaaaattttggttaagaattatgaaaaaatacaaatcatacagaaaccggcttaccaaaaccgaaatcgtcgagtgccatgccgagctggccaaactgctcaacgactcgaagattgaggtcagcagcattgatcagctgacggaaaagttctggatggtctgctacaaggccaaagatgagcatgtggtggagcacagcacaagcaatgtaagaaaagttttaaaatatttaaaaaaagacaattgaaattttctcaggtggccattgccctatggaccacctctgctgcgcgaatccacttgctggaatcgctgaaaaaggtgtatggccctgcaccaggtgtagagcgctacgacacccgcattctctacatggtaaaattcaaaaaataaaatgaaaatgtgaagtaattttttaaaatcaggacacggacagcatcttttacgactacttgacgcggctgggggacccacttccgggtggtgagcagctcggggagctcgccgacgagtacccgaaccacacgattatggaattcatttgtggtaagactcattaaaaatagatcaaaataaatggaaattttttgtttagcggggcccaaggcgtacggattgtggctgcgcaacaacgcaacgggggaggacgagtacaagctgaagctgcgcgggatcaccctggactcggatgcctgcgagcgcatcaccttcgagaagatgaaggagatggtgcagaacaagctgggacagccggacaacaacgtccgcttcaactacccaacgaagaacttccggatcaccaagaagggagagattttcaccgtccccttggtcaagcagttcaacccgaccgtgaataagggggtggtcagggatcacgggttgaaggtggtgccctttgggtacagcgacgaagagtggtgtaagtggaactgccctggcgcttgcacctgtctgttcaacccagacctcaatgtgaacatgttcacagaagaggagctgaacgaccccgacattatgccataa

SEQ ID NO: 80939 - DNA, 1800 bp, Heterodera glycines
atgccatttcatcaacaaacgcaacacacagcaaaatgcaaatggaaatgccacaactgcctgcgtgttgggtctgcctttcgaggaaactgcgtccaaggcaatgacaacttttttcagacctgcttggggtgcaataaagtaaagttatttgagtttcgtttaaagaatttttttgtttagacatttaaaagtcgtgattgctatgaacaccatgccaaatgcacaaactgccgggtcaaacgtgacaacgaagaggaaattgtgggaaaatcaatctgcatgagctcgaaaaaatgtgttgactgtggtgtgatttaccgaatggcggtaggccttgtattttaagattcgtaaaataaaataataaatatcacaggatcaagacaagaaaaaggggcatgtctgcggccacaaattctgcaagatttgccttggcttccacgccccccgcgactgctacattccctaccggcccaaagttaagaaggagaagcgctttgtgttctttgactttgagtgcacaacggacttcaagcctgacccgcaactcatgcggttcaagcatcaggtattttgttttttcaactttagcaaattatgaaaaattcaaaggtcaacttctgctttgcccatgtcacatgcacccgctgcattgaaaagggcgtttgggatcaggaattggaaaaggcctgcgcgctttgtggccgattccgaacttatgcctggtccccgttcgaattctggcacacggacgtggaatgccgcaaggtggtcgaagacccactggcagccttcaccaagtggttgctgaacttcgaaacggaagtcctcggcatggagcccggtgcgaagaagcgcagaaaaaggaagaatgccgaaaacaccgacggcgaggctatggaatgcgaagaagaagaggatgccgtagatgaggacgccgagaacaactggatgctggggtacgaagaagccggggagaagccggagtcggtgacaacatacgcgtacgcccacgccggtaattttggaattatttaaaaaaacttggaagaaataaaatttaaaggttcccgctacgatcatgtgctgatttatggtgaaatgctgcgcatgggtgtccgccctgaactcatccgccaggtgaaccatctcctggaaatgaaggcccgcaaaacaggagtctacacaaccaccgttttccgggacaggtaaatattttgaatattaaatcttttaaaatttttgatcactttagttacaagttgatcccaataaaacttgccaattttgtcaagacgtttggcctagaaattgagggcgtggaaaacaagaaatattttccacacaaattcaataaggtaagaggaatttataaaaaaattaaataaaaattaatacaatcttaggcggaaaattatggcactgtgttggacaccctgccaccgattgagaattattacccaggtggactcttcccggcagagcgcgcaaagtttgagcagtggtacgacgagaaccgggaaactggttttgagctcagtgaagtcatcgcggactactgcaagacaggtacaatttttgaaaaaaaaacatgcaaaaataacaaaaaaaattgaagatgtccaaatcctggcccatggtatggtaaagatgcggcagctgttcttgtccgagactcggcatgacatcacggattcggtcaccatcccgtccggctgcatgaagtattgggtgcagttggctcaccacgacaaagaacgtgtcgccattattcctcacctgggatacgagaagtga

SEQ ID NO: 80940 - DNA, 371 bp, Heterodera glycines
atgagccaatattccgacaattccctcccctctaccctcgacggaccgtattcccctgttggggatgacggcaccgaattgatggacgaagcaccgccattggatgaggttatgaaacgccttccgatctcggttagtttttacgaaatgtttttctaaaattcttttctaattttgggagacattttcaggttgtgccatcggacaacaatgagcgcaaggcccagaaggagccgtcaattacccgcgaattggaggcggaattgttcaacggcgatggctttacatgtctctctgccacacaggtggaagcgggacgttttaaaggtgtggttgtaaataatacatcatataaaattattattatttaa

SEQ ID NO: 80941 - DNA, 749 bp, Heterodera glycines
  unsure (1)..(749): unsure at all n locations
atggcccgcgctcacttggcggcgctcaaatggctggcgctcagttggccatacacccctcccacacctatggggggctaccgtaatccggacaaaatggagtgggtaactactcagatggatgaaaaattttacaaatttgtgccatttccgttgcccgagcgtccgttgcccagaaaaatccgctttaaattccttaagattgagtaatttaaaatcagagttatggcaataaaagcatttattccattttcagttacatcgatcacttcgtcatcgcttttcttcgttcaaatcaacaaatttttgacaaaagaggcaccaatttagagttgtggatttattccgcacacagctcggatgaccagccgatttgggatgtttttgtgcgtgaaatatggccaatttttgcatcaaacattcgccacttgcgctttatcgatggtgatggtttggacaatttgcgtcgtcgcacttcgccgacaattctcactgatctcaaactgttgaattcaatctattcatttggtctgttgcctgatccaattagtgattttgacgggccaaatgcaactgctggctaagcgttgtacaaatggttgcaaactccgagaaaagatggccaacccaagcgattgcgttgcaaagattttaacaaacatgtggatattgattggngtcacaaatcaaggaggtgtggccataatttcggcaaatcactgatttttgatttgacggacaaacaacaa

SEQ ID NO: 80942 - DNA, 824 bp, Heterodera glycines
atgtcccaaaaaactgttgatgatactagcagttggtggtactattttatccgtacggatgaaccccatgtcaaatgtaatagcggtgaatgggagcgagtctatgacagaaaaaagggacaaattcattgaaatgccatttggaaaaaaacacgatgataagtttaaggaaaaagaagaagcagagaaaaagaaaagagacgctgaaataaacggaaagcagcgagagagcagcagccgaagttttcaagcatgggttttcctcctcttgtcaaacagagcaacagtcatcacgcaaacgtcaacattcgccaataataaattttccaattttcagtaatttttattaatattgctaccttcaacctttttagaaaaatttgaatcgggaagtgaaaacgaggcgttattggaacataaaatttcggaaaagattgcgcttgattatcagccattttcagtggtcgaggacgaaggattacaaggcttttgaattttcttgcccctggctacaaacaaaagtaagatgtaattttgcgacaaaactactatttaacttaattaaggacacgaaagcacttttccgactgattaattcccagcatttatcaaaaattattcgcaaaactcaagtcaagtataacaaaatctgaccatttttcattaaatcgacggttggacttcaaggaatgaagcgcagtcattgatttcactaacagttcatttcattgatgaattattcgagccaaaattttatattttggaggcaagaacccgttcatgggcggcacacggccgaaaactacgttgaaattttaaatgta

SEQ ID NO: 80943 - DNA, 1260 bp, Heterodera glycines
atggagaggggactccaggaagcaatccaaatttttcaaggacatttcgagattggaatggcagcaacgggagcagaacccgcaggtcaccaggacttcttctacgacatactgacagcgccactgccggcggcgacgaaagagttgcagttgcgaaaccatccaacaccagctgaactgcttcaaattgcggacgagcacatcggagacttaaggacgatgcgacgggcactcgaggatgaagaagaagcaatcgcgcggtctcgattgagcgggtcattcgggaccaacaacagccatccggtgggggacgacccacctccactggaaaatcggaacatggaagaatgggagagatccttccaagtggcggccaaacgatggaaaaacgacggacaaggtgtaccgcaacacaacagaagaccaatgggacgagtcgcgatacccgtcatgtcgtatttggacgggatttttcagcggcgtgccaaagtgccgtccgtcgccagcatgagagtgacgaacacagcgcgagaatggatcaatcgaaatcgagacgagatgggggcgttccccccagcaacagcccatcggccggcactgatgcaaccaaaaatcgaaaagcatcaggctcacgtgaacgacgactatcgggagcgtcagacataccccattcgacggcatgctcgagacgagggagaacatgatcggaagcacgggagggacgaaatcacgggaatgacaacattcgagactcggctgcaaccggcgattttttccgaaaagcccgaggattggacgacattttgggcctatttcaagcgagctgtggacgacaaacccattcccgggttcgagaagcagcttcatctcctgcgctgcttaaaggagggatcgccagcccggcgggctgtcgaagtctaccctccctccgacggcaactacccggtggtcgtgcaacttttgaaagagcgattcggcgacacggacgatttacagcgggcaattcgggcccggcttcttcatttggcaccggcaaaggacaatgtgaacagcctgacgacgatgatcgacgagtttgagcggtgcgtgtgccaactcgagcagctcggagcgaacgtggacgacgactcatttggcccattgctggaggcaaaattgccggtgcgactgctcacggaattgcggatcagagaaagcatgatgggctcgaaatggtcagtgcgcgatttcaggagagcgttgtcggcacaagtgcgatga

SEQ ID NO: 80944 - DNA, 978 bp, Heterodera glycines
atgctttccctagggttaccgtccgcaaattcgatcattggtcgcacatttcgtgccctcttttggattgtcgccgtgaatgtcagcctgtgttatttctttctgatcaaaccgtacatttcctcaccgatcactgcttggttcttcaatgttttcgctgcaattctgctgaacattggctcagcttccattggacccattttatattttacgaggtataatcacatctggcatgcaaaaatccgtggcttttcttgtaaatttagctaacttatcaaaaaataaaaataaattttctattttgttttgtaaaattttcaaaattgagacgaaaattttcttgaaaatcccggacaatccgtcagtggacaatcaattcgtcattgatggacaatccgtcagcatgtaaaactgcatccaattgtttaaatatttaatctaacaattgcaatcgcaagattttttgtaattgctcaaaaaacaaaatttgaactgacaaattgtccactgacgaattgtctgttactgacggattgtccttcactggctgattgtctaatgacggattgttcactgacggaatgtcgcatatagtagttattattaaaatactttaaaaaatgcaacataagtcatatttcagcactgattatcgtctggcattccaaaaggaacttaaaaaagcaattaaactaatgacaaaacaaaatcgagtgacgccaaagcataatacgccaatacttttagtctctacaaatagaattttaaataattgattgttgtatactgtatgtgtggctcttgtaaaatgtttattgttgtttaactcaaaacttatggcaatagctcgctttttgataaatttatttatttttcgctaagacttttttaaaatggtcaaaaaaaatgtctgactatttcggcatttttgtgtctactaatgcctaaatatctatttctgtgtctatgcgcaataaa

SEQ ID NO: 80945 - DNA, 429 bp, Heterodera glycines
  unsure (1)..(429): unsure at all n locations
atggtgaattttggagtaagaatgaagaaaaaaagcaaaaattacgtaaaaataaattcaaaaaataaataaattatttcatattttatgtccaactttcattgttattatgattttttttgtatatgtaagtgcttaaatttaatatattttttataaatataaataaacagcgcaaataaaaaaatgtaaaattaattttaaaaaagtccgagatttagatttaaatcaggccggaatttattttgacaaatatttttatcaaatatttaatacaatttttacaattcaaattctttctttcttttggcgttgctgcttctctcacaatttcagagttgttcacttgcaattttgcaagttgagctgcaganaggctgcgtttctttaagcagaaatttttcattggacaacgccttgttacagtaa

SEQ ID NO: 80946 - DNA, 1179 bp, Heterodera glycines
atgatcgatgcttccctatttcaaggtattggtggtgccaaaattgcggacactaaaataatcccatcattacacctttatccgggaggctataaccagcagaagagccgttgggtggacaaatcggatattgacgacctggccaaggctggtcgttcgctgatcatcggcgagtttggcagtttaccgccacaaaatggaggctccgattgggctggaattgtgtcttatgccaaatcaaaagggtaagtcaagtaaatctggctaatatagaaaatgaaatatattgtagtatccccaacagcagggctgcacgaaatcgtttcgttttcgttttagagtttaaaatttttaaatcttcgtttttcggttttcaaaattttatttttcgtttcgtatttcgttttcgtatcaaatgccctttttcgtttcgtttttgtattcttgcagccctgccaccaattaaaggcattgtccagatcagctttttttgctgcgtaccttttccaaaaaatgactaagtttacgattttgagcaaattttttgatgaaaattaggcctttttgtagaaatctccaaggacaaattttattttttaactaagtttattaagaaaatttttcaaatttttcttaaatttaaccaaaaatctatttatatagagaaaaaaatcagaaaaatttcctctaatttgtaagctaacttttgatgctgaacaaataaatcttttggaccaacatgatcagattactccttcatggcgatctgaatctgataaattttatttacatgttaataaggctctctgatgctttttctatcaaaaaggaagatgattaaaatttttaaaaatttttaattcctttttaaacaggccaaaaagtttaggcttaactttttagtgaaaattaatttactcatttttcgagtagtgctcagaagcgcaccaggttttgcagggtaacagctgagaagaatgcttattcatataattatttaactgtcccataatgtttctttaaaaattttagacattgcaattttgcgtacttttccaattttttgcaaaattaattcatgaatattttttcagaaagtgctctgaaacgcacctaattttatttacacgttaacaaggtcctcttaggcttatattatgaataagggtgaagaataaa

SEQ ID NO: 80947 - DNA, 591 bp, Heterodera glycines
atggtgacaaaaatttaaagacatggcaaaagaaattattgaaattcaatttttcgattaaataaaaatctcgaacggaaaatgggtcagtggaaaatgcgtcagtgaatcaggatttctttaaattgagatacgatagtaatattaccgaaatcacaacttgtttttttagggatttgggaaagtttcaattaggtattttgacttttaaaaacttaattgataaaattcagaacaaaattattagacaattttgtccttttgtaataatacaatacttaatgctacagtaactttattttaaaaatactgtattattgacaccttttccactgacgcatttgccaggagccaaaattattattatttttaaaaattaattttcatttaaattatggcacaaaaatttccagcaaataccaagtgtatgtggtggaggagacccgtgacacatttgttgtgccgttgaactcgcagcatgccaacgaaaaggaaaatgccacttttgaatgcgaagtgaacgacaaggacatcgatgtgaaatggttctatgacggtgccgagatcgggatggacgggcggcactttaag

SEQ ID NO: 80948 - DNA, 363 bp, Heterodera glycines
atgaaaattaaaataatattttcaatattatttttcataaatgcaattgataacatttatgctggaaaaataaacgaagaaaaaagttttgacgaaatatttggccaaagatgggacgaaaaattggaggaaaacggagagaatgaaaatgatcaaaatggaagaataattggacaaacggatggccaaaatgagacaaattatgacgagaatattgcacaaagattatttgcagaacaatttgatcaaatttttgatgataattcggaagtgcatgacgagcagagtgtactattgtccacaaattgtgatgaattggaacaagcgccagtaaaatttgtgatcattttataatttttgaaa

SEQ ID NO: 80949 - DNA, 1821 bp, Heterodera glycines
  unsure (1)..(1821): unsure at all n locations
atgtttaggctatcagggcttgaaaaagtttattttgaagcagattttggagataggcgcagtcggagtccgagaccggatgaggttggtaactcgtcgtgattttttcaagaatctgagccttacattttgtcagacattttaccattttttaattattttaattaaattgtcaaaattcaaattataattttatggagagagaggggaggtgaaagatagagagaaagagcaggtagaaagagagagagagagagagaaagagagagagagataaaaaattcaaaattttgactctaaatggtcaaaatttggcggaaatggccaagatttcccgtttttctgctcggcgccaaaaaaaatgttgttttgttcaggtgatggtcaacgaacgcggcgaaatggtggtcgacgcacagtcgcttgttgtcattgagaacccggagcagaacaccgcgggcatggagacagtgaacgatgtgagttcaaaagttaaaaatgcgtttaacaaggttttgatgtgcgtttttttgccaagcgtactctttaaattttgtgtccaaaacacaattaaattttgcaatttttaatggaccaattttgggtgtgttcctcaatcgcttaggttctattagtaaatactcaatactagtagagattttgattgatgccaaatttatagaatttggtcaactaaaaaaataaaataaagaatcttggtttcttataggccattttcggattttgcggtctcgaagcaatagcttaaaaaaatataaacatgttaagctttcgagtgataccaagtttattggatttgggtgacaaagaaaaaagttatagtggaaaaatatgctggggaccaactgacgtagaccgaccgatataggtatatattataaatgttttttgccatcatttattttataattcgaaaattttnntataggtattttttctaagaatcagtgctattaatttgaggtggtcgaaaaaaaacgttttaaaattttttgaaaaaaaagaatttttgaagacgtatttaaaagtcataaattaaaaatttctactaataaaacaaaacagtaacagataaaaattcgaaacttttttattaattaattttattttttattttttcggtgccattcattttttttgttaaaatatcatttttgacagccatttattggtcatcataggcaccagggatggctcggaattctgatttccgaaaaatttggggcctcggaatgccatccctgataggcaccaagttcaagcagtacagtcagtaactgttcagtttattaattatataagtaaatcatcatccaaaagctaaggcaaatttgttaatcgttgcatgattccctccaaattcataaattgtatcacattttcacctttaattaaatgccaaaaatatatgagcaatttttgcatttttcaggttttaattaattccaaataaatttaatttaaaaggaataaaaaactcagggaaaaatatgtgttttaaaaatttcagtcctttttgaatttttaatataagagttctctgattcttgtccatattttggcattttatggccacaatttcgatttcctatttttgccaaattgttggtgccatcccctcaattaactctcttctgtctgttcagctgatgaccaactttggcacgccgcgtgacgtgaagggcaaacatctgaagcgcatttgggagttggagtttccggaggaggcggctgactatcagcaaccgacggcgccggtcaatgccgcgccacagcagcagcaacaggcggcacaggtcg

SEQ ID NO: 80950 - DNA, 133 bp, Heterodera glycines
  unsure (1)..(133): unsure at all n locations
tgaagaaagttgaatntatttacacgaaatgaaaaagtcatttnaattcggctgatcggcctgcaggcgtgattcttcgtttttcttttgtttctgatcaattcgcaacttccgttttgtactatttggattt

SEQ ID NO: 80951 - DNA, 1275 bp, Heterodera glycines
attctttatagggtttacgggtttttccaacagataaaaatttgcatatgcatatttctgcctgaatataatccgaatttcgtaaggtcctcaagccaccgtatcagcacaaatcaagagggaaacacaaaagaatgggtcagacatataatcagatcatcgatcagagagggcacattgattgtaaatccaaaaaagtgatcagagaccttttgattatcagatagaatgatggcattatgaaatttcctgacacataaacgaagtaaatgctgcaattcgccatttaagctacggcatttccgtcgtccatcagttggaacgcggtgatttgggaccggacggcagcaccggcggacgggcgcagggcgcggcgccgagtggggacgaagcggcgattattgtgcacggagtcagcaacaaaataacgcgcttcaatgtgaaattttgtcaaaaatattaatgaaccctcaaaaggcaccattattaattaaataacccagggaacactcattaatatcaattaccaattaaatgatcaattttatcccgagggcatagtattaaaaggtccttatggcactaattatcaattaaacactcccaagggcattatcaatgcgttgcgcgcccgtggcatcgaagcgtacggcaccacgtggggagacggcggcacgacgccggtgggccttgtggagctgaaatgtgcctatgtgaagcagataaggcgggaaagcaattaatgtaattggttttgattaaaccattctcattctcagaagtatgattatcgcggtgagggaatatacgggcaaaaaggtggacgtaattgcctattccatgggctcaccattggcgcggaaggtaattaattaattgatggattggaaatttgaaatttaaattttaagtgctggaatttgttggccttttccaattttttgcttaatcatttgccaatttcaggcaattttgggcggcatttgcgtggacacgcgcgagttgctcggcgtgccgttgacggaacacgtcgatacatttctaagcgtggcgggggtaacaaaaaattaaattgtttcattaaaatgggtatttgttaattaactctccccctaattttggccaataatggcgccgctctgtgcgttttgcccgcccttctgccgcttggcacgtgcaaccgcaaaaacgggttgcactgcgagtccgagtttctggcggatgtgaactcgcgcaggaattacgagggcgccgccacgttcagcatattctcga

SEQ ID NO: 80952 - DNA, 1080 bp, Heterodera glycines
atggcccttctgacggtgaattaccgcgggacgactttccaacgcattgtctaccgggacgactacacactttgggaacttttatgtgagggcaaattgtcaattaaacaaacaccccaataaataattaaaatattcatttattatcatcattaaaaatgaccaactgttcaagaaaaagttacaacaaataaaattatggccaaaaatgccatgaacttgggtttctctgttaagctggtcattgttattaaaagttatggttaaaaatgccatgaaaccctgagtttctctgtaaaatgttttctttgagctttatcttgtcaatcataatgaatttgacaaatttttgatttaaattaaagcaaagcaaattaaaaataaaaattaaaaagagaaataataaaattatttattattaatttttgtttatttgccaattttacttttagcggacgtcggcggagttctcggactttactttggcctgacaattatcgccgtttacgaattggtcgtttttgcacttttggtggaccggaaaaatgccagaaaataattttaaatgccaagaatcgttgagattgaattgaatatcttattgaatacatatatttcaatctgaaaatttatcacattaaaaaaacataattttggagtatggcataaaaaaacatattccgttagcacattttttacttgtagccaaaaaaaattatttatgaattaatgcatcagaaaaataagagattaggataatgaaataatttaaacaattttgacaaaaaaaattgtcgttttgtaagtcttttagagaaaaatagtagagaccggattttccaaaagtgcccgaccggaccggtctgatattttcagaagcaaccggtttccgggcccggtaaaaaccgggcccggtcaggtcgttctctaaaaaatagcctgttttaaacaaccttttggctttttcttccagtttttgttcggcatttttagcaattattttgtgttttaaaatttaattcaaattttattaattgaccttttaaatgtttaagttgattattgttattttaaaataaa

SEQ ID NO: 80953 - DNA, 303 bp, Heterodera glycines
  unsure (1)..(303): unsure at all n locations
atgggggagacaaaaaancagcggagaatgttnggagaggaaaatggaaatggtgcggcaattattggacggaaacaattccatcgtaattaagccaattaattaattaatcaatcaattatcaatcaaaaagcaattaaatttgctgttcaaatttcagaattggtccgtgttggcaaggcgacccaaaggccgtcagagcaacgaatggatggaacgatttgccaaatttttggctcaaaacagcggcgcgcgacttttggaggattttatgaggcaaaaagcaaaataaaaattgtttaa

SEQ ID NO: 80954 - DNA, 569 bp, Heterodera glycines
atggggccgatttgcgacgctatttgccgtctttggacgggttcagttggttccattttgaaagtatgtcaattcttgagtcactgggaattattataattttctcgagcaattcgggatgcgaataataattgcccagccgggcaaacttattggtttttactaattaggtaattataaatgtttgttagacttaaacggtatttaatttattttgtttgactcattgattgattgttactcatcagaatttttcttaattgaataaccagaaaaatttatcttttttgtagtgcccaatttctatacataacgcatcttggaaataattaacttttgctaattgagtaatttgtaactaattgttacttcttatggaatttaatttatttttaaattttaaaagttgcaaaaatttttagctggttttacgtcaaaaattgagtcggtggtcgaaatggttgaatatatttactctgccagcaacaactcttcttcaaatgtggccgaaaaatcacagaaaattatttcaatcgaatttgagcatccgttggatgagccgatcatga

SEQ ID NO: 80955 - DNA, 714 bp, Heterodera glycines
atgcgaccaatcagtagagagagagaaagagaaattattcagtttttaaaaattgcatttttaattattcaaattgaaattgaagcagaaaagaaaaaagtggaacaaaaaccatttgacgaaatatttggagaacaatgggaagaaaaatgtaatgatcaaaatggaaatgatcagaaaaagagagaaatcgttgaaaaattcaacaaaataaaagagaaaactaaacaaaaagaaagaaaatgttcaataaaagaatggagtaaaattgaagtaaaaatagcgaaaaaattggggacaaatcgccaaaacatttataaatggatcaaagaattaggcctatataaatgccacaacaaatcaaaaacggatgaaaaaaaaattgaaattgtgcaaaaatttattgcaaagaaaaatgagtataaacaaaaaagaaaatatttgaaaaaggaatgagagaaaaattatagtgaaatttgtaagaaaatcggagttggccatacggtaattgaaaaatggaagaaacaattcggaatgagtgaaaaaagaataacgaagaaagaaaaaatggaaaaagcgaaaatgtattttcaaatgaagaaatatttttgagaagaattaaatgaggattaaaaaattaatgattataaatttggttcattgttcgcttttttctttacggattataaatgattatttatatatcttttagaa

SEQ ID NO: 80956 - DNA, 765 bp, Heterodera glycines
atgtttgtgagaacgccaccactaacgtggcaagaaaattttggcggggaacagcaattgagaaacagattgttgccagcgacaaggaacaccggcaactcagtggtgattgtggtggatgaaattgaacaaaacgagcgaacggcgatgaatgtaccggttgtgagttctagttcaagcgtgaacaaaagaaatgtgagagaaaatggtttgggagagacaaacgaaagatttttgtcaaacaatttcgatttgggtgtcagtaatttgaacactgcgggattagtgcctacctattcccccgcccatgaatcaaatccagtgagtttattgcatggtattggccgaagagttggcggacatggaaatgctattgggtcggcgagaaatgatgtgcagtatacgcagtcgagattggacggcgcccacccagtttttgtgcgtcaaatggctgtccactcccaactgacagctctgcgtcaatcggctaaccaccgatctggtatagcgacaaattcggccgaacaccttgctctgaacgctcgaacggagaatattctttgccacaacaacccgcagcaacaaatggagaattttcagcagaattttggacggcaaacatttcgtggagttgaaaattttgaacccggaaatcgcaattatgtttgtgatgggcgaaacgcaaacgcagaactgaacaagcccgcgctagccatcatattagacgcttccagattatattttaaaatttttgagccactttaa

SEQ ID NO: 80957 - DNA, 1712 bp, Heterodera glycines
caaaatttttggattgagccaacaattggaattggaaaggacgagaaagtcatagccccaatgacgaatttttcgagtttgtcagtcaaattggacccagggaattccatcgggaaaaatgaagtcgtgagtcatgtcgaagaatgcgaaaattttcttgcaacttcgaatgaatacttcaaaaataattatgtagcaacagatgatcaaaatgtgtcaatcgatagaattttgattgaaattctggaaaaaaggcaattccagattcggaaaaacaaagtctgttggaattggtttcgcaattcaagagtattttcgctgtttccgattcacagctaacccaaacaacccttattcagcatgaaattgagacaggaattgcagcaccagtgagatcgaaaatgagaccagtgccttacgcatatagagaaaaagtggccgaaatgttgaaagattatttagaaagggatttaattcgtccttcatattccccgtgggccagcccagttatcgtgccaaagcgcgatgggtcgctccgtttttgtgttgactatcgtgccgtgaattcgataacacgaaaggatagttttccattgccaaacatagacaatactcttgttactgggaggtaaaaaattttttacaacgcttgatttcatgtcaggctactggcaaattcggatgaaacccgaatcggtcgaaaaaacggcgttcataactgagtttgggctccacgagtttgtggtaatgccgtgggttatcgaatgcagtggccacttttcagcgttttatgaatcgactttttgaaggaatgatcaataaatttttatttgtttatatcgatgatgtgttaattgcttccgaatcacttgaaagccatctcgaacactagaaatgcgtttttgagcgtattgaaaaatcaggcttaaaattgaactctcgaaatgccaatttagtgccgaagaattgccgtttttaggtcacactttgactagaaatggaatcaaaatgaacgaagaaaaaatacaaccagtcaaaaatttaccggttcctaaaacaaaaaaagaattacagtcattattaggcttcttcacttattataggaagtttatttactcggttggaaccattgcagcaccactttttcgtttgttaaagaaggagacaaaatttgaaattggcgaaatggaaaagaatgcaattgataaattgaaagagaaaattttaagtgatgttgtactttatttcccaaattttgaggcagcgaaaaatgacccattgaggaatttcattataatgacggatgccagtaaaattggcatttcggcaattctcagtcagcagaatgaaaaaggcagaattcgtccaatttattttgcctcaaggcaatgtaacaaatttgagtcgttatgcgccgaccgagctggaagcattggcaattcgatttggagtcatcagttcataacaatgattcctactagagtaataacggaccataaatcgctgatcggaatgtttaaaagtaaaaaggaaaccggaaatgcacgagttgacaaatggatccttgaattaaactcaaaattcactctgaaagttgaataccaaccggggaaaaagaatatgattgcggatgttttgtcaagaacattcgagacaaaagagtgtgaaacgttagaaattgctgcgccggaagatattgcattgattgggat

SEQ ID NO: 80958 - DNA, 1394 bp, Heterodera glycines
atggctgtccctcaggaagtaattgacaaaattgaggctggctacaagaagcttcaggtgcacacaatgtgtgtgttaactactctaattttggactaactttcaggcggcggctgattgcaaatcgttgttgaagaagtacctcaccaaggacgtcgtcgatgcatgcaaggacaagcgtaccaagctcggagcgacttttttggacgtcatccagtcgggggttgccaacttggacagtggtgtcggcgtgtatgcgccagatggtcagttaaatagccaatcaatcatcaaccattaaacattcattcagccgaggcttacacactcttcaaaccattgttcgacccgatcatcaacgactatcatggtggctttggaccgagcagcaagcaaccggcaacggaggagaattgcgtcgatatggaatcaaaggtcacagcggtcttcgagcagctgaagagcggtaggcaaccgctaattattttctttgtaacattatgttttagatgccgagttgggaggcacctactatccgctccagggcatgtgccgttattggcccaccggacgcggaattttccataacgccaagaaaacctttttggtgtgggtcaacgaggaagatgtatgtttgtttgttttttattccatcttgatataatttttaattaagcatctccgcatcatttcgatgcaaaatggcggcaatgttggacaagtgctggagcgtctcataaagggagtcaaggccatcgaatcgaaagttccgttttcgcgtgacgaccgtcttggctggctgactttctgtcctaccaacttgggaacgactgttcgcgcgagtgtgcatatccgacttccgaaaatcagcgcaaaacccgaattcaagtccatctgcgacggcctgaaattgcaaatccgcgggattcacggcgaacattccgagaggtaattgtttattgttgtttttgaaacaattgtcctttatttagcgctggcggcgtttatgacatcagaaacaaggcccgtcttggtctcacggagttcgaagcggtgaagcagatgtacgacggagtgaaacacctgatcgaattggagaagaaagcataatgggaggatcgatctatgatgatgactttatattgcataatgtggagattttctagttgttctgaatctcttaggccttagctatttgtatatatgtgatattcctatattgttcatatcgcgcttgtgtgtaaatcagagttcccaagtgtgcttatttctaagatttgtgcttattttgaggggtcggatcttagaaagtaaaaatgtgcttatttctaagattcatgcttatttcagcgttacgtgcttattttgtgcttatttttggatttgaaaataaa

SEQ ID NO: 80959 - DNA, 1459 bp, Heterodera glycines
atgtcagaccgccgaaaagaagtggaaaaaaagatggaaaaagcaatgtaaaattcaaaaatgccaattttcaatttcactttaatttttgttttcctttttttcagtttcatctccggcgacggttggctcaaagtgttcgatttgctgccgccttcccaacttggacttgaaattgcgacgatcagccaccgttttaacacatacgtggacgaccatttcaagacgcgcaaatgggcgctgaaatttattcaaattcgacgcgaatttggaaagaaagggaagaagaaattggaattggccgctttggatggagaaaaattgccaattccgaaaaagccgatgccaaagaaagtggtcggatttgaagccatttcgataaggtgggatggaagaatttcgttgttttcaaatgtaaatgccattttcacagattcatcgaccaaaatgccctcacttttctgcaccgttttcgtcgtcttttcgccgcctctccaattgtttttgccatcggttcgacgagtgatcgcattttgatcttgattttggaattgatttggccaatgttcgcgaaaaacattgattccatgcatttgatggcggatactttcttccgtttgcgtctattcgaatcgtcatttctcaacaaatgtccttcacttcgcattgtcaaattttgtgacgatgacaatttcttcatcaaatttccggccgatgaccatgccgcggcatcggatggacaagtggtggccaaatggcttttcactgccctccctgacaatgtgccgccgaagatgttgaaatgctcgttggacaaggatgatggctttttggagtcggacattgaagacttaaaagaggtgaattcggattgatttgattgacacttaacgctttttgggattcactgaggagtatttctcgcctaaaatgacatgtttcaatcaaaaacgtcctatttgttagcattttattatggccaagtgccatgccaatctttgggtttttgtgccgttccccaatcataaagtttcgttcattgtcatcatttccaatcttttaggcttttgccgaagcttcttccgccgtcaatttcatttttgtcgtccgatttccgccgtcttttgccaagtccgttgtgccattttcgctgatcaacgaattgactcgcgaacaattggcattgaaaagcactcccaatagccgtctttttgtgttcgtccgttctccaattgagcgtgtcgcgagcgaatggacaaaatgggaaaatgaggcgattggctgggattttcttgctcaatcgaatcgaattgacatttatatgtatcatgaggatcaaattggcgatgggtgagcgaatgattgattatttaaaaaacgaattcaaatttattgtttttttatttttaggattctcaacacaatgatcggcccaattaatcggaagaagaagaagtga

SEQ ID NO: 80960 - DNA, 1014 bp, Heterodera glycines
atgcagaatatagcagttaaacatcaaacaaaaagtgagcgctcacttgtccaccataaaaatcagattcagaatgactcccttcgcagtgtcatacatctccgaaaacaacaaccctttgagaatccaaaatctaaaatgcaatatattattatttactcaatttttctcatttacgtgtcccaataataaaactcgcgaaaccgtccgcccgggataatgaatgaatgtggaacatagaggagggaatagcgttcttggtgaatccgaacgtcgtctttgaccttcagatgaattaaaaattaaaatggaaagttgaaatcagccggttactcgtctgcaaaggtcgcgccaaattctgtaaagaaaagggaagcaataagtgcaagggatatcccgaaatcaccacccctcgccaacttaaaaatgagaaggttttgggtaaaagaataaaaatcatatttcagggggttatcagttaacctgtgcaagtggagagcccaacgtttcaatcgataatcgtcgatgtgctgaaacccgtttggatagggagcccagtcgtccgggtacacctcaatcaattcttggcccggtgcttcgaaatgcgcctcgacaaaggcctccagaaccgaaacttcttttaccgaatcgcccaattcgtaaaaatcccgtagagtgctcactaatatttgtcaaaagtataagtgagcgagcgttagtttaggcaaacctgggtcctgcttgagtggcatgtcaacaaaatatttcgagtctggaaagaggtgtgcctcctgaacagcttgaagaatgggcccattacagtagatctggcttagaagtgaaacaacataatatagcatcgaattaaatccttaaattaaattgatcattacgtgggttacagggattgttagaagcgatgatgctgattctatgtcattttttcatgcaatgatttggtggtgtcatgacaactcgtacattgttacaaaggcgactcgtacaattgattag

SEQ ID NO: 80961 - DNA, 825 bp, Heterodera glycines
gatttaattcgatgctatattatgttgtttcacttctaagccagatctactgtaatgggcccattcttcaagctgttcaggaggcacacctctttccagactcgaaatattttgttgacatgccactcaagcaggacccaggtttgcctaaactaacgctcgctcacttatacttttgacaaatattagtgagcactctacgggatttttacgaattgggcgattcggtaaaagaagtttcggttctggaggcctttgtcgaggcgcatttcgaagcaccgggccaagaattgattgaggtgtacccggacgactgggctccctatccaaacgggtttcagcacatcgacgattatcgattgaaacgttgggctctccacttgcacaggttaactgataaccccctgaaatatgatttttattcttttacccaaaaccttctcatttttaagttggcgaggggtggtgatttcgggatatcccttgcacttattgcttcccttttctttacagaatttggcgcgacctttgcagacgagtaaccggctgatttcaactttccattttaatttttaattcatctgaaggtcaaagacgacgttcggattcaccaagaacgctattccctcctctatgttccacattcattcattatcccgggcggacggtttcgcgagttttattattgggacacgtaaatgagaaaaattgagtaaataataatatattgcattttagattttggattctcaaagggttgttgttttcggagatgtatgacactgcgaagggagtcattctgaatctgatttttatggtggacaa

SEQ ID NO: 80962 - DNA, 309 bp, Heterodera glycines
atgataatattagtaagaataatattttaataaatttttggaccttacaatttatatatttagagatattttaattacccattagttaaaagtgctttatttatttaagttattcgttaaaattgacgctttaaatttttaattcacatatattaatagttccggtcgataagtgaaacgagtataattgttatttaccttttttgtgaattaatattgtacattattgattttgaataatattatttctcacaatttatgtgatattttcttatttgtttaaaaatagtaatttattacaataataaa

SEQ ID NO: 80963 - DNA, 1164 bp, Heterodera glycines
atgtcgggttccctaagtgtcggatacccaagtgtcgttcggtccccaaatgtcgggtccccaaatgtcgggtgcccaaatggcgggtccccaagttgcaaatccccaaaaagtcgggtagcccagcaaaaaatctattggcttcgttcatacaaaccgagaggagtcgattggtttttatttagccattttgggcttcggcccatatgaccgatgttttccctaatcataatagcaaaatgaatttaattactatgttcgtttcagcaattttgtgcttcatcaaaaggttcggatcgaccaatgtggtcgcgagtgaaactgatcgcctcgcctcatataacttcgaattgtttcgcaaagacttggccactattcgctacatgcttctggatgacatcgaacttttccagagagtgcctcgatgtaagttgttgaggccgcatttttccgcgttttgcgaccgcggtgaaattaggccacgttctacatcaattttcaaaaatttaaatgatattttttccaaaatatatgtaattaattagttgttgtacagggaccgggaatttgttattttcaagtaaaattataaaaattaataatttaacgcaaaattaaattataatatatttaatcaatatttcaaaccaaatttatttcaaatatttcaaacaataatcattttggactaaatgatcgaatattattagaaatccagatttacatttcaaatcacttttttctgcgcgcttttttcaaaaaacttttgggaaagaagggggtccgggaaaattcaaaatattttaatttctgtagagggattgaaccatgggaagaagattatcgatatcgaaaccgggaaataaattttaaaatccgggaattgggaccgggacctcggatgtccgggaatcgcccggtaccggacccgtacaactctagtaattaggcttcagatttcctaattttttttaaagattacagtaatttttattttttcttcgaaatttattgtatttctttcaggaaaggtactagggaattgcccataaacataaaaattgttatattttgttcattacaattgaaaaattttcttgtattttgtcatttataatctatatatatatatttgctaaatttgagtgaatagcaacacgtaca

SEQ ID NO: 80964 - DNA, 524 bp, Heterodera glycines
atgcaaaggatttcaaacccgaaaaataatttctatttagttgctctgaaaaagttttggaaaccagaggccttcagagtaagtaaaattttatcagcaaatccgagattcctgcataaaatgcttcaattatgcaatatgtttacatgaaattttttttcgataattctagaaatcttcttaataaaaattagttaaaattccgccaggggaaaagaaaatgaaataaattcagagcattacccaaaattgaaaaaaaagtttaaacaaaaatattcaaaaattttcagttcatatttttgtgcataattttttaagatttttaaaaaatccaaattttaatgaaaatttccaacggtcaaatgaaggatttcttcatttttcccagaatctttgtgtccattcatcttcctcctcatagaacgcggaaatgcagtctaagtctaaaaattaatgggaaagaatcatgcaaatataaaatttttattttaattatctaggattgggatttgaaaaataataaa

SEQ ID NO: 80965 - DNA, 834 bp, Heterodera glycines
atggtaattaataaattaattacataaagacttaaatgatacaaaattataaattgtcaattttggtaatgctctgaatttatttcattttcttttcccctggcggaattttaactaatttttattaagaagatttctagaattatcgaaaaaaatttcatgtaaacatattgcataattgaagcattttatgcaggaatctcggatttgctgataaaattttacttactctgaaggcctctggtttccaaaactttttcagagcaactaaattgaaattatttttcgggtttgaaatccattgcatccagccaccaccattgaaaataagtggctggcttggttaaaacaatttttcaaatcgaataaaagcctggggggaacgcatctcggtgatcggagatcgtcggggaggacaggtcgaggataggggacgaggaaaagggaactcgggagagattaacaaccatatttttatataattaataaaacattaaaagttttagtgtccaaaattcaaaaaatggtgggatgaacaatttggagagtggctgagggtgaattcattttacactcatttgaattgtcagaaaaggggattaaatttggcaaacaaaaattttttctatccgtttttaggaccagtgatcaatccgtcagtaagtggacaatccaatccgtcagtggacaatccgtcagtaactaacccataagcaaatttatttttaaaatacccagatttatttaaaataatgtgaaaattatttaagtcgctaaaaatgtgaattaataatttgtgttattttataaaaatgtgaaatgatcttaaaagaa

SEQ ID NO: 80966 - DNA, 1164 bp, Heterodera glycines
ctacaattatcctggagcatattgccaaattggaattttatggtcacacaaacaagaagaagttgggcacatttaaagcaacatcagtggcacaaattgacgtcaaaacggagggtaattagaacaaattatttattaagaaatataattaaaaaaataataaaataattaaagaaaaaatgttttaaaatataagtcgtaaatttttttatttgggaattcattcaataatttaaataaaaatttatttaaacaaaattctaataaaatttataaaatttaaattaaatttcactttagtaaatttttttgaataaaattaattctaataaaatttttaattatttaaacaaaattcaaataaaaattataatataatattttaaaattagattaatttttaatttttaaaataaaatttttcaggcgatttgatcaaagccaacctaacactgcccactttggtgctcaccgacattggcactgacataaaaagtggcatgacccaagatgggctcgactcactgaccggcctggtgaaggacaaagtgcccgaggttcgaatttttgaaaattttaagaaatttaaaaaatttttttgaaaatttcagtcggcaaacaaaaaattggcaaagggatgcaaattggatttgccaccaggcgttggtggcctaccaattgtaagagcaaattttttattataatgaatttcttttatgaaaaatatttaattaattaccattttgaaatattaattaattaattagttaattaaatttcattcaattttatataaatttattaattagtgtatttttttccaaatattttttcaattttttttactaataatttgttattttaaaaatttcggcgtaaagcaaatctcggtttcgggctcaaataattattatatttaaataaatttattttctttttagcgtattttgaagcccgaagtgaattttgtggcccacgcggttcatttgaagtccaattttgagctgtattcaactgatggctcttcaccgcttggcgccagcgaaccatgcgaatgatttaactaattaattttgcatttttttaaaaaatttctacattttaattcgtttgaccatttttgtatataatttcttttgttgtaacacttaaaaaacaaataaa

SEQ ID NO: 80967 - DNA, 705 bp, Heterodera glycines
atgtcggacatttatgtcgaacgcatagaaacagctaaatatgcaattgagttatatctggacaagccattgcccattcttccgcaaggggtgttaacctctcaacagagacataatttaatttgtgatcaaagggaatggaaagaagttgcggacgagattcagacgcaagtggacgaaataaaggcagcaagggcattgtacaatcaagaggcttctacgcttcacggcgatgaaaaaacggagtttcaacgccagtatcgtgcatcagtcaacgcaaacgatctgcaaaatttgttgcgaagagcaaatcataaattggccgatacccgcacgctgaaagggaacattgatcgtcttcttcaagatgggcccggaggaacggcacgccgaaacattgccttgccaaaattaaacctaaaggagttcgatggcagtaattgggatgacttttggccattattcgaatcgacaatacatgctgatgctgatttggattacgtacaaaaaatgagttatttggattccctgttgaggggtgaagccaaaaaggtcattcaaggacttttgcccttctccagggataattatgatctctcggtgtccttattaaaggacaagtatgggaaaaatgaaaatttaatcagagatttacataatcaattggcccggctctcaattctaagtctcttggagacgacatga

SEQ ID NO: 80968 - DNA, 1355 bp, Heterodera glycines
atgcccgaagtgcgggagccaaagttcaattttgggtttaactctgccgggacactaattgaagtggtcaaaagtctgggccaaatttgggcattcttttttgataagcagctcagaaaacggtttggcacctattggaaatgcatgagtgagctcagtaattacaagcgtaagcccaaattggcaaatgaacgagaaatcgtcgagattttggagacgaatgccctgaggctttaccaacattatgaatatctgtttaacaatagcgaaacggccactctgagtcccaactcaaagttggaaaatttattccgaactcttcgcaaagtttttgataagaatttggaagaaatgtggagcaaaatggaaatgatcaagtcatcattgaatgaactaaatgtggaaatttcagagatgccattttatgacattgacaaagcggtgagttcaaagagaaagttactgccaataaactaattatgcacaattaaataattcattaatatattcgtcatttatttgatttctgctgatcttcagatcaaggacagtgcctttcttacatttatcatcgacagaaacaatctgaaaatctttagtatgatattaagcgctaaaactttttttaacgtttttggatcggtgcataaaataaatgtcggcacttatcctgagaatgtggtaggatatttggcgcaagaatatgaagcttatcttggcattgtgcatttgctgagagagaaatggcaatgtgccaatgttttgcacgagcagaaaaaatgcgaaacgttccgcgattatttggacattttgtatgaatttttgttccatatgtattatgaaggtaatcacacagaaaagacaacaaaataatttaattaaaaaatatttaagggcaaaatttagcgatggaacaaaataaatgcgcggttaggccaaattttgtgcttggcaacgaaacgaagattctgtcactgattgaactgttgaagaaattgggccgaatttcggcattctttttttctccaaaatattcaatgactttcgcccacaaatgggaagtgtttgtgcattataattccgagctaaaattggtgattgaccagcaattagaaaatgaaaggacccaacaatgtccaacacttgtgaaaagcattaaacatatgaagatccgatcgcagaaaaggaagccgaccatggatttaagcacaatggcacaaattagggggaactttgtcaatttgctggcgatatgtgccgaaacagtgaaaaggatgaatttgaaggacgtatttggcgagtacgataacaactgggattggttgttttcaaacaaagaccaattaacggtttaa

SEQ ID NO: 80969 - DNA, 1415 bp, Heterodera glycines
atgtcattgaaccgtttttgtgccatttgttgttcccaaatgtatcggtgccattggtcacataaaattagcaaatatttattggcaattattcttttgttcgctttggcaatttctgcaccaattctttggcattctgtgtgctttcgattgtctgaagtgagaacaccgtttgaggaaggacaacacaaaattgtcggcctcgtgttcatggagatttcaacccaagtaaaaaataggagtataaaaatataggaaaattaattttaaaattaaaaaaaaattttgtatgaaaattgtaaatttttttaatatgggcgggaatggaggcgctactcaaaatatttttgtcagctaatacaaaatgagttatttaacattggtgattttttttaaagttccaaatttatttttcttctaaatttgattttcgaatcttttttggataaccggccgttggaattcacagcttcggtttacaaatgtttgatattaattatttttttttgaattttcttcattttagcaaatttattacaatatcaccaaaatgtttgccatttgccacttggcttttctgctctttgcttatccgttaatgtgccgaagggtcagacaaatgaatttgaagcagcgcagtcaccgtgttgaagttcgaatgtgttacgccatcattttgctttcaattgcaaatcttctcttcgcaatttatctaatcacttggtaattttaaactcttattgaatagcaaataattaaaaataattcatcaatttttccttaaaaagtcaaaaaagagcaatcatcaaaatcccaaaaagctgaaaaacgccaaaaaagtgtgaaggaagcattaaacaaagtttaaaatacttttttgagtcattttaaggccatttgattcagtagaaaaaaagtcattttttaaaatctaaaaactaattgttttggccgtttttagcaactataaattagagccctagtaatatgtcccaatcctcaaaattgctcagaaaggaattagggcactgaatcgtccattttttaaaagggaatccgaaaccaaaaatgaaagaaaaaaaaactataaaatcaattttcttgataaaaaatgagttgactacaataaaagccatttatggtttagaaaagagtaagcaaagtattgtaataattgtctatttaaagcatcattaaatttagggaaattctgtcccgagggcatgccgaactttcaccaattgccgaatggattctccttatgattgtcgatttttacgacttgaacagtccttatggactgataattacttcaaaaattatacgtaaatacacgttgcccttctgtttattaatgcgtcgaaatgaaataaatatataatttttaattatactaaaatattatgtttaataaa

SEQ ID NO: 80970 - DNA, 559 bp, Heterodera glycines
atggtatatcatttatatgcattttcctagttacagctcggaatgttcccttgtaaggtgtataaaacgtgtttcagagggttttcggggtcgctaatcacgaatcaagcatccatttcgcccaattccgaaccccggactcgattgattgtcgttaagctgtgttgtctgtcagctgactggttcttacgcggcctattttaattcttgagaaaatttagaattcttagaggtgtattttctgaaattttttgggtcatttcttggtgtcgtttttattgcaaaaaaataggcaccaaaaatggcgaacaaggtacaaaatatgtaggatatcctacgatacttttattctgaaaagtcgtcttctgaaagcgccataaaaaattttattttcaattcgttgctgtattaattttttttgatcctacactgtgtaacattagaataaggacaccctatttttgggagtttgaccacttcccatgaaccgatcgagttgaaattttaactgtacgtagcaattctgaaaatattaagattctaaaattgagaacccgaa

SEQ ID NO: 80971 - DNA, 862 bp, Heterodera glycines
atggacggaccgacaaaggcaaaaggcgccgccccaccaaacgccgcggggccaatgggacttttggtgattttttaattgcataattaaataaatcaaaattcagcatttattgaatggcaatgaaaagggaaaagcgccctctggcgaaagtaagccaattttggggcagaagccgagcgtagaacggcaaaagagggacgttttggggcacgccggcggatacgtcggaggatgggaccatcccattgactcgacactgtaagaacataaatttaataaaaatggtatattcaaaaatggaaaatgtattttaaattaaataattattattaatttgaattattatttttaaaaagtttagaaaattaaaatatttatttcttttgaatttaattgtcctttattttagtgattgggtaaagagtcagtggaatgatgccaattggctcgccgatgttgtcaacagaaacgggtgggaaaataccggctctcctaccggcggacgatgaatcagtgaattgtgccgacaaaagaacgaaagatgatggcatttttgtttgggaaggaatttaattcgacatttcgggtgaccaaaaagactttcctttttagttttctatgtattaataaaatagcattttcttcactgtttacagattggtcggtgtgataaaaaattttcatactcttttggatagttttgcggttaagcaaaaacggcaaaaatcacttactgacgaaatcaccgggaaccgttttggcccagccgttgggctataacttttttttattcaaccaaatctgacgatcttgatatcattcgaaagccattcacatttcaatttggcgcatgctttaa

SEQ ID NO: 80972 - DNA, 1665 bp, Heterodera glycines
atgtcttctgacgaatcgacgacttcttctgccagtgctgtgagcgttcagctgcgtgaagtgcccatcaaagacttcaatgacgtgcttccggtgctgcagaaaacgctcaaccaattggaacatccgttcatcaagaaggctgaagaaataagcggaatggaacgtgaaaaggtggagccagcctaatctcttgtttcttcttttaatttacactgttttgcccgggttttcagctcttctacatcacttcctctcttgtgctgctcgtgttgatgtactgccctggcaatttgtttctctctactcttatcagtgcgttttgaggagagagtgccgtttttgtgcagcctctgctaactaatcgctttcctttgtttaagctgtggcctacccaatgtacgcgagcttgttgaccctcaacactcaaaacacatgtgagttttctgctgtgctttctctccgagtacaaagccaattccccaatttccagcggaatacacccagtggctcgtttattggtgcgtgttcgccgagttttgccagttggaccttctctttggctctatcaatggctgccttctgctgctgtacgtgcctttgaagaccgtctttctgctctacttggcccttccgcaaacttatggcgctcacaacatgtacgtgaagcatatccgcaaatggattgccatgacgaacgtattggacaagatgaagaagatgttgtgatcgaggagacaacatatcactgtgtaatgtgtgtaggatgattctttgttgtgattcctatattgtgtgtatgtattgtttgtggagtaaagccctataattgtataaacaatatttctaacagcttcatcttcatgcgcacttttttaaactaattcgactgttaggcatccaaatttgtaagctcaccggtggtacttatgctgtttacagaccataaaaaaagtttataaatcatacataaaacatttctagggggtttcgggatccttgatcacgaatctgacatccatttcgacctatttcgaatcctgggcccgaattcgcacaaaagtcaaaattaatttttcacttaaattccctttatgttagaatctaaacagaattcaggtccgcggttcggaattggtcgaaatgggtatcagattcgtggtcagcgagcccgaaaaccacgtacaaatgtttatatgtttgatttataaaaactattttttttatagtgcgtaaacgacataagtaccagctcaccatttcggaattaaaaatgtgattttttttcaatttcggcaatgatttcattaacaagatgaacagttgcacacttttgcctactccgaacccgaaaccaaattcgaacaaaaggtcgaaaacctcgaattttttaaaaatttgcttttatgttagaatctgaacaaactgatcattttttggtgtttcaatgatttatgactacttttagctttttttaaatcaattttatggcagtagtgagaattttcaaaaattcaaattttcgtaataattttcatattcgtgatcggcgacctcgaaaccccctgggttgctaaagccactacccatgcgcgtttcgtaaaaccgccagcgcgtttcgtaatccgccaatgggttcgaaacaaaaaatatgtaacaaataaa

SEQ ID NO: 80973 - DNA, 1120 bp, Heterodera glycines
atgtggtgcccagtgtcgatgttcctccagccggtgccgctgcggtcttctgcgatgcggtggcgatgcgttgcccagtgtcgatgttcctccagccggtgccgctgcggtcttctgcgatgcggtggcgatgcgttgcccagtgtcgatgttcctccagccggtgccgctgcggtcttctgcgatgcggtggcgatgcggtgcccagtgtcgatgttcctccagccggtgccgctgcggtcttctgcgatgcggtgcccagtgtcgatgttcctccagccggtgccgctgcggtcttctgcgatgcggtggcgatgcggtgcccagtgtcgatgttcctccagccggtgccgctgcggtcttctgcgatgcggtggcgatgcggtgcccagtgtcgatgttcctccagccggtgccgctgcggtcttctgcgatgcggtgcccagtgtcgatgttcctccagccggtgccgctgcggtcttctgcgatgcggtgcccagtgccgatgttcctccagccggtgccgctgcggtcttctgcgatgcggtgcccagtgccgatgttcctccagccggtgccgcttaatgctgcggcagtggacagaaggtagcgatgcttctgtcgtggctgattttttaaaatcatttcccttttcattttcagaacacggaagagccgcaaatgccggcgggacaggaaggggcggaggccagcgccaaaccgacgggacagagcgcagcacctggtggaacttccgcggtgggacagctgccagccgaagcctccaagaaatcattggctccagcggggaccggatcggcgggtgagaggagagggacgggcgggcggggaagcgtttttttgttcaccctaacatttttcctcattttcagtgccctcagcgtacgcggcgcccggcacggggacggctatgagcacgacatcgcagaagtcagcagcgcctgctggaggagcctcggcactgagcaccgcgtcgcagaagtcagccgccggaggaaccgtgtcacagaagtcagcagcgcctgctggaggagcgtcggcactgggcaccgcgtcgcagaagtcggcagctggaggagccgcgtcgcagaaggcctga

SEQ ID NO: 80974 - DNA, 435 bp, Heterodera glycines
atgttcggcacattgcgattcattgcgacactttttgctgttactgcactttttcttgatgagtaagtgacaaatttgtttttcttttaacttgggtttggtggtatcaattttcacttaattatagcgcattggcatttggtccccgcgcgtttctgaagcgccaagcgcctcccagcgcagaaatggcaccaccaaaagcggccatggaccagcaagttgcgatggagctacagcagcagcagaaacattttgagcgctttgtgatggagccgcagcgtgtggtcccattcgtgccgtcgccagctactgcttagtacggtggcggtgttggtggtgtatcgtatagcggcgccgcattcgcgccccaacaactgcagcagaagcggttcgattacgtaccgacagacccctacagctatgagaggtaataaa

SEQ ID NO: 80975 - DNA, 1409 bp, Heterodera glycines
atgtcgttgaaccaagtgcgttaatattcactgaatatctattttcaacactttcaaaattttttggctcaaatttattacatctttcaaaactcccttagaattaattattcgctaattgccttttgatttgccctctaaattttaaaagatcgttcgttccagaggctgtcttgtaacaacggcgctggacttactgcatcatttgccccaacgccgtatggccaatcgcctcccgaccaaaatcaagccatgcttgccgtcccgatggcaattcgtccaacctccggcgcaccaccgacaatgatccaatacgggaccacgaccgcgatgtacttcaatgcaccggcccaacagcaccaaatgatggtcagcagcagcggcacaagcagcagtgccgaacagcaacaagctgctgcagtccatgcctatcaacagcagcaacaacaacaccaccacgaacagcaaatgttgtacgccacgggcaccatggccggcgggtcacagcagcagcaacaaccacagcagcagcagcatttcttcccaccgcaaggagggccaagcggagcagcacacccgggtaaaagttcactcattcccaacagcaacatttaaatgacacaaattcgtatgtaattcgaaattactgtccaggaaccccttcaccatttcttcctccgtccatggcgcgacaaccgtccttaaccacaacagctgcgccttcctcttccccggccacaccggtgtcaactccgaccaattttttggaacgcaacgcggacattgaggcgctggtggcgcgcggagtgcacacgtggaccgtaagatttaaaaaattttgcttatgggcccacttatattttttatccacagaaggaagaagtgtccaaatgggtcaatttcgtcaccggctccgaaaccaacggggaccgttttgtcgaggaggacgtggacggcgcttcgctgctttgcctccagtcggagcagttgaaaacggagctgaagttcaagctgggcccgcacataaaaatttggagcgctttggaggcgcttaaacggacgatgatgtgctgaataatggagggagggatctcgcgaagcaaatataaatctgctgctgacgaatggtcatatattgtagttctcctgtgtatttctatcacattgaatttacctaattattttcatttatataaaaatatttattgtccgtaactctctcttttctcgcctttcatatacaaacacgcttcaaatgcgaagtataaaagtatgtttgttttttttggtaactgatcgggtcctaatatgtgaccataacccatatcgctcagttgacatcgccagcccttagggattggtaaccatcccgctgtagcttttaaattccagtttcaataactattaaa

SEQ ID NO: 80976 - DNA, 310 bp, Heterodera glycines
acaaacatacttttatacttcgcatttgaagcgtgtttgtatatgaaaggcgagaaaagagagagttacggacaataaatatttttatataaatgaaaataattaggtaaattcaatgtgatagaaatacacaggagaactacaatatatgaccattcgtcagcagcagatttatatttgcttcgcgagatccctccctccattattcagcacatcatcgtccgtttaagcgcctccaaagcgctccaaatttttatgtgcgggcccagcttgaacttcagctccgttttcaactgctccgactggaggc

SEQ ID NO: 80977 - DNA, 1197 bp, Heterodera glycines
  unsure (1)..(1197): unsure at all n locations
atgcttcgtgccggctcttcagcatcaacttcatcccgactctcaaaggaagaaattgatgaaattcttgacaggtattcgtagtaaaaaaaataatacaaaaattatggggttttggatgtagcaattaccaagaaaatataaaagaaaaaaacatttcccggtagaattgaacctcactgaatcattcatccatattttctggtcgttgcaatttagatagaatttcgaccatttccgttcccggcaaaaatacgtacaaaaaacgagtgtttttcaagggttaatgatgctgtcccaatcctaaattttttaattgtcggttttagtttttttttcaaccataaaaagcaacttaactgacaaaaaattttcaaaaaaattcgtaaaattaatttcgagtttttttagtccctatgagacgaggtacacctattccgactcagccgcctacaagccgcacattggctctcatgactacgtgcatcctcggctttgtcgtcgttttccagcaacccaaataccacgctcggcatcgccaccattcttgacatacccaacgggcacatggcaaaattattggtaaataatgatttaaactccggttttcaaccaaaaattcaattttataatatgtaatttttgtaacatcaattccgttggaaaatgcattttaaggcgtcgtcctgatcaatggacatggactcaactgttcttttatgcagtgcagttttttgcaatttttgcctacaccgttgttcaatacgcgttagtgcgaggtatgtttttgtttctgaattaagtccgactctttttttttgatttcacgatttaattaatttttctttgattttaaaaattttgtatagcagagaatttcttttcacgccgaaccatttttgagacggtgccaacaaaattttatacaaaaaatatcaactccttgcactatgtttcacaaggcatttattaatttggattcaactttaattaacccacaaatggttgtanaatgggaagataaacggaaaaaatagtacacctattgacattgatttccgtttttaatttcagtttattacgccttccgctatctgaccactcgggctgcttggtatgccatcaaatacaccattctttggccaattttggcaccgtataatgccgcagtcagctactacaataaaggcggatttg

SEQ ID NO: 80978 - DNA, 810 bp, Heterodera glycines
ctgacagatgacaaaagacagcagcagcagaagcgaattaataaccgcgaacaatataatgacatgagtacgaattatgaaataaaaaatttgttaaatttttttgcaccattttaaaaatttattattattttggggataagaaaaccggatgacgcattttaaaacaccaaaaatcggataaagttttttcatggtaatggcatggcaccctgaaattttccagttctgatggatttggcaaatcaaatttagggtaattaattttaattagcacatttaaattttaagtgtccagcagcagcagcagtggttgttggactccagcacagctcattagctctgatgaatggtcaaaatggacggtgaatgaggcggatttatcaattcggccatgcccaaaaacggttcaattgtcacttcgattgccaaatggacaaatggagcgcatccgaatgtggaaagcagcgccattgaatgtaaaaattattttttcaaatttccacagaaaatataattaaaaaattacaagcaaaattataaaaaaatgatcaaaagaatgaattttgattaaaatactgtaaataaataaatttgcttattattatatttagtgagaatgtcaaaatatcaattttaaaaatctaaaacaaaaattgatttaattaatttttaacaatttttcttttaattaaggccgtcttctcaatgctccttgctaaagggcataattattcgtcaaacaattaccaattggtgttggactatccaagacgagaatttgttctctgcccacaagtggctaattaa

SEQ ID NO: 80979 - DNA, 2057 bp, Heterodera glycines
atgggcacatttaaattacggttctgtgccccctatatgttcacagcgttacgtgccgtatttgaccatccacccgtgatcaccagtgaagatctgatccgttcgatagcggaaaagccgcttaaattgatgccaaatccggcacaaagtggtgccagctttttacgcactaatgacgcccaattcttcatcaaatcggctgatcaaaatgaaattaaattcttccacacatttacagatagaatgtatttttttaaattactaattttacctttagcaatttttttttgtataattttcggtgcccattttctgaactattttgaaaattgctattaagatttaaatatttattgggccgaaaaacaaaaatttagaggcaaacagaaagaacaaataaatttttttgttggcggaatttgggactattatgaatattttcgtgaccaattgatcaatggcaaacgcacacttttgcccaaatattttgcattatttgatctgaaggttgtctttattaaattaaatgatttatttcaaaagttcatacaattctaataattatcattcctatgttttataattacctcatatttattttaataattttaatcattctctttttcaagcactctaaaagcaaggaacatcaaaattttataatgataaacagcgttttcccgcaaaactttccaaaaattcactacaaatttgatctgaaaggcgcttcaataaatcggaaggaattaaaatttggcaccagtgacgaagcacagcacaaaacatgccgcgatttggactttttccgcttcaacagcgaggacaaaaatggtacaatggcggagggactgtttcggcacggcatttgcattggcagggaaaagcatgaagaattggtacaacttttggaggatgacacatgggtaagaaaggggggtggggtattttttataagaagttaaattctaaaaaaatttacaataaaactaaaagagagatttggtttttaattattgaatttgattattataaaattcaaatttagtaatttaaatttcagtttttaaaagcacacaatattatggactacagtttattgatggctgtgcattttgttggaaaacaaaaattaccggatgaatggcttgatgagctgtaagtgtagtaattatagataattttttaattattcttctagttttggataattttcaattaaatttccaattaaaaaataatttattaaataagttctattttaaaaaccgaaaaactttttcaaaatattactacatattgtttattttttaggccatttggcgtgttccatggcaaatgtaacaattgcaaaaatccgtttcgtaatgtgtacgaaaatgaccaaaagctgttaattagcattggcataatcgacactttgcaaacatatgattatccccgagaactcgaagatatatacaaatcttcgatgtccatttttagaaaggtatgaaaattggccgaaaatgacaaaatgtcggcaaaaaatgtttatatttttgaatttagaaagatggctttctttttcctccagaaacacggcaaaaatatgtaaaaattatttattataaaaatattaatttagatttacttaaattatcttaattaaggaaacaaaaaatttttattgtaatttttaaaaaatatagctatatttttaatattaaaaattaagtatctttttattaataaataaataatttatttttgaaattctttttaacttaaatgatgtttagaagccaaactcggtcaaacatccgtccgtttatcgtaatcgctttctggaagccattttgaccgtatttttacgaccgaattgcatcagttcgccagaaaatgatgaaattattcatgaaaaaagagaatataaagccgaaagtcaatcgaaggaattcattttgaaagcaatggcagaaaaaagtgatcagacacaacagaaattgattagtccgtcgaggaaacaattggaacgacggaagcagcaagaaaaaattctggaagacctacggaattag

SEQ ID NO: 80980 - DNA, 1522 bp, Heterodera glycines
atgtcaatttttgggtgtgttggtgaaatgtccgaatttggattagccggcgaaatgtccatacacacctttctcattgtaattttttgccatactgttaaacgaaaaaaaattttgaccataaaaaatttagaaaacttcaactataacacgattaaaccatgtgttatgacttttgttttaaaaaaaataatggaattttgtgaatttgtttttaagtttcgaataaatttagctaggcctgatattagtgctgacaaatggttgctgagcacgaagttttgagccgctttaatctcgaaaatttttgtaaatcagcaagtcgagaaaaggaattgaaaaaagtgaaatgaagttgacaaatttgtaaacgattggtcccccatacacagaattttgttttctttgtgtgatcattgattgatcagaatcagagcaacgacggcggtgagcccggacgatcgggcacttggccattttcgatctaaatttaatgaggtgaaattatcacattgaactgaatgttttaagcaaaattggtgcgtgaaacacaaaacaatttccttattaagctcgggcggaagtcgtatttcgatagctatgaaactttttaggcagcgcccaaaacgctaacgcacgcgaatcgccaatttttttttcttgcatcatttttcctcgtcattcttgtcttgctccctaaaatttatttccaagagccaaccttaattccattcatcaaaagcaattttttggttatttaattttttttttttttgtaaggcccaatcatcgcccctcccctccactggtgatgagaaaactttctgaggttgtgatgaggataatggtgatgatacacccaccacctgttgtaccaccaactgcttacagcaacaccaacaacacaacacatcatcacaaccaccaactcattcggcggcggggggggggggggggcattttgagtcacacacaaaaaaattttctgccctccggcgatcgccgagtgatttttccacttcttcaccttctgctggcgcctggcttaataatcataaaaaataattattgcgcagattcgttgtcttcgtcgcctcacagatcagccagcaccagcagcagaagggagcaacaagcaacaagttgaagccataataagtgaatgggtgggcaaatgattggtgaaaattatgtgacgaaaaaaaagttgggtggtcgtagttgatgaggtggcggcgcacacacacacaataatcaagttgaaggtgctgccatagtaatttgtattagggccttagccatcggggtgggaattgatcaattgatcgcaggagccggagggcgaaccaatttttctttagaattttacaaattttgcaagtatatttaatttttttttaaatattgatagcatgtttgataaaattttacagctgtgaaatttctcatggtgcatggttcatttaatttttctaattttttttttaccattggcatcggttttttggggaacgtggaatta

SEQ ID NO: 80981 - DNA, 399 bp, Heterodera glycines
atgacaaatgaatttaagcaaaaaagaaaatattcaacaaaagaatggcaacaaaattatgccgaaatttgtaagaaaattggagttggctatgaaacaattaaaaaatggaagaaacaatttggcattagcagtaaacgaataacgaagaatgaaaaaatggaaaaaatgaatatttattggcaaacaaaaatagaaaatccgaaaatgagtgagaaagaaattgcaaagatgttgaaaattgatagaaatagtataagtaattggaagaaacaagttgagatggaataatggacgattattaattcggaaaaattaaaaaaaattttaataggcctatttccgataaagttactcacattttacaatttatatatgtcgatttgttagaaggttata

SEQ ID NO: 80982 - DNA, 1052 bp, Heterodera glycines
atgaaattccgcctattataccttacaattttattttttgtgattgaaatcaatcaaattaaaatagaaaataaaaaactaccgcaaaaatcatttgatgaaatatttggagaaaaatgggaagaaaaagaaggaaaacaacgaaatgaactcaaaaaacgagaaataattagaacattcaacaaaataaaagagaaaataaaggaaaaaggaagaaaatatccaagaaaagaatggaataaaattgatcagaaaatagcgaaaaaattggggacaaatcgcaattacattcaaaaatggatcaaagaattggggcttaatcaaaaaagacacaaaagtcacaaatcaaaaactgatgaagaaaaacgtcaaattattcaaaaatttattgaaatgaaaaatgaatttaagcaaaaaagaaattattcaagaaaagaatggcgccaaaattatgccgaaatttgtaagaaaattggagttggctatgacacaattagtaaatggaagaaacaatttggcattagctgtaaaataacggagaaagaaaaaatggaaaaaatgaaaaaatattggaaaataaaaagtgaaaatccaaaaatgagtgacaaagaaattgctaaaatattgcaaattgatagaaggaccatttcaaaatggaagaaacagtttggaggagagattttggaggatttaaatggatgattataaaaaaaattggataaattttcaaacaagaaaattatttacgacataaaaactgattaattcttatattttatagaaccattgtcaaaataactggcataaaatccgtttatttttctcaattggatacgctgaatttgcttctattgtaaataattttttcttagtaacgaaccatcattgttatgatttccgaccagggctgcacgcaattacggattgcggatttcgggaaattacggggtttttggacccccgtaattacggattacggatttccgtaactgagaaattcgccgcaattacggattacggatttccgtaattgcaaacccactgtccatata

SEQ ID NO: 80983 - DNA, 795 bp, Heterodera glycines
atggctggacaagcagatgttcaggtgagggagcaatactgaaaaggggtggactcgaacaaataaaggccgaaattgccaactaagccggtattcaggtctaagtccaaacagaaactagtagacgtttaaatctcgtttaaacaaccatataagattgccaggtttccatacataaattttttaattttcaagaacatataaatttttaagcacaaaggtttttaaagttactaaattttagtcatttatataaaattttatataatgaaaaactgaaatatatcattgcttcaaaaaaaatattgaacccatttttagactaaaaatagaaaatcgtaaaatttgaattttcgactttttgttcgaattcgggtccgaggaccgtaattggtcgaaatgggtgcagaattcatgatcagcaaccccgaaaaccccataaaaagtgttttttatgacttttgaaaacacaaaaaattttcgaaaaaaggaggggggggggacaaattgcactattaccccaaaattcattgactcttcattttagtattcgtcagcatcagaagcaatggcctactggcgctctactcctaaccccgaatccggattcaaagatttttcgaaattttaaatttccatatcttttttgttaatgttgctaaagcattggtttgatgtgtacaaccaacatgtgtgtcagggatggcacggaattccgatttccgaaatttttgataaaaagtcggaattttttttttccaaaaatttaggatttgtacaatttttgttaataaa

SEQ ID NO: 80984 - DNA, 967 bp, Heterodera glycines
atgcaatctgaaaacgtgccacctaaaccactccaaaatgaggcagaaaaattggagaaacagttgctgaaggcgaaagaaaagaagcgaagtgaagagaagatcacggaagcggttggcaaaatgatggatgagctcaagagctcgatcaaagaagagatcaaagtcgctgcggaggatttgtgggccaaaaccgagcctttgctgaaggagcaaaagcgagtgactgcagcaatggtcgaatctctggacgaattcatggctggaaaaaatggaattgacgaagaggaaggcacgtgtccggcaccagcaagtgatcagcggtcggaaggcacagtggagaaaagctcatcggtggaagatggagagcctgcccaggctttgcccccacagaacccaggccaagggccaaaagagcaaattaatcgggcgcctctgggaaagagaggcaggggctatgccatgggagggcatggccctagaggacaatggaagaatggaggccagaaaacccaaaagcgcgtgggctatctggtccgtcagctggagcgcgaatgaacgacgagacgtctcgaaggaggagagggattgcggtgtctgcatttcggtcttttttatttttgtttttggcatttttgcattgacccattttccaccaattctcatcgtaaacattttatccatccacatctctcaatccttaccaaatccttctctcaaaaaaattctctctccgctttgtgtaatgtggcctagaccattctcacccgcttggcttcgcttgactcctcccaaaattgtgccgtatttaagctctctttctgctttggatttcacccttcttactgccattctcccttcctacttactctccctttgcttactcttaaccaattttgctataaccaattttgcttattcttactcttaaacgattttgctttgctttaataactgttttgcttta

SEQ ID NO: 80985 - DNA, 1042 bp, Heterodera glycines
atgagcaatcaaaattgttctaattcacaaagtggagaaaatgaaattggctccgattttgacccagttttcttcaccgctgaagaaaatggaaattttgcaaatattctaaaccgaatgagactttttgagtcggctgtttgccggcaatttcggagattggaatacgagttagcggagataaacgggatgttccaaaaatcgaatgagaacttacgtggtggaaaattggaacaatcaatggctgatttggaagaccgtgaagaattggaccattttcagatggaggaaaaggtcataaaaattgagggaagaatagatacggtcggtttaagtctgaaaagtcttgagaagtttacgaaagtcagatttaacaaaataattgagaaaatgaaaagtgaaatggcgaaaatgacagaagacattgatattttgcgaaagcgagttgaatttctggaaatggaggaagtgtcagacgaaaacctatgggctgagaatggacattcctttgagcatgagcaatttcttaatgaggacccaccaaattccggagaaaactgtgaaataatgatctctgacccatttcttggtggaattgccccgttggaaagttatgacggaaacccgagtatttcattttcgaggtggtcctcaaaattcgaagacatgctttcgctctatccacagcttactgaggcgcagaaattaagtcgtttaagaattcttttgattggacaagcccgcgccgagttggaatcgatggaaccgcaaccggaaaacttagctagtgcattaaattatttaagacaaaaatttgaaaatgagaatacacgctcaattgcccgtcaggcactctcaatctgtaaacaagcgccggtagagcgagtttacgagtccgccaatcgattaaatgaggcaataaggactgcactggccggagagggtgaagacgtgataaggaaaagacttgaagaatttgtggaaagattaacccccgacctacaatttgaagttaaagctggaaggccaactaattattcaa

SEQ ID NO: 80986 - DNA, 91 bp, Heterodera glycines
tttttgggccccggggtcgtttgggccccaacccaaaaatagaaaaatgtgcttttttaaaaattaagattctaaaaactaagcctgaggg

SEQ ID NO: 80987 - DNA, 3118 bp, Heterodera glycines
atgggactcagtcccgagactcaatcgggaaaagatcccaatttgacgactgatcaatggggtgatcagaagcaaggatgtgatcagaatttttgaaaaaacattgccaaattggttagagaccggacgggggattagagtttccgatcggggacttattacacagggaagtggcaatgattctgtggccgagctacgatcggccactaccgttatgattacggtaaagggatgccgcccaatgagaactgtccggtctctaatttgagttggcaaaaaactgtattcaactgttggcaaaagccattgtgtttcagcaattgctcgactcgcctttgatggtgggtttttgtggcgtatgttggttactgtaatacaataattccatccccgaatgctaccataactcattcattcactaataacatttttatacgcataacagtttaaaaattaaaattctttttttatagtaggatttgcactgttaattaccgtaaccctgctctattttagagaatagtaatttgtttaccagagtgtatttacattaacctactgtagcccattaaatttactgtatttatctagcttttcctttgtttttaaatttctgtttgaatataaccgtttgaataatggaagtgccaaaattttttaaattaattatattttataaaaaaaatttcagcggctgacgaggcggaaaaggacgctaaattgtgggaacttgcaaaccctgaacattttcgggtcgacaaatcgtacaaagggccgactatcagtttgccgttgcgaagtgcacatgtggaaacaatgcttgaatacttcaaacaaaataaagtgccaaaaatttttaaaatgtttttatttattttaaaatttttttgctaattaaaattcgaaaattaaacaaattttacaacttatcgggcatttaaatgatcaaagaatttatatggatttaatggaaatttttttttttgaaaaattatttaaagattttctataaaatgataaatttattgtgacaattttttattaaaaaatatttttctacaaaaatttttgaaaaatttgcgaaaaaaatgaaatttgctgaccgatttatctttcattgacagaatgtccggacacatttattttctgggaggggacagagactatattggggataggtactgtatttgaggagatactatacataggaataaattcagtgggacccttcggtagttaaaattatagttagttacttcttaaaaaaccattttccaaatttaaattttgtgtgccttcaggttttgcccgcccgctaccttctgaccattctgcacgaggcgcgtaaatcgctgaaagtgatgcctaccgtaacccatctgtccaccaacatgtcgggccaggttacgatatgcggcgatttgcacggcaaatttgacgacctgtgcatcattttgcacaaagttagcgcaccaaaaaaaaatttaaattgaaaacccgtttttttagaatggtttcccatcattggacaatccgtaaacagtcataaatataattaattatacaattaaatttattttttaaattttagttacgtgtttaatggtgactttgtcggtgagttttttttcaaaatttccattaaaagcaaaataattttttgttgaattttaagaattatataaaattaaggaatgatatttaaggcaaaattttaataagcattaaaaatttataattttcattcaaataatttccaagaagaatttttgtgaaataattcattttttcagttttaattagccattttgacatttaaattattactgttattaattggccaacaaaaatcattttaattcaattgattgcctctagaaattttgtgattaaacattcattttttaatttaaatctttatcaaaattaatttaaattatttaaattggaatatttctttttttcaaaaattgcttacatattaaatttttaaataaaaatatttcactttttttaaaacaacaaattaagaccggggaggtcagtccatcgaggtgcttgctgtgctcctaacttttatggtgcttcatccgacagcggtggcgcttaaccggggaaaccatgaagaccacataatgaatttgaggtggtggcatttttcagtccaatattaataggaaaattgcacaaaaaaaaattattcaaaatttccgaaaaagctactaaattgctgttgaattttttcgataaatctaagtgctctcttctctctctctttctctctctctctctctctctctctctctctctctccctctctctctctctctctctctctctctctctccctctctttctctctctctctctttctctctctctctctctctctctctccctctctctctctctctctccctctctctctctctctctctctctctctgttagcctgtaaaatttttcagaaatttcgcttgattttttaaataaagttatgaccaaaaatataagatatactagtgtgtgtgtgtgtgttttttttgaagtttttttgaccataatttttaaatgttaaattattattattttttgttgtaattttagtagtccaatagagagagaactttaaggctatcgaaatattcaagaatgaaaaatttcgttgctttggagggttcacaaaaattttccattttttttttgcctctggttactgtattgactttatgatatccgggaccatataatttttttacgatttaggtacggtttcgtcaaggagttgcagacaaaagtatgtgttagacaatcatggaaaaatttatttgtttattaattttacagtaattacagtaattcttgctttacgttacagtacaaggactccgcctccgccatcatacggttgcttgaagacattttttcttggtagtcatttaacacagacagacatattgttgcaactaatatatgtctgtcgtcccaggctcccgttggccactgttgtggacaaagaattgtttgtggcccatggcggcgtgtcggacaagacggatctggactttctgcagcggatcccacggaatcgagtcagtcggtttcaaggacggtccca

SEQ ID NO: 80988 - DNA, 828 bp, Heterodera glycines
atgccgcaatgtcctccagggatgtgtgccgacgccctccaattcgacagtctgaaattggaattcagacggcccaaaaaagttcaaaaatcggaaatcggcatgccgacacatctctggtgtgctcatttattaattggtaagattgggttttaattttgaaagatttttacggtttgttcggtaaacaataccagggtcaatggcaactcgtacaacaaaaaaaaaatctaagaattttcaactaaaacttagaattttcagataaaaaatatataaatggattttttagcctagaaaaactttaaaaaaaattctttaaagttttttaccaatttttcagctgactttttttattttcttaaattttttgaaaatttaagtgttttaaaaagtttttctaggctaaaaaatccatttagattttttttaatctaaaaattctaagttttagttgaaaattcttagaaatttttttttgtacgagttgcctgtgtacgagttgccatgacaccacaataccaaacccacaaaaaagtgagcaaatgccaaaaaatgctaaatttattttggaacagaatgggcaattagcaaaaaaatcccattagaccgaacgacagctttttggggccacacctgctaagcaaattgttagttgcccagattcaaaatgatgatgattttgatggcatttgatacagtgtgtcgtgccgtagacacattttcacgtcatattagtggagtacgggtgggattaatttgtgccctccggggaacaaattaaatgcggcaccaaaaaagcatcggagaacatccagctccacaaaa

SEQ ID NO: 80989 - DNA, 1020 bp, Heterodera glycines
atgacgacgataacgccccaacaaaaaccaattcttaaagcggtgattttagtcggcggcgcccaaaaaggtggcgaccttccctttcattcagtgtccccctcccctttctgcccatccctttcattctccacggcgactggttgcttttcgtagagtcacttccttccattcaattcattgatcaaaatgtggatagccgggtcggctctggtggcactttattcaatatttctgttgttgcctgtgttaattctggcgtttgtgatccaaaagtgtccactgagactttaaaacagaaaaaccattaattgctgatcatttaatccctaattgccccgaaggtatacaaataattgcaaacaactgttatagactttgcacattagcttgcacttctgttaaggcactcgttttcggcccctctctctccaacttccgaagccattgttccccgttgccggtgtcccactgattgagcatcacatttcgcagctttgcgaagttaatgcatttatcgttatgattttttcattttttccttttcagcagttggaaaacctccacgaaatttttattgttggattttacccggccgaacaatttgcgaactttatttctgattgtgagaaaaagtatcgacgcgtgccaatccgatacattcaagagaactgtccgttgggcactgccggtggccttttgcagtacaaagacattctaatcgacgtacggatttgtgttttaacttttaataatctaccatctgatttgaatcattgttgttttaagagaaaacctccggatgcactctttgttctgaatgcggatgcttgcggagaattccctttccttgaaatggtgcaggagttgaaccaaaagacggaggcgaaatgcttgattttgaccactgaggcgacacgggagcagtcggtcaactacggatcggtagcaattcaaatttggttattccgaacccgacaaaaatggtaccatcgaaagctcaccaagagacaaaccgat

SEQ ID NO: 80990 - DNA, 496 bp, Heterodera glycines
atgtggacagactggacgaacttggcgacttggactttgaacggccgacgaatggctgcgacggcaattggctggacgacgaagttggcacttttgcaatggcaattttatcacttgagtttaacgaatttggccaaaatcataaatttaaacaagtttaaaattccgggtaaaaattccattttgagctcacaatcagcaggtggaaaactcgactttggcattctgacatgcaatatccgggatttgaaaaaaggcaaacaaaattatgtcccgaaaactctcggttttgatggattttcgctatctcattttaaagaaatgaagaaaaaactatttgacatattgtgcggcaatccttcagaatgggtgtccctaatttatctttgtaatttttgagctaaaaattgctatattgggttttccaggagttatgatcacgaattggaccttggatttgtcatattaccttgccaactatgcttttatttattaa

SEQ ID NO: 80991 - DNA, 501 bp, Heterodera glycines
atgtttgaagtttggccgaaagctgagtccgggcaactcttggatttcgtcatgggccgccgatgtgagacgaaggcacaaattggggtcatcaacgaacgcagcggaaggagaaaaaagcaaaaatggaagaaaaagcaaaaacggacgaatgacagccattctaaggtaattagttaattaataagtaattaattcattaatttcaatttgaccatatttaatttcagttcaattcattattaatgagctccattagaaataagtaaatatttaaaggattaatatagctgattgctttaaaatttttacaattttaaaagtgattaaatgaaaatgcgaacactaattaattataattgctaaaatcgggaaatgtaaaagcaaaatcacaaaaagaatgtatagaaaaagtggtgattaagattaaatgatcgaattgttccataattcctttccattcttcttatcagaattgctgcgagaaaaacgaacaataaa

SEQ ID NO: 80992 - DNA, 2154 bp, Heterodera glycines
atggctgtcattcgtccgtttttgctttttcttccatttttgcttttttctccttccgctgcgttcgttgatgaccccaatttgtgccttcgtctcacatcggcggcccatgacgaaatccaagagttgcccggactcagctttcggccaaacttcaaacattactcgggtccgtccgtcctctaattgcgtgcattaatcgcccaattttaatttttttttaaattcaaaaaaaaacatttactttgcattatgaggagtatttggtattttgtattacgccatttgctgtttggtgctgtattttaataagaaatattcttatgaatattttatttatttggaaaattaaaatttgcaagaaatggcggctaaaaaattatttttttcaattgaataattaatttaatcgattcaaaaaaggatttccactcgtttaaaaatttatggcaacattttttcaggctttttgaaaacaacgtcaaaaaatctattccattattggtttgtgacctcggagaataagccgtgccaagacccattggtctgaaaaatattttctttttggccaaatgaaattgccaattctttaaagcttttttggttcaatgggggccccggctgttcatcattgggcggtctgctggacgaattgggcccatatttgatcaacgccgacgggaaaacattacgcaaaagcccatacgcttggaacaaaaatgcctccgtattaaaattaattcctcaaaattaaataaattttaaatttcataaatttcattaatgtgttatttttgtcagattgtttacatcgagtcgcccgctggcgtcggcttttcccactcagtcgacggattgcctgccccgtcaagcgatgactcagtaagaaaaaaattgtaaaaataattatccaattaattaatgaaagcaattaaaaagagggaagattcacgattcaaaaagaaccgaaaatttgtgatttgtcaatttcagacggctgcagaaaattacgaagcggtcaagcagttcttcaacaaattcccactgttccgttccaacccaacgttcatcaccggagagtcgtatgccggcatttatgtgccaatgttagtggccaaaattgtagatggacaggcggaattccccatcaatttggaggtgtttaatttttttaattattcatttctaatttaaaataatttttttttcgtttattttaaatgtttagggaatggccattggcaatggctttgtgaacgcgccgttggacaccgacacattggcacgttttgcctatgcccatgggcttgttgaggagtccaaatggaatcagattgccaaacagtgttgtggaggatgtcttggtaaattggcattggcgtgtgccatacacttcacgataaaatgcctaatattaaatttaatggattttttttcaatttcttaagatacctgcgatttgggctcactttacggctcatgtcgatcaattgtaattaactaattgaagaattaatgtcatctcattaatgaaaacataaagattttcccggaaaattgcatttttgataaatattaaaaaattataaatatcattttatctatttaattataaaatttattttttaggtggctgagattgtccatttctgttggaggggcggactgaacgtttacgatatttatgaaaattgcagtaaattttgcaaattaatttactcattagccttatgatttttttttgaaattttaatttatttttctaagtgccgcacccaaacaatttggacataatgagaagaggcattttcaacgcaaagtcaatgcactcaaacgattcagttttgtggcggactgacgacgcttttgaagtaaaataaataaataaaaaataaattttcaatcaaattttctgtcagaacgccaatcagccgaaggaggaaaaagtgaattatttgctccgctgtttgaatggtaattaaaattaaatgtttttattaaatttaaaaatattttaggtcaaccattggttgattatttgaacaaggaccagggtaagaggccaattgttatttgttagagatcggaattccagcccttatccgatctctatttttgtataaagtgctgctgctggagctgtgcaagaattaa

SEQ ID NO: 80993 - DNA, 831 bp, Heterodera glycines
cgcaacattttggagcgccgtgtcacttttgcgagtgggtaaaattcggaaaaagaaactttattttttattttttcaattttattcattttcagatgcttcattacttacactgacagagatgtgaaccaatttacgcagccgtaccaagttttgaacacgacatttgcttacgaagtcattacaattttaaaaataaataaaaaccttataaaattattttcaggccactgaggtaagcccaacagctgacagatgggcaaattgaaaaattatttaaaattgaaatttttgtttaatttgtataaaaaatgccaatatttcctcgccgataggacagatgcttggcacattgtatgaatgaacaaaagtgccgtctggtggtctatggctatgtggtaaaacaaataatttaaaaaatgtgataaatatttaaatattaattaattttaataatttagggcggccgcgaagttttcgcatgcgaattttatcagggtaattagcataaaaaccagtataattttgattaaaattaataaatattattaatatttttgtaggtactccttaatttaccaaaataggcatttagcaataataaattaaattttaattgtaattagcaattggattattattttcagatgccaccgtccgttccccactgtacacaccgtacacaaacatttacataaagcggacatcggaatgcaaaaaatcaggtgaaaaaacatattgagccaattaatttttctactgtatttagctctaggctcccaagcattggaaacagccgaacccgacgaacggacatttaagcgaaaaatg

SEQ ID NO: 80994 - DNA, 1215 bp, Heterodera glycines
gtcattcaatgactgtggcttcgaccccgccattctgcggaatattcagcggcgcaattattcccggccaacgcaagtgcaaaaggccgtcatccctctaattcagcagacggactgttcgtaacttgcgtcgtttgtcctttcatcattcatttgaattcaggcgatttggtggcacatgcgcacactggcacgggcaaaagtgcggcgtttctgctgccgttgatcaacgaagtccaacagatgcgcaacgcgggcaacacacagcacaacggcgactcgccgtactccgttgtggtcgcaccaactcgcgaattggtgcgcatttaaaagggctggcgacactggggatttttgtattcaaaatttgttcccgtaaatcattcaattcgcaaatctcttccccaattattgaataatattttaatcagtaaaatggtatcaaattgtgtggttaaggttaaacaattgtatgaagatgcctgcactttctcagctggtgttttgttttatttttcacccttttatttatttttgttatttttaggcacttccgttgacgtggcgttggcgtacggagacattccgatgggcgtctccattaacaatgtcagaaagggttgcgatttgcttgtggcgaccgtcgggcgtctctttcattacgcacgagagcacatcatcaaattggacaaactgcgcttttttgtgttagacgaaacggacaaattttttgtgtacgaagacgcgcggacagtcattagggaccttttcaaagagatgaaacgatcggtgagcaaagcaaaagcgtggggattaaaaaatgcaaaaattctgaagggtttccggcaccgaactttgatgttcagcgcaaccatcgacagggaagtacaggaaattgcgaactcttttttgaccgatgggtattactttgtgagtgtaggggaaataaatcaggcggtcggtacggtcaaccaaacggtgttaaaggtgaactttcattttctgcactgacagttcccccgttttacaggttaacaaatacgacaaaatgcccatgcttattcgtcttctccgaagcaaatcgaacgaattgaacaacggggacaatggtgggagggaaggagaaaaaacatttgaaaaggaactgtcattaaaggagtgacatatgagacagaaaagaccattgtgttcatcaacggacggagggaatgcgac

SEQ ID NO: 80995 - DNA, 618 bp, Heterodera glycines
atgggccaaccaaacgccgcaccgccagcggacgccggggaggaggacgaaaacgcgtgtccgccccaattggacgcggaagaaacgatggaccgaccaattctcagcattccgaaacgccttttggagatggcattgactgcgataacagcgcactcgaagaagcagaaaggcgcggatgcgtcggccaccctttgcccgcgtcccgcgccgtccctcccctcctccgtttgcttttcctcctcctcaagcagcagcaacatctctgacgatccatcgtcaaacgaaagaaagagacgtaacggacagactgacggaggtgcggaaaggccgttgcggaagcgaagacgcgtcaggtcgcggattggcccaaggcggaaacaccgcgggcagcggcaaaaaggaagggacgcggaacgacacaacggggaaggagaagagcaacagcacatcgacaacggcacagcaccactcagaatggcactgatcagtgtgccaaaagaagcggaagcgaatttggaagaccaaaagaggcagaaaaagcgcaacagaaaaggacaatcgatcgcggcaaagcacaaaaggcaaaatccctctggatttggccgttttaagtga

SEQ ID NO: 80996 - DNA, 173 bp, Heterodera glycines
atggaaatggaattgaacccggacccgtcacgagttcaatgggaagttgatctgctgatggttcgggccgagttggcatggcgaaaacagacgacgacaaagaatggtaatcctccgatcagaagtgatcagagaagtattattggcttttactcgattttaccaaattggtg

SEQ ID NO: 80997 - DNA, 242 bp, Heterodera glycines
atgcttaaatgccacggaagaactgaaactcgccgaggaatgcttggcacaatgccacgttagtttttggggaacattttctcgaaaattaattatttttaacaatttacagaatttgttaaaaagtgaaaatcaatgccaaattaaccaaagcaatggcattgaacatgttcacataaacatcaccaaacttccacatatgagaagtgcttcggaaatgccattctcacgagaagtaatta

SEQ ID NO: 80998 - DNA, 1543 bp, Heterodera glycines
  unsure (1)..(1543): unsure at all n locations
gaaatgacgcgcaaaaaaatcggtatacaagcagacgagcggactcggnnaatgcaattgcaggtgcacacagcggangggaggggggggggggggggctcanttttttgaaaaaaattttttttttagaatntactagcccttcaaaataaggagttaatctttgaattggggcaaactttttcatttttttgtgcttttaattggagtacaatttttaatattttacaccatttttgttttgtttttaggcacgaaatgaggacacaacagttgggcatggtcggctattaaaaatttttttttacaattttttgttttcatttgttttaagggtcgttttcaaatgttccaagttcgcgtgtgtgatgagtgtccaaatgtgaagttggaggcgcaaacaaagaacttggaggtccattttaagtggatttgaagacaaccgtttgtctaagtggtccttgtggtagtcaacaaaaagataggcttgggttcaatccccctatatgctttgaattttttcgtttaatttttttaaatttttttttctattttaaataattcatttttggatttttaggtggaagtggaggttggtgctgacaatgggcaagaagtgcgcttcattggcgagggcgaaccgcacattgaggtagagtgaatttcaaaaaaaaaaaaaatttttttttaattttgccacactacacagggtgaccctggtgatctcatcttcaaagtgcgcgtggaaccgcacaaacttttcgaacggcgtggcgatgatttgtacacaaatgtgaccatttcgttgcagcacgcgttgtccggctttgaggtgactgtttttttgtatcatcccctctctattattctgcaaaattcaaaaaattgcgtaatttaaaaaaaatttttttgacaaaaatgctcaaaaaattggtttttttttaaatttttggttttgtaaattttttttgcttcaaattaattaccaaaatttcaaaaaaattaacggtcctcaaaacgtagatttcttaacgcttttcagatggacattgaccatttggatggacacaaagtgcacattgttcgggataaggtaataccagtaaaagggtgacacaaaattatttgctctaataattttcggatttatccattctcgacaaaggggaaagagcgaaaaaatggtttttttttttaaggcatcggttcaaatccaattgcctgtaaaatttttcaattttgtggggggccgatgattacgaattttacgcatccatttcgcccaatgtcgaacccgaactcgaacaaaaattttttcatttttaaaaaaacacactctttcccgcagatcacatggcccggtgcgcgtattcgcaaaaaggacgaagggatgccgtcgatgaccaacaaccaggagcgcggcatcctgtacatcacattcgatgtggaattcccgcgcggtgagttgaccgctgaacagaaggcactgttagctgaactgctcgcccagggcgaccatgtgccacgggtgtacaacggactg

SEQ ID NO: 80999 - DNA, 1355 bp, Heterodera glycines
ttgataaaattcaaaattgaccactttgcatatagcgccaaaaaatgcatccaggttcaggaaaaatcacaggcttatcgtgtatttttttttcatagttaaaaaaacattcgttacttgaaaaaaattctaaaatattatccagattttttatgcctaccttgacatggtccctgcatttattacaatatagaaaccagggccaggaaaatcgatttgagccaaaaaatgaactgtacccaggtccagctcggactctaaatatcacccatttttagtaatgtttattttttgattttaggaaaatggcccggcaacatcacccggacaaaaacccagacagtaaattggccaactaaatgacattcaagaaatttgcaattatttttttaagacccggatgcccatgaaaaattccaagaattgggcgaagcgatcagtgtgttgggaaatgcggaaaaacggaaagtgtatgacaggtttggattttcgtaacacaacttttttaaataaatattttacaccgggaaatttttagaaaatttttgtaagctctcggatttcgctgattaatttgaatctgccacattttaattaacccccccccccccccccactaggcatggcgaggagggcgtccgcaaaatgggcgacggcgatgccttcggtggccatgacccgttctcgtcatttttcggcgatttcttcggccatggcagtcaagagcaggacgaagagacgccacgtggtgctgacgttgttgtcgatttgtacgtcacactggaagaggtttttaaaattttgaaccattttttaaggaaaaaaagggggggggcaaaccgaaatcccataaattttgattaaattaattaaattattgcacaaatttatctgttttttttgccaggtttacaaaggcaaatttgtggaaatgacgcgcaaaaaatcggtatacaagcagacgagcggaactcgggaatgcaattgcaggtgcacacagcggagggagggggggggggagggctcatttttgaaaaaaaattttttttagaatttactagcccttcaaaataaggagttaacctttgaattggggcaaactttttcatttttttgtggttttaattggagtacaatttttaatattttacaccatttttgttttgtttttaggcacgaaatgaggacacaacagttgggcatggtcggctattaaaatttttttttttttttttacaattttttgttttcatttgttttaagggtcgttttcaaatgttccaagttcgcgtgtgtgatgagtgtccaaatgtgaagttggaggcgcaaacaaagaacttggaggtccattttaa

SEQ ID NO: 81000 - DNA, 144 bp, Heterodera glycines
agcgggaccgggaattttgggcaaaaccgggaccgggacttgccgggacctgagaagccgggaccgggacctcgatttttcttcgggaccgggaccgggaccaaccgggaaattttaaaaattcaaaaaaattttaaaaaattc

SEQ ID NO: 81001 - DNA, 493 bp, Heterodera glycines
atgttgaatcattgtggaagaaatttaaacgaaacttcaaacatcaatttggaaacagaaatgaaacgtatgatagttaatgtgccggtatttggcattaaattaaaaaatagaaaaatgaaaatttaaaaataataaataaaaatttgtgaacccaaacatggcattttaattgaaaacaaacaatggtgccaagaatttaatttaaaaatacgattaagtgggccatggattttcgcacaatttatcaacgcgattatcccatacaagctgttgcaacgcattctcttgtggattgaaaccaatttctaaattatttattaaatttaaaaaatgaaaatttcaaaataattattttttaaagtaatttttttaaaataatttttatttagagaattcattaatttcttctatctttaaattcaattatttttttccatttagcaaattgcttaaaaaatataaatttaaatttttaaaggataaaaataaa

SEQ ID NO: 81002 - DNA, 665 bp, Heterodera glycines
atgagcttgattgttggcaggattgacaaagttctgggaatgatttatgcgtgtaattttggggtaagttcggaatgcaacggtaagaacgctattcatccgaaataatggtgttctctgggttgatgtattgttggatgagcaatatcagacggattgcggaacgtgattccacagggaccaaaaaaatctcgacgaaccgtcctatgttgtttttctgggaccaataatcgaaatgattgccaagaagttttgataaaaactttttggaaaatttttgaattttttaaaattttctcggggacgggaggaaaagagctgctactccccggcggaggaacataacacacttccctataatttttcaaatttttttttaaattttaaaactttccagggtcctccaatcgtccagtccactccgcttgtgccaccgccgctgggaatttctcagaactacgctcggcacagtcaagcaccgacaatggcattgccgtctccaatctttggccatcacttcccatcatttgggccaatgccgacggtcagcagcagggcacgcgttttttggggggtacattcagaaagtgctctgaaacgcaccaaattttatgtacaagttaaataaggctctctgatgcttttattatcaaaaaggaagatga

SEQ ID NO: 81003 - DNA, 468 bp, Heterodera glycines
atgcatatttacgtatgcgttcttaatttcggattattaagtccaagtcttctaggatttggattattttgtacaaaacttatgttagaccgttattggaatatgctcctgaggtttggaatccatctattcaaaaaaatatttaaaaaattgaaaagtgtcagaaatatttcaccaaaagagttcttttcaaatgcagccttccacccattccataccaacaaagattagaatacctgcaactgtcaacacttgaaagcaggcgaaagctttctgatctgttcatggctgataaaataatttatggccgaacagatctgaatccctttgaaatattcaaaccttctgaacgctttaacattcccttttatagacttcgaaatataaaataggcaaaaaatttataccttttgtagggcgggtaactaaaatttggaaccaactcgataaaaggcttattgaaataaa

SEQ ID NO: 81004 - DNA, 414 bp, Heterodera glycines
  unsure (1)..(414): unsure at all n locations
atgcccaaattcgctggtgacttggaaattgcattggatacagtaagcaatcggaaatcccacaaaactttggattggtatggtattgttccacgcccatcacttcgtttgctgttaaaatgccggatggaactgtaaatatggaaagactggtgaataaaaaaaatatttcgttgaaaaaatctaacaaaaataatttataaaataaaactcaaaagaggcggaccatacataacaaatattatttattttttaccaattttttcagaaaatttcttttgcgagaaaagcgaaaagcgaattttgaacagtgccgggccaagaatttgacggcgattctctgctgaacattcaatgccagtttcacggcatttttcatcggcccaatggagtgccganaagcaaaacaataaa

SEQ ID NO: 81005 - DNA, 782 bp, Heterodera glycines
ttgggtgtgcaacgatgtttggatggacattttgcccctttttgaccatgcccaactcggcctcaaattggcactgatttcgccacgtttcgatgttttagtggacgcccatttcaatggcaaaagcgaattgacaatttggagacaaatcacaattcaaaagttcaaaggaccaaaagcgaaactgtctgaatggatcgatgacaaatgggtggcatttcctttgccggaccgtccgctgcccaacaaaattcgttttaggaaccttcggattgagtaattcaaacataaagggaagaaaatcactcctttttcaccattttcacaggaaacccgaccattctgtgctcgcatttctccgtgccaatcagcaaatttttgaaaaagccaccaatttatgtttgtctgtttcttcatgcttccatgattgcctttcattattcgtcgacaataatgtccagccgatttgggatgtttttgcctgtgaaatttggccgatttttgcgccaaacattcgccgctttaactttcgcgatggtgatcatttggacaatttgcgtcgccgcatttcgcccacaattctcaccgatctcaacaaccttagtgccatcacttccggtcgtctgttccccgatggcatcgctgatgatgggccaaatgcaactgctggccaagcattggccaaatggttgcacactccgcgaaatgatggccaaccgaagcgattgcgttgcggtggtggttatatgtcaaaaactgaatttgtcaacattttcaaagag

SEQ ID NO: 81006 - DNA, 1785 bp, Heterodera glycines
atgggtgccttcgccgatcgccgtttggctgctaattttggcgagattctctccataaatggcggcaccaaaataaggtcgcgaattcaatttgaccgaagaataaaaagcgaggacattgacgaagaggaggagcaaaagtacaaattgcgtgccaccggctaccgaaagtgccgcgcggcggtggcggaggacggcggcggcgcagtggcggtgctaaacccattatcaatgcatttgttgaaagtgaccggcggggcattgccccaacaaaatgccgaacagaacggcgaaacttgcgaggagtcattggaatgtgagaccgttgaatttgcattcattaatcattcttttctttcagacctcagagaaacgctgaatttgtcccggtctttaaagttcgaaattcccgacaaatcgccactgaaccgttcgttgacaatgaatgggcgaattccaatttggagaagggaagcggagccaaaagcagacaatgagccaaaacagcagaggaaaatggcaaacggagaaaagcgaatggtaaaacaaaggcaaagccaaagtgaaaaaagaaacaaaaagcaaatttagagagtaaaagccgaaaagagaagagaacggaacagaggagaagagccaacccaaagaagagtgagagcaaagaggagaaacgcaaaggaaggaagtgaagggcacagaaagagaaacggcaggaggaaaaagaaagaagtggaagaagagagaaacggaacgagagaaaaggacgaaaaggaggcggaaaaggaaaaagaagaagcgaacaacaacaaagagataggggaagaggagagaaatgagacgacgggagaagaggaaaagggcagggcgaaagcggacgacggagaggaaaagaatgagggagcggtactggacgaagaggaggagaagcaagaaacagcggaagagaagagcaatacgtcttccatggcagaagaagatggaggagggaaagagagaaatggggcgaggctggaagaagaggaggaggaggaaaaggagagtagcagtaagaacgggacagaaaaagagagaaaggaaaccataggagaagcgaggatggaagaaaaggaagaggaggagaacagagaaacagcggaagagaagagcaatgggacttccaggcaaaaagtgaacgacggagacacggctgaagaagaagatgaaggagggaaagagagaaatgaagggaggttggaagaggaagagatgagcagtaagaacgagacggaagagaagagcaatgggactttcatggcagcagaagatggaggaaggaaagagaggaatgaagggaggttggaagaggaagaggaggagaacagtaagaacgagacggaagagatgaaaggacaagaggaaaaacaggaaatgaacggaaaagacaaatcggaagaggggacgatgacaaaacgaaaaatggccaatgactgcccgaagcccatcagagtttcgaagcggaagcgcaacatttccccggagtttaatttgaacgaccttttgtacgaagattaccgaacgaagttcggtgatgccattccaagggatgtgtacaggcattagcaaaaagtacaatgcaatgagtttatattgttgtgccgttctactacccaaactgtttttatggggactgggtcgttttggcgccagcgcgagttttttgattataacttttttcattgttggccaaatctaacaatcttggtatcattcgaaagcccttcacaagctctattagccttacaaaaa

SEQ ID NO: 81007 - DNA, 1505 bp, Heterodera glycines
atggtgaaaatgtgtgttcagccgttgctccctatcgttgcatttatttcattcgcattcgcaccaccacatgtgggcccctcctctgctgacggtgtgcgggggggggggggaaacgagggcccaaaaacgggggcccaaaaacgggggcccaaaaactggggcccaaacgcccccgactcattggcaatgcttcttccaagccaaatgtgccagtgattccgttggcacaaattgtccgttggcattgggacgaaaatggggcacaacagattatccaagcaataaaatatgtataaagaatggatttaaaatttggttaacaaatttagaccaacacactaaacaagggcactgaactaagttacggcagctgtgccaatgccaatgcttcttcatttgttataagaattctcaaaaaacgggagaagaaaaagtaatccattgaaaattagcgtttcaattatggttaaaaattaggattttttgagttcggatttaattttcaaccttacaattgggtccaatcactaaacattttttccattagtctcttctcggcgccttccagcttgcctgacgacgacgatttaacggtgaaaattggtggcaaagaggtgaaacacacaaaaaggacaattgcttttttaaatttaaaaaaaaagaaaataaaaattgttttaaaactcgagtaaattgagaaagagataactcccataaatctttgtaaaatcactgacaaaatgttttgatcagatcactgattaatcttggtcagatcactagtaaagcccggtcagatcactcataatccattctgatcagatcgctgtgtccgcccattggctgtcgtccgtttccccggtgatcagttgcatgctcagcgtggagatgaaggagaagcagcagcgaatgatcactttggacgaattgggcgtggacatggaccaattcatggagtttttggaggccatctcttatcttaaaggaccttttttgccaaaccgtaattcatgatactgtatctattctactatatccccaggagaaatttctctccccttttatgggattggaatatttttaattatgaaacggattcctaatttttagccaaaaatgtgctgatgctgctcaatttggctgactacttccaggtgagtgcccttgcagaccagcagggctggacgtagttacgtgttacgggaattacggcgttttcgaccctgtaattaccgcttacgggttacggctttttgagatttctccgtaattttgatctctaactaatttggaccctacagacagactccatcatttttttcaaaaaattagtttttactatttttgaatttattaggctaatatattaggggcactaattgctccgttttgaggtgaccgcgttgaagtcgcgctgcgaattgcatctgatcaattgcgtggaaattccactgatcgaccgtttccttctgattgatcgctacggactcgacaatttgaaa

SEQ ID NO: 81008 - DNA, 996 bp, Heterodera glycines
atgctccataaaaatgcaattaattgctttattaaaatcaaaaaaggtgggcgttagaagcctttgaataaaccgcacataattatatgcactaaatttattccaaatgtgcttaatgggcgtcattcatcatccattgggattaaattgaaaatttcttttttttttggaacagccattttttgacgcttaataagaaaataaaaattcaaaaataattttaatttaatttaattttagataaatttaattttttaaaaaattctgtaaatgaaaattttgatttatatataattaaatggtagtattatttcattttaggtttttaataagcaattttccattttctaagcattttcccccaattcatttgcctaaccaaattggttttcgcaaaattaatttgttttggcgttccgtctgatgtcattgctgtgtgtgacaggtgaaaaatgcacacaaaaatagaaagtgacaaataaaaattaataataaaattggaataataataataatttaataaaattaaataaataaatcgaaaattaattaaattaattaaaaaattattaataattattgaataataattataatcataataataatttgataaaattaaataaataatcaaaaattaattaaaaaattttattaatttttttaacaattattgaataataattataataataataatttgataaaataaataaataaatgaaacgcaaataaataaaaattatttaattattcagtgaaaaaggctcgtcttcaaggcacaatcggttagcaaattaaataatttaaattaattaaattattaaaaaaaaaaaaattaaaaatgccaaaattaaattttctaaaattcttttccagaagatttcccatgcctatgtgacgttaaaattacaaaatgtgaagtcaacaaccaatcgctgtcaaaggcaatccagccgcaatgggagcaggaatttgtgttgtaagagaatataa

SEQ ID NO: 81009 - DNA, 252 bp, Heterodera glycines
atggaagacgaattgtcattggaagtgcccgcggcagtggcagatgccgacttgtctttggaagtgccagaggaatggtcagatgacgatttggtgttcgctccagatccattggcagatgccgacttgtctttggaagtgccagaggaatggtcagatgatgatttggtgttcgcagttccagatgcattggcagatgccgattgctttgaagcggaagtggtcttcttcgaagttttgacagagccgtaa

SEQ ID NO: 81010 - DNA, 545 bp, Heterodera glycines
atggtctacaaaatgcaaaaaacaacaattctctacgacttatacccgctgaggtatgtgcacttcaatttcggtatcagcaaaaagtactgtatttcttaaggcgaaaaaaatcgttaaaaatctgcttttttgattccaaatgcaccaaaatttattaattgcgcattttcttcccaaaattgttaaaaccgataatgggagatgaaaaatataatatttgatacatttttgtatcgaataaaatgtaaaaacaactgttttgaagaattttgcaaaatgttctgatttttgaccccaaaatctgatttttcgggcttgctgttctgattttgaaaaattttcgatacgcaccctggtttaattatgcattaagccggggtcgcacatgtgttgaaagagcatttggcattttaaaacgccgtttttcggcaaatcattccggttataggctgccaattcaaaatatttcaaatgcaattattgcaagtgttgtccttcacaatttggcattgaaaaatgcgtttgccgttagccggagatga

SEQ ID NO: 81011 - DNA, 66 bp, Heterodera glycines; identical to SEQ ID NO: 53774

SEQ ID NO: 81012 - DNA, 1432 bp, Heterodera glycines
atgacttgggcatggaatgaacgagtgaccatgctgctgctgctcattctgctcgtactgatgtgccagttcgttttttggaacatcaccatttgagattttttttggatttttaaatgattcgatgctttcaatttgatattaaaaaacttttttcattctttattaattttattaagtgtttttcctcatttaaatatcgcgaatattttcttagcagctaatttattgtttgtttttgtcagtggccgcacttcgaagaggccgattgttttgcaggtttgattgggtttagatgaaaatgaagagaaatcagggcactaatttggtttaaacatccaatgatcattaatgaacatctcagttatcaggtcatttctattttagggaattgttattagcacatgtttaaacacttctaatgactcagctttcatttgatattgtgaatgttaatcacgtaagaaaaaagttatggtccgataactgagtatgatcattgtatgactcataaagtgcaattcattttgaactgattaggaactaaattcgtaatctaaaacaaaaattataatttacatagtcatgtgtgctaatattggttgtatgatttacaccgaatcaacccatggcttcccctattattagatttgtcgtccaaaaaattgtgagcacggtttgctttcgtcattatcgtcgaccattgaccggttgaccatcgctgctgcaacttttgtttggattggtccgcttaatgttcgccgacatttttatgttttttttgctgtgacactttttaaaccggtactattatttagtgccctttacaatcattttgcggtcgctttgtgcgccgtttccgtcaacgaattgcaacacgtgggacgtgagcggagggcatttttggctcatttttgcaggtttacaaatttacggtttttcggctctgatttagctaattttattcataaaaattgtaaattacgaaaaagctaggatcaaaaactctaataaacttgcatatcggaaccctttatgtataatttttgaaattttcaaactgacgatcatgtattagggatatctaatgtagcaaaaagtttttatttctgaaagaagttataccataaagccataatggcgtcctgctgtgttctcttttatgatttagttaggtcattcatttatacacattttcgatattttcattcttctatttccttcacatctcttttttcagctttgccattgttttgaaggcgtcgcccattccaaccgccatattcattggcaaattcaccgtccgttttctgaatggcaccaaaaatgacaaagcaacgaaagcagagtggacaacggaaagcaatttccagaaagaaggcggactgtgataacggggtaggaggaattttaaagttaaaaatcataaata

SEQ ID NO: 81013 - DNA, 1206 bp, Heterodera glycines
atgccgaaactgcgtatgccccaactacagacaacaatatccctgacgctcagcgctggtggatttgggctgacgaaatcgaccaacctcccgctgagcgccaaattattcttggagtaagtctgagctggctgggtattgatatttccatcggtgcatgtgtacccgtgccatttcagcaacatgagcgaccgggagtggccctactcgtaaacgacataccgatgcctatatacactgtggaaacaccgtggtggattcatcaattacaaccgcatcgtcaacacccacacaatccgcaccaatttgttatggaagatggtgtgcaacatccgcaaccgtatccgacggaccattggacgcctaacgataacaacggggaggagggggaggatgaagattatagtggagagcgaaacgtcatacgccgtaagtagtgtgaaagttaaaaagttttaaatcctattcggggttctttaagaaatgttagctgatacgccttggtcgccctgttctccacgccaatacgcccatgctgagtgtcggcacgacaaggaaaacatgccaccgcttgcggaaacacccaaaagcagtggtaaacactcattttttctatctttgactttataccatatttatacaggacgctttttgccacctccttcaaaaagaggaattttttcaatgcgctcgcctacgccacgccctattggttcaatacaaatgagtttgacaaacgcgcacacaccaccggtggtcgcacggcgtcggcaacacttaatgctggaggctcgcaggcaattggtaagaaagtgcaaacggaacggaccccaatacaaatgtatcattggtgtacagaaatcacccccggcggtcgcccatcaacgccgtcatttaatgtcggagacccgcatgaaattggtgaggaaatgcacattagacgggcccaaatataaatgcatcatttgtgtacagaaattgcgacgcaatccctttcgggtgtgccgcggtctgagcgcacggtgcgcgttttgttgaggaaaggaggcatacgaggaagcgcacagtactgaggagcgattgatcagaagaaatgatgtgagaatattgattgtgaggagcaattagtaaaaattttggtttttaaaaatttaaaaaatcgacagggcagaacttattaatctaatatcgcacaatgtcaataaa

SEQ ID NO: 81014 - DNA, 817 bp, Heterodera glycines
atgagtttgctcgatcaattcacgaatttgtttaactgttctgcttatgacgttagtaacagactgcttagtgatgctgagcgaacaaaggctttagtgttgtgtaatcacaaacttctcactaccatgtacaaggaccgtaatggactgaatcacacgttcacgtgtactggtctgtccgcagagggagcagaatcccttctcgcttatggaaaactgagagaaccgttcaatatttctgtcgctgcccattattacgcacgtcatcgtataatgctgagtcaccccaaagcaccatgtgctattgagcgaacaactttgtctcatcgtggcggtcagcgaaccaccgtattaaagttctatcccttggaactcgtccgattctcctcctattgtgcaattccatcacggtctcctcatatgaacacctatgttgattatgctgattactatgctgacgatgatgatgatgaattatctgatactacgcttctccgtgataataccaatggggataatggtgatgatgatgactctgacggtccactaatggttttaccatccaataacctacctccaatgtgttccttacgtctggaatattggaaagtgtccgatgacggagaatgggcaagggatgaagtatgggttgcggatgatgagctagacaaattgcgtacaatactgcataatttataactttctcttctatttattaatttttatcaaatttactctctcttgcactaattttatatttttctgcttaaaattatacatttcccaaagctaattttgtaaaagtttactctttaaa

SEQ ID NO: 81015 - DNA, 1870 bp, Heterodera glycines
atgaaggagagggtagaggaggaggaagaggaagacgctggaggaattgagcttggagataacggaaacggagggatcgacatcacttgggacgcgctgaccattgcgagcgcatcaatgaaacacttccgcctcaatcatttacggagtgatcagctcgcaatcgtcccagagagcggatatgacacggcaaacaatcagagcttgctcgcgctcaaattcatggaatggtacgcagaggagaatggactgcaaattcagaccgcccattcctcgggcggagagcaccgcattggccgctatacagtggacggttatatacatgagacggatagcgtaattgaggtgaacgggtgctgctggcatgcgcatgaccatcaacgacaccgatttaaagctgacactgtaatgccgagcggaaagacagctgctagaattcgggaggacgatgcgcgaagaatggctttcattcgctcacaaattcgtggaactgttagtatattctgggaatgtgatattgaggaacggctaagacgggaacccgacatgcggcaggcgttctcttcctatcgaaacagcggacctattaatctaagggattgctatcatggtggtcgagttgggccgcaacgccttcactatcaggtcccggaagggtggcgtatgcgatactttgacgtccgttcttctaccggttaaatttgatcagcgtttgctgttcccactttgcggaacatgcgcacgccttcatccagagggaggcgtctccgcttcttatcgatgcacgcacagcgatgagcagcgcggttgggtttctacggttacatcgatcgaactggcagaggcattacgcaatgggtaccgctgcaccgcctattatcgatccatagaatggacacaggaacaatggagtgagcgtgtttttcgcggttacgttgcagaatttatgacaatgaaaacacatgctagcgggtttccggaagaggtgggaaatggggaggaggaacgcgaaaaattcatcacagagtgtgaggagcgctttggtatggtcattgacccggcgcgcatgcaacacaataaggcgaagcggactatagccaagctatgcaacaattccctttggggacggttctcactacgtaacggtctatcaaagactgtggttactgattcgccatcagaactacgtgcgtacctcgacaatcctcagctggaagtcagctctgtggacccattaaatgaacagtgtgtgctgattacatacaccgctaaaaaggaatggaccgatgagcacgattgctccaacattgttctctccttatggacaacatcggcagcacgcctccatcttctaaaattgatgaaacgagttgtgcgtgcagaaaacacagagctgatatacacagacacggacagtgtctgttttgcccatcgggaagaggacgggtgtccgctggatattggaccccaccttggagacttgtcagatgaatggccggatcatgaactgctcgaattcgtgtcaggggggtgtaagcaatatgcactgagaatgcgccaccgtcaaactggtaaggagcagacggtggtcaaagtgcgcggcataacacttagcggcgacgcatgccgtcttctacattttgatacgttcaagcgagcggttctgcggtacgccaaaggaccaaaagagtacgacggtaacaataccgatgacgaagttatactaattgataatcctaatttcctacgacccaatatacgcacaggtagtgtacactcggtagcacttaccaagcgttaccgacccgttgttacgaaaggtattgtttccccaaacgacactcgtgtacttaattttggatttgtataa

SEQ ID NO: 81016 - DNA, 788 bp, Heterodera glycines
atgatgagaatttaccatcggtgttcccatcgtctgattgtgagtgccgtcttttcccttcgtccgttgttttgccgtgggctgaacgacggagttgagtgccgaaataaatggcggccgattcttcgaagggctgaaggaccaaacggaccaccaaactgccgaggcgttcgaccgcgtcgtaaattgctgcaaaaatggcaaagtgaaaaaattaaacacaattcatgcagaattatgtgaaaaattggaccttgaacttttaggggcaacaaatcggtgaaagacatcaaataattggcgccatcagtcaacgattgtttgagcagagaatggcaaaggaaagtgccgagcaaatgcaaatgggaggagtcgaaaaggcgaagagaggcaaaggaaaaggggagggaacggtggagccaaacgaagaggagggagccgagcagctgaaaaagggggacacaaattaacggggaaagaaaagtgccaaagatggatggataaatgccatcgcaaagcccagtcaaaaacaaaaagacaaggatgccgaattttaaagacactgtcccaaattcgaacacaaattccattcggattttgtgttttgacctttgcttttgctttacctgggcgacggggaaaacgaacaacggattcattccgaagagaacggcgaaaaaagcgatggccttttgactgagcaccaaaatggcattgtttttcgcatattccgctatgctaaacgataaattggtttataattacactttgagttatgaatttcgtca

SEQ ID NO: 81017 - DNA, 774 bp, Heterodera glycines
atgggcagtggcgatgcgcgggtggtgttggacggactgcactttgccaacggagtccaacttcatccggacaaagtgtctgtgctggtctccgagtgctcaatggcacgcattcagcggtcggttcaattgctaattgtaagattaaaattgtgtcttgggacggtcctgcccgctcttgctgacctcgacattttcttcccccgctcctttcccccagttaaataatgtttcaggtatttttttgacggtccgaagaagggtcagcacgaggtgttcatcgacaatttgcccggcttccccgacaacattcgcttgtcccatgacaaatcgtctttcctcgtcggtttggcttccgtgcgttacgctggccaatttctgtcctccttcatggatctccttggccctcttccggcagttcgaagattcattctgcaggtctttttccgtggatttctttattttccatacaaacccttacatttttctttttgccaggtcgtccccgagcagtatctgttcccgttgatggaattggtcgccaagaagtacggattcgttatggagttggctttggatgggcacgtcttgcgcacttaccaagacccgaccggttccgatgtgccagatgtgtcacaggtcaacatttcaccaatatatataatcaaaaaactacaaaacttgtcatttcaggccattgacgatgcttcccatatttatttgggttcgttccattccgatttcatcgcgcttattccgaagaagtcaaagtga

SEQ ID NO: 81018 - DNA, 567 bp, Heterodera glycines
atgccaaaagcgccacctcactccttctacaccccgacccggacctgtcaaactgggaaaatgccatcagacggaagagaaagagaggaaaaggaaaaattcgaagcaagaaggagggggagaaagaagaggaaagggatgaaaatagcagtggggaaggaggagagacggaagagaaagagaggaaaaggaaaaattcgaagcaagaaggagggggagaaagaggaggaaaaggatgaaaatagcagtggggaaggaggagagacggaagagaaagagaggaaaaggaaaaattcgacggaagaaggagggggagaaagaggaggaagagagaatgaagcagaaaagagggaggaacagcagcaaatcgacactttttaattttgccggtgctaattgctaatggatgtcgtaaatccccgtcaaaatcctgaaaactacacaattttcgaaagaaaaatgcattcattcgattacataggcaaaaaattttgtgttgtggcgtgggttttgcaggagcacagcttgttccccaaatcccattaacgatttaaaaaaatcattaaa

SEQ ID NO: 81019 - DNA, 103 bp, Heterodera glycines
ttcttaactttttaatttttttatttcttgcggctaatatcttctacagtaatttgtcagtttggtcggatgtgcgtcaaacggaaaaaatatttaaaatttt

SEQ ID NO: 81020 - DNA, 1954 bp, Heterodera glycines
  unsure (1)..(1954): unsure at all n locations
atggtgctgctgcattcttcttcattatccattagcattgccattctgttgctgctgatgcccaccatgttacagagttgccatccgacagataatacggccgccgctggaaccacagcaccnagaaggtgttcagcgacagtttttttttaatttaatcgattaggggctactgtaatggaaaatattttttgctactgtatttcctaaaatattccccccccccctcccgcccccctctctaaataaatgccccctttttgagatggattgaaatattttaagggatattagggatttgccagagtctcggttctcgactcaaaccaaattaacatgacttaccacattttttgtttaaattaaagggaattaataaataaattgaataaaaaataaaattttaaaaaattgttaggaaaatcttaaaatttattcttaaaataattattttattctattttttaattgaataagattttttaaaagtcttagtcattgagaaatttcgagttttttggggggtctaagtttctcgattccctggaccataaatcaattttatgtagagaaaaagaaaaattcagaaaaagggaataccgtagtcatacagtaaataataaattgttttctgtattcaaaacaaaaattttctgctcgaaaatttctatgtattaaaaattttgttgaaacggataaattttttttttaaattatttcttccatcaacagccaccacaaatgtcccaacgcttacaactgcttcaactgctgcaacaaccggtggaggtggcactgcggcatgcacaacatgttcgcccagcgcccttcggctgctgagcgtgccggaagcggttgcgtccggcttgttacaagcaactgccacaacaacgccaaccaacactgccggcacgaatgcggccggctgcgcaacgctgacgcccaactgtgacgcaggccaagtggtaagtaatgaatgccacaggggttgaagcagggcggcgacaaaaaagtctcgggtacggaagcagtcggcggtttgaaaggtgatcgagacttgaaaagttagccgagaaccgagatcgatatttatctccaagactcgaaaacgagacccaaaaaaacacgagacttttcgcgagtcgagaccgggactctcgcgcatcactagcggtttggatagctgtcagactctggtctggagaaaatttaggttttcgggtcggaaaagtcgcttacaaattagggcctggaaaaactatcagggttcaggctcggattttggccgggaaaaatcagtcgggtctttgggtttcgaattcctggaaaatcggtaggaaatcgtcatgtcttacaatcaattaacgcacttttctgtcttcccaggtttccatacatgtgatcttggcaaacggtgacacggactttggcaactacgattcgggttccctcccgctggagtgcaattccaacgggaaatgggttgtgccggcaggtcgccaacatgccggcaatgttgtggacggatattcatgtgtgacatcggcaactggataaaggaagacaaaaaaggaaaaggaaaatccatacctatatttagaattaattgttttgtaatgtttcgagtcttttgctcaatctttggtctgatcattagagaccggatttttttcagcaccaaaaaatgatcattaagcacataattcagcaccaaaaaataatcattaagcactaaataagcatgaaaattagagtgcagcgggaccgggaaatttgggcaaacccgggaccgggacttttttggttgaaaaatggcggctgtcactttgcttattattgccgatggattaaaggatttcatggatttgaattaatttgaaaaagttaattggccggataaaatttatttatgcaaaatttaaatcaatattaatattgaaacaatataaataaa

SEQ ID NO: 81021 - DNA, 1298 bp, Heterodera glycines
atggacaaccaaatgttcgacgcggataataaaaaagagttcgagataaacaacaacggcatggaaaacgagtcacaacggtggttatgtgctaatttgaactacgcgtccgtgggcactgcgcttctgaagggcacgccaaacagagacagtgccttattagtgcaggcacttcgccaggtgtgggggagaactgttcgagagtacagtctcggctcatctgttgaggaatttcggatcttatttgatattgtgtgcgactagctttttttgattaattataaaaaacaaatgcatttttatagcaaataacgaaggcaggctcaatgaccgctggagaggccaaccttagcaaaatgatctcaaatgatattttcatgttgcgcaataaaaaacaggtcgatggttttgaagaattttcatttggggcgagggaaaaagcacgaaaaatacgttttcaactttatttgtatgaggaagagctgattaattatggtgaatttgggattttcatgcttaatgctgaaaatgagcatttatttgtgtatgtttatttggacatttttgaaaactttcaaaacaaaattgcaataaaaattttttaaagttttgtttaattatttgtgtgcttaaaatccggactctaaataattattgaaaataattaggtcactacaaattaatcattaaaaaaactttattttttgaaatcattttatttgaaattttattacgctgaaagttttcttatgaaaaaaatttaaatattattttcaaaagctatgatttttctagcggaaaaacacgcaatattccatggaaattttcataatattaattttttaatgtatttaatttattcagtccgttctgtccttgtttttggttccctcccaacaatcctcgtccaatttcacttccgttgattctcgtcgtcccaatttgcttccttccttttcctccacctctctcatcagtggcacatcctccacttgtgctggtgttggccttccaccatcaataccctcatttgtggatctgcttaaggcaagaaaagggagcaaatttaatgagtccaaattagtggcaattgttattaattaatggcaaacttacaaattattgcaaaacggctggggtcgtttcggcgaggattgtttcgaagccaagcgacataagcccacaaaaaattttatatttggtatcaatttaaaaagctggacaactcttttagcctggaaaattcaaaaaatttcgtttgggtataaaaaaatatggcaaaaagtgcgaaaatttga

SEQ ID NO: 81022 - DNA, 733 bp, Heterodera glycines
atgatgatgggccaaggtgctggcaccgtcgccccgggaataacgaccatggcaaaagcgtccgtgacaaaccctcttggccagtcgtcggggccgtcctcccaacaggcgaccattacgaagcaaatcgatcgcgccaagtcgttggtggccaccggcaatgtgaagggcatggaccgggtgtcgatgatgcggtcggcgttgaaggtctgtgacataggacgttcacgcggtgcacctcaaaacgttgccggacgatttttcattgcgacattaagaaaaaaaacatgatgagggagcagcatttttcgagtatattcaagaatattttttgtctttaacccagaaattagctatcaaaaatttgtgcccttttggtttgggtgtttcatttttccttccctttccagagcaccttcaaacactccttccaagcggccactgttactgggtcggactattcgttaccaggcaatctcaacagggcacttttgtggtgaaacttttttccccctcatttttagcatctgacccgaggccagaatggaaaatcaaattggacgaacaggcggaaaagattaaccaatgcatcaacagacaaaagcagcaaggggaagaaggcgacggagagggaaaagtgccaccaaattcggagccgacaaaagcggacgatggacagcagccaaagcggcgatcgagatggacatgaccacacggcattgatccatgacaa

SEQ ID NO: 81023 - DNA, 395 bp, Heterodera glycines
gcgaatccccggcgtgttgaccaaaagttcgctgatgcttggccttggcgaggcggacgcggaggtggaggaggcgatgcgcgaccttcgcctggtcggcgtcgaggccctcacactgggccagtacatgcagcccaccaaacggcacttggccgtctccgagtgggtgagcccggccaaattcgaccgctggcgcgagttgggcgaccgtctcggattcgtgtactgtttttgtgacaaatatccaatttgctcattttgtactcattattttccttttcagttacaccgcgtccggcccattggttcgttcctcgtacagagcgggcgaatttttcttgaaaaatgtgatcgaaacgcgaagaataaaagagaacggaggtggaataggatga

SEQ ID NO: 81024 - DNA, 229 bp, Heterodera glycines
ccgggactcaaatgtcccgctgaggccaaaaattttttctatttccgggaaaaaatcgaaaattttccgaaaaaaataccagtcgatagagctcgaaaaactatgttttggaagtggtcttcgtttttctgcgaaaaattcgttaaaaattcttaaaattcaaaaacccaaaaaccgttttttaggcctagctcgaaaaattttgaaaatttttcaaaatttttaaatt

SEQ ID NO: 81025 - DNA, 87 bp, Heterodera glycines
aaaatcgagcttccaaaactctacaataagtctgctggcaccccctcgctcagttcaaaccctggcgagttattcgcctggtactga

SEQ ID NO: 81026 - DNA, 1500 bp, Heterodera glycines
  unsure (1)..(1500): unsure at all n locations
atgattattgtgagatcgccaaaaaacactcgccagaggacggtgaatcttggggttcagccgttaagtggagacaatgaccaacagaggggacaacagatagtggagaatcctgtgaatttggcagcaaacccgaatgtcaacgagggaaataggcgtaattctgtttcttcagcgaacacatcagtactcgacgcaaacgaaattcgacgcagactgaaaatgacggaaaatgccaacaatgcagcggatggacgaaacggacagcagcaagtgcaccgagaagaagtgcttctgaatgaccatggtaacaatttgttggcgaatgcaaatttgggtgaaaatgtggaaaaaagttttgttcaaccattggtcaatgaccaaccacaacaaatacagcaaaatttcgaaaacgaattgcggcaaaacgtaattgtgggggaacagcgcgtagcgacatcgactccttacatcgaaatgcaacaattgaggcaacaaaacatagagcggcgtaatataagtccacttcggtcaccattcgaacaaaattttcgggaaaatgtggttgtaaacccgaatgtgattgtaaacccgacccgtaacgaaaaccggggacccaatctgcatttttcggaccgaattgatgtaccgccaaatcctaatgcccgtctccaagtttttcgagagcaacacgtcgaaatcgatcgacattattcgagtgcttttcatgcaccggtgccgatgcgacaaacctgtcacggacaaattcaacaagctgcgtatatggagcaacacggtgcgcatcagcctatgctgctccagcaacaaaatatgcgaggagtgatgcatcatcagcagccaatggcggggagaaatgaatattttcctgaatattacggcggaagacatttgtatcccgacggcagagaacaaccaaactcggggaataatgaattaaaaatcggtaatttggaatatgtgctgaccatggaccgacttcccgagctaaatggcaatgagggaactgacaaaatgaaaagttttttcaaaaaattttcaaatgccacggaagaatggccggagaaaaaacggattaaagcgttggaatccaaagtcaatggacgggcagagcgtgcctttaatgctgcgcttaacacccagccctatcgtttcgattcaattcgacgggcaatgcaacaacagctcgaggacacggattgtcgcgaaatgagcgcattcgacgagttaatgagcggagtaaagcgaaagtcaaacgaaagtctggacgcattagccgatcgaattcaaagtcttgtttcccgtgcgtacccgggcttgacgcaaaatttgtgcgatgattatgcaattcggcacctaatcagagcactgtcnaatcccgatctctcattaacgctcgnaatgtcgcgaaggccagaaatgtcgtacgatgaattcgttgcattgnccgcacgcgctgagtcaattcagcgtgcaccaaaa

SEQ ID NO: 81027 - DNA, 502 bp, Heterodera glycines
atgattattgtgagatcaccaaaaaacactcgccagaggacggtgaatcttggggttcagccgttaagtggagacactgaccaacagaggggacaacagatagtggagaatcctgtgaatttggcagcaaatccgaatgtcaacgagggaaataggcgcaattctgtttcttcagcgaacacatcagtactcgacgcaaacgaaattcgacgcagactgaaaatgacggaaaatgccaacaatgcagcggatggacgaaacggacagcagcaagtgcaccgagaagaagtgtttctgaatgaccatggtaacaatttgttggcgaatgcaaatttgggtgaaaatgtggaaaaaagttttgttcaaccattggtcaatgaccaaccacaacaaatacaaatgatcatttaaaaacgattcatcataaattttttgaatctaattatgaattaagactttttttttagccatttaaattcattttcaaatgattttaaataaa

SEQ ID NO: 81028 - DNA, 1673 bp, Heterodera glycines
  unsure (1)..(1673): unsure at all n locations
atgcgtcttattgttgacgatttttttgaccaacaagtgcgacagttttccaccgaactacgtcttggcaatgcgtttctgttccttggtggtgccccgtcggggttagcctcccaactcgtccccgacaatttgtaccccttccggggttgcataaaaaaggtgtgttttgggtttatctttaattatccataaaataattacaataatatatatatatatatatatgtgtgtgtgtgaactaatatgaatataaaatatatcatgaaaatttagccaaaatttcccattttgcaaaatctgttaaccaatttaaaaaattttcacagaggcgcttctcggcactgcatatttttttttttaaatttatgtttaaataaaaactcaaaaattccccttttttggactaaatcaacaacaaatccatccaaataaagaaaatatgaagatatttgggtaataaaatggtgaaaagatgccggggtggagaacattttccgttgatggggaaacgaataatgagaaatcattaatgcccatatagattaattgattgagtgacacatcaccagcagttgacgaatagacaaattaggaggaggcaacaaaaacaattatcagagaacaaacggaccaaatacaactcgtagtgttttaaaaatcgttttaacttttgtcaaagtaaactaaattaaacatttttggcgctacttgcaaagtttgaaattttttttcacttttttttggtcaattttttttttgtttatttttaatgcaggatttgcttttttaacatgaaacgtatttcatactatttaataaactgaaaaaaacattttaaaagaaaatttagcgctagttaaaaattgacaaattttgagttttatcaaaaaccaaaggggggaccctattgttttgcaaaatttttttgagataaaaaatcgtgaatatattttttattcgccataattatgctgttaatacttaatattcatcattatgtgccaaaaaaacaaaaaaaaaatgaccaaaaaaaagttaaaaaaaatttcaaaagggtactctttgcanagtagcgccacattttttggtctcaaacgatattagcaggattttggacacggatcctgggaaaatcctaatcaggattttgtcccattcgagctctagtagctaaatgtcaaaatcgtttaaacagattgctttccgtctattttaattattttacacatataccatatattccaattatttgtatgaaaaaatttttaaatttataaaagtctacagtaaaaaattcttttaaattttaggcctttttccaatcgggtcctgttaagctcaaccttattgcattggctgaccaaggctatggccaatcgcatggtaatctaatacattttattcagtttttaatttatttttctcaaactattagaatttaatttacataacttaaaaaaatttgttcccaaattttcttaaaaaaaaaaaaaaaattaaattttcagttcaaacatttggcgatttatcctattcatgttccccaaatgctcaagtgcctgaagtgtttgccttcaacagtggcaaaaattttagcaaattgccagcctggaaatcgccctccaggggtaccctaggtaaggtgaattgttttttcgaaatttcaaaaa

SEQ ID NO: 81029 - DNA, 867 bp, Heterodera glycines
atggataatgaatattcacatatcttttactgtacatgcactactgctgtggacttggtatatttttttgctgaaaacaataattttaattgccatgagtaacatgaacttcacaaataaaaataagcttaaataataataattaaaataaattttgtaaaatagttacatgaaaatcaatttttgacggatcaaaaataaaaatatctaagaaacaaagaaataacattctcaaaagtaattttctacagtctaattaataagcaaaaaatattgaacaaagagtaattatgtcaaaattaacaaaatgattaaaatgaataaatcgcaccaaattactaaatcatttactttgcaataatataaataaaatcatcatgaaacaatagaaataattaacctaatggaaactggaagcatctaagttgctttttggactttttttcaatatacaaaaaacatttttaaacaataattttaaatataaattttacacttgattattatgcttttgcatcaaagtgcaaaagtaattcaaagatcttggaattttcctgactgaaataaatttaattttacgattaggaaaaataagaagcaatttataataattttaaatagagttaaaatttattattataacaataattaaatcacccaattattacaaaaactttataagtcaatattctcaaaaattttcataaaaaagaaataaacaagaaaaaataataaaattattatgcaaaaattgaacaacttcagaactacaactatacgaatgggcaatgtttaacaaaaatattaaaatgaaagtttaggaatttgaaaattttatttattgaaaataattttaagcaaaataaa

SEQ ID NO: 81030 - DNA, 1731 bp, Heterodera glycines
atgaattattcggctaggaattatttaatgaatgtgcttattaccagcacagaagaaaaactttggaaaaaagacaataaatattcaaaatttgacaatagcacctataggcacttatcgtatcgaaattattttttgataaatttttttaattaagatttatttctttttggcatttttgagaaaactctgtaggaaaaatacaagaaaattgaaaaaaacaccacccatattttattacaaataaaatgatcaaaataaaattattaacagtaataaaatcacaataaatagaaatattacatttatttttactcgtcctcaagatttatattttaagatcacatcaaatatttcatggttttcagtgttcaaatagagaatattaattataccaatatttattcattcacatgccattctcacgtgttattcactgtcccaattcatgggttaatgcatggtcacggtcgagattcacggttaattcatgatcacctagatgattcaagtaatattgagtggcagtgttcacgtgtcaattcactatcacaattcacgggcaaattcacgttcgggtaaatttactgtcacgtagatgatttacgtgtcatattaaatattatatatatataaatatcatttcaaaactaattgcctttatcatttttaaataaataaatataaattcataattttcttttcattaaaatatatttataattctccaaagtcctaatttcacttttctttctaaatgaaataaagaaaatttaattttcaattaattttcatttcaatttcaatagataatgtgaaacccgagtgtaataatatataacagaagaaaatagatataaagcaaaatatgaatatatgcccacaataatctaccaatataatttccaaaaatttaataggcgtctctaaatgattatcggacaaaaaagtcgtaatttttgacagaattcgagaagaaagataaagttaagtttattaattaatcaagaaatactaatattaatttaatcgaagcgctcatcaaattgttccattaatgttcgccttttaaaatgggaactattattattattattttaattttaatttattatttttcgcataataagattatttcatcggtcttatgttcatgttatttttatgtagatttattttttcatcatttaatgcagtgtattttaaaattattattttttataaattaaataaaagttactctaaaatttggaccagtttatttttatttgttttttaaattttatatttttcctaatgtatgttttagaggccgagccggaccggagacccggtaccggtttttactggatccgtaaaacagtccggcgtttttttggaaaaataaggattgaccggttttctggtttgaccaaatccggaaaccggttgcttttgaaaatgtaaattcggtccggaccggcaaaacactttgttttgtatattctaaaaattttcaaaaagtttagtttatttttttttattatttatttaaatttatttacaataaaaagcaaaatttgtaaataaaatggaaaaatttttaaagctttattattctaatcattatgaaagttaaaattaaaaattcccttaatcgattaatttttcagcaatcttgactaaaggatataaaaatatgtgcatttattaatcattaagaaattttataaaaaaattaaatcaaataaa

SEQ ID NO: 81031 - DNA, 1096 bp, Heterodera glycines
  unsure (1)..(1096): unsure at all n locations
atgggnncggcgttggcgcaaacaccagcaaaagcgctattctttgccacactaacccagcattgccaacgctgcaacgattttgagcttaaagcgctccaatctggtgcacaaaaattcgaaaattgtttttaaatattttaaagagcattgtcgtccaacgggatattttgatgtgtacacgtgcccagcagtggcggagtacaaagtggacaatggcacaaaatcacatcatactatcatttataagtgagaaaaaaacaaatttttttttcaattttggcgctagtgaaaaagtgacctattttgaaaattttttcaactttttttggtctaattttttttctttatttatttgcatataatgaatattaagcattaacaacacaattatggcgaataaaagtatattcacgattttttatcaaaaaaaaaaaaattccaaaacaaaagggtccccccctttggtttttgataaaattcaaaaatccaaagtctaaaaagtatctttttgaaatttttttcactttttttttcaattattaaataacggaaaatgcgtaccatatgttaaaaaacaatttacataaaaataaagagagaaaaaaatagaccaaaaaaagttgaaaaatttttcaaaataggtcacttttcactggcgccaaaattttcttacccaaattttaacataaaactcgcgaaaaaaatcgaaaacgtcatttcctaacaagaatttttttctagaatgaaatttttttcgaaaaaatggcaaacgttttcctgcgcagcacctatcggcaaaatggacgacaaaattccctcaaattttcaaatttttttttagtaatttgccttttatgtcccattctaaatgttaaaaaaatttcatttctctcaaccaatctattttttaaacaattttaggccctgcttgaccatgtcccgggaccaggagagtgacagcttttatatgttttgtatggcatcaatggccagtgctgtgctgtccgcgctgtacgttcgctggcgtcgtgaactgattgaacggcgtgcatttggctcttcggcacattcatacgcccgattggccaccgct

SEQ ID NO: 81032 - DNA, 2192 bp, Heterodera glycines
aagagttacttcgtgaaccatataatgagctttcacttccaaaaaaagctccaaaagattacatcaaaaagctggattcggaaatcgaacatgtgccaaagttcaaattggtgaaaaacaaatcgcgttttattatcaaagacatccctgctgaccctgaggcactcctaatgggcgtcttccaacattgtatggatgaagcaattattgacagccgtcaaagtggagttgaaccgactcatctcggatgtattgtttctagccagaacctttcttccgacatttggatccccatttggcagcttactcctgacaccattaacacaatactaaatcgcttcaacgacgttgcacagagcaaaaaacaggatggtgtgacgctgtggggtgaaccatttactgttacagtaacaacacttaaccgtaatgctctaccggcgaagcgtcagctgaaagggggagcagcccggaaattagcaccagttcaccacaatattcatccaaattgtcttattaaagttaaaaatttataatgtcttaattaaaaataaattttagatccaaaattttgatgatgacaattactgtttattttacgctatccaagcaaccctggttcgatcaattggtgacttggatcgtcgtcgctttcatgattacgtcaatggaaacagtgaaatgagaggaaaacttaaaaatgatgctttggaaatgatgaatgctgttaacgcaccagctggtcaaccaaattacgatgcggaagtatatgtgccaagaattgtggactggtggaatggggaaaaattcgtgggccaatggaaattcaaaacatttctcttcggatcagcaggccattacaagcctttattcaaatatggaccagaggactatgttgtgccgatcatcctttacttcgaagagggacattttaatggtgtgcagaaaagtggcaatttgttcggcaaaccatattgtctaagttgtgaaaagacctacgatcggccaaaacgtcacattgtcaattgcaaagcccgctgcattaaatggtaataaacaattttaacaatgaattaattatttttaagctcccaaatgggtccaatatttccatgcaaaccaaataatggattccgacaaaaatgcaaagattgcaataaattattcttcaacaactcatgctatcagtatcatctttcatcggaattttgcaaaatgagcaaagaatgcaaatattgtggtgtggtttgggatttgcgtaataatacccaaaatggaagagaggttttaaataaaaactacatttctcaataatcaaattattatttagggtcacaaatgcaatgagcgatggtgcgaaaattgtcaaattttccacgaattcaaacgggggtgtttcattcgtccgctggagttaagcccaaagaacgaagcacggggatggagattagtcattttcgaccttgagacaatgcaacacgaaccagtggatccacaaatccctgagcgacggaaacaccaagtcaattttgtcaccgcaaaagttgcttgtcctgactgcatttcaaatggacaatggaaagaaagtttgctcggaaaaaaatgcaatatttgtggctaccatcggacgattacattcagccaaatgccatttaatgggacaactgtagatcgacaagtaattgaccgacatcccctggtctccttcgtcaaatggattctatacaatttgccaaaacaatacgacaccattgcatattcacattttggaggacgatttgacatggttttggttttccgagaattattcatggaagggctaaatccgtcaatgatcaaaaacggcaacagattactcgaaatgaaagtaataaaaatatttttaataatatttatttttataatttttaggtaaaaagtcggaagaaattaaatccaaatatatcattccgagattcttggaatttggttcctggcccattagcctcactggtcccaatgtttggcttggacgttcaagacaagccgttctttccacatttggcaaacaggccggaaaattacggctgtcaaatatttccgacgaaatcaaactatttggccggtgggatgaatcctgagaagcgtaaagaatttgacatttggtatgctcaaaaccaaaatcagccgtttctgcttgatgaagcattagccag

SEQ ID NO: 81033 - DNA, 1139 bp, Heterodera glycines
atggccagacagcaacaatccacggcttcttcttgttcgtcatcatcgatgtgctgctgcaatgcgttggccaaaatgcatgaaagttttgtggccaaatttcgtgtcatccgaccgcaggccaatctgatcactttggacggggacaacaacaacgacatcattctccatgaagaagcagacgaagatgaagcaatagctcgtcagtggaatttttttgcaaaaaatggcattttggcgctagtgtaaaagttgtcctttttgaaaattttttcaacttttttttggtcaaaatttttttttgtttaaaaagtcctgaaaccaagtacccgggggttttaaaggtcgctgatcacgaatatggcaattatttgggcctgttaagcaaatttggcgctacttataaagtgatagattttgaattttatcaaaaaccataggggggaaccttttgttttgtaaaaatttttttggttaaaaatcgtgaatatactttttattcaccatgattgtgctattaatacttaatgttcatcattatgtgtaaaaacaaaaaaaaaattttgaccaaaaaaaagggaaaaaaaaaaattttttttttaggaccacatagattcgtttttattatctactaaaattaccttaaaattaaaaaaatcaaatcaaatggaatgtaattgccccaattttgacgaaatcataatttttctgcagccaaattaattaattttcaaattttgcatgctaattgaaaatatggccattcgctaaatttttatggttatgatttgaactggaatagtgccactttttttttgttgcaaaaattcgctgtctcaacatggaatttccttttttgagagccctgtacttcttccgccggacaacagccgaggccgattggtggtggtactgctgacgaactgcaacaggaggcggaggacaacgaaagtgttttgctgaacggcgccgaatcgccgacccccggcgccggcactttgggctacgaaattttggcggaggactccaaaacgcctgccccattctatgaaatgatgagcgaaagtgagctgaatgtacgcgacggacactcctcgttttgttttaaatataaattttgcgacaattttttggtttag

SEQ ID NO: 81034 - DNA, 888 bp, Heterodera glycines
atggaagcgcttggagcaattattttggactgtaagaaaccaccgaaaatactgcagaaagaagcggatgatgtaagttaataggacgacataatttagaaaggacttcagttgtcaaacaaattggaaatgcgacatttcccggccaaccctaaagaagtgcaaatggcgcgtaaacagataatgcatgaaatgttcgaagagaacccagcactgttgtaccaatgggaggacactaaacaacggcccaccctcagccgaatgtttgacaaagaggcacagaaacggttagcagcgactcgctacaattggaaaccgctcaaattcgacacaaaagaggcggccgttgtttatgcgctttcgcggttttttgttaacagagaaaggcatttataaatgtttttcatttactctagattcggtgggtattttgcagaaatgcggcgagtgttttcggaatttgatcggaatggatttgagcccgagacggtgctcgattatggcagtggaagtggggcagctttctgggcggcctttgaaagatggggtaaatcaaaaggctatgctcaatcacattaaaaaatcattttgcaggtaacaaagttcgtgaatattctctcatggaccaagactatgtgattcgacaattgtcaatggatttgcttagggtctaaaaaaaatttctctaaaatttctttgtccaattcagggaaagaattatacaggagcgggcgaaatgatcactcaaaatgtgttttttcgcaaggatctttttccctctccgcagcatacttatgacttggtcattttgcaccgaactctcatcgaaattcaatcggaagaggagcgaatggaattgatcgaaaagctttggaagagaacaaaaag

SEQ ID NO: 81035 - DNA, 1444 bp, Heterodera glycines
atgaacacgtggtgtccgtgctcgtgccaatttgacggatgccaaccgcacccggacgagtggaaccaataccagcaagatccgacaggccaaagtcggtgctatagacagagtttttaatcttaaaacattggccatatataatttatgatctcgtacacccatttttggggttttgatttaggtcctaaaaaccctcttaaaaccagcacaaatttgtaaagccaatggttagttcctgttcccaattttattgcatgataaaaatttcttatattttgtcatctatttacgaaaattccatcctcgacattttttgaatttttaagcaatacctgacaaatttagttaggaatttttccccaataccggaaatttttgtcaactaaggccagggcagtgatctaaattatcaaattaaattaaaaatctgaattgttattattatgaaaatttatttacgaatacggatttgtgtttacattttaaaagaatttaaaaaagtttttagagtaaaagattaaatgccaaaaaataaaattcgagcatagaaaaaaatttcaatttatgaaaaaaactttttttatcacttaaatatatcaaaaaatgatttcaaaaattttgaattcgtttgaatatgttttttaaatttcagtttgcaaagatcggcattcgcaatgcgaacgttgggccaatttccataaaacccgtcatgcttctcatatttctgctcatcatatctttaatcgatggcattcatctaattacccacgaaacataatgccaaaatataatgtgtcatcaagcagtggcgaatgtgcacgcaacgcgcattggatggcacagaattgtgccaaatcatgcggacattgccgcgccgcaattggcacatcgcgcaaatgcaggttagttaacccgcaaattttgttatgcatttataaaaattattaaaaataaaattaattacaggttgttttaataaaatttaatttaaacccgacaaaaaacaatttatacattttttgaattttagcttgatgatgccaaaggactacgaaatgccaattattaactaattcatttccttcttttgaaaatgaaagaattaattttcaatatttatttatttgttgaaaatgttagatatttataaagaaaagaaaaacacaacaaacagttttcaaaagcatatgttatcgtgttgcgtcttttgcgcagcggacatttgcgccgtttagtcaaaaatatattttaaaatttttttaccaatttcaacgaattccactcaaattactaagcaaaaacaaaaaaaaaacaattaaaagaaattttaaaaaataatcataatgataggcatcggcggcgaaggaaactttgagggcgaggacgaaaataatgagatttaataagccacgtgggcggaggtagttttagtttaaataaa

SEQ ID NO: 81036 - DNA, 1703 bp, Heterodera glycines
atgtggagcagtatgtttatgggcacaacaaacgattttggtcaaattgttaatggcgaatttgctaattggatcactgtaaaatttaaaattatgataatttattaactttaattatttgttttgtacacagattagtggaactttcatacaaaggacaccagatgcagatggtcaattattgaaagaagaagagttggttaattatatttcaaataatttaggccgtaaattaaattattgaaaaacgattttttttaacgcaacaaatattgacaaaataccaaaaaagtagaataaattgtcaaacttaataaaaattgaaatactccgatgcaaaaactctaaatttgtttatttagagggcgaaaataagataaccataaacaattttacttcctggatgaattataattaaagtataattaattttaaataatttttttttccaattttagtattgacgcattactctctaacccgaatttggagcatatattctcctttccagatagagttaaattattaatttaaaaactaaaaataaataaataatattttaagccaataaatggcggatgcacattgccaaatttaaacccagcgaacatgatcgaaatcattcacagtgatgttcacacttgggtgggtggggacatggtaagtcaaagcaacaatattgattaattaatttaaaatacaatcattatttagataaattgtcttgctgaaatctttttaattattcaaattttatctgctaaattttttaaaaaattattaaaaatttatttgttcgatttattaaaaattttgggttttagttggcattgaacactgcagcacaagatcctctcttttttcttcatcacagttttatggatttggtgggaacagtttttaattagataattattaaataataaattaaaacataattaaaatcccttcatttttaagatttgggaacaatggagactcaaatggcaaagccgagcgcagcgtgaaacgcaatttccacctgattcccaaattgtcccagtgagtttttaagtaactttaaaatttttctattcaacgctttaataaatgatcagcgatcagtgggaatttaggcgattaaaaatgattgggtaatagcgaaaagattttgattcaattttttgaaaaattttcgtgtaaggttctgtcgaatgaatctatcttgttttggtcctgaacccgaaatttttgatcggtgagcctaatatttcacttatgcatttatacgttgtttctcaaagtttcacattacagtgttctggctctgaaaattatcgtctaagtgcaataatgcgacccttccaggacccggttgttttaaacagaggtaaattaaaattagaaattaatttatcaaatttaaatgaaaaaaagtaattttcattttagatggtctaagcaatgcgtacacggacaatttgtacacttatgcgccaagaccatcatgcaatggagccggtcaatgtggatcaccgtaaaaacaattatacattttaatcccattgaactgtattcccagcagtaggtggcttaatttttttttaacttggtactgtgttagattgtttacagtcttagaaatttaaatgcactgatttgtaaaaaaaactactgaatttcaccataaattttgttaaaaacattaaaattttcctaataaa

SEQ ID NO: 81037 - DNA, 542 bp, Heterodera glycines
atgttcaatcaacttttgcctattccatttggtgcgcaacatgaaagcatgtcttaccgacgagcaaactcacgtaagaaatttttttattacttttgaaattctcaaatttagcgttcaaaactgacgcagcctttgcacaattcgccaaaatggtcacttcgctggcgtttgtgccgctttaggaccttacaccggcgctggcagccctagaagatcatctgccgggtgaacttgagggcgttctcgattggtttgttgagtttaattttttttcaatttcattattgactttaaaggtttgtaatcaactacgttgggcgacttcgcaacaatggcacacgcactcgtccattgtttcgtcctgaagaatggagtgtgtatgagcgcacaatgagcggcaccgaccgcacaaacaacttcgccgaagcgtaccatcgcatgttgcaacatgcgatcggacaaggacacccaacaatatggaaattcatcaatattttgcgtgagcaccagaaagtaatcgacgttgacttcgaaataaa

SEQ ID NO: 81038 - DNA, 1281 bp, Heterodera glycines
atggacgcacaacaacttcagcaaattttggacgcggctctaaaaaaatcagccgaagtttttgccgccgcactcaacattcaaaatcaaaacccaaacccagggtcatccacaacggcatcacttgcggcatcaatcaatgtccacctcgaaaaattcaattataatccagaggttggacagacttacgacgcttggctgaatcgatatggcaaaatcgttcaacaagacggcgcttcgctcccagagcagtccaaagtccaacttttggtcggaaaattagacgaggaggaatacaaacggtatgttgacagcattgcaccaaaagccacagaacaattcaactggctcgaaaccgtggcaaatctgaaaaagatttttggtgagacgaggtcgctcttcctccgccgtttcgattgttttcaaattcgccaatgccaaaaccaagacctttcgagtcttttggcactaatcaattcatcgtgtgaaaatgccgaattggatttgaagaaagaagagctaaagtgcatgattctcatcatctctttacgcgacgaattttcggatttgaaacagcgatgtctccagcgaatggaagaagcccgaaccaatgggaaaagcatcaccctacaggaattgggcgaagaatgcaaaaagtaccaaattttgaaggaaagcacattggcactcagcacaaaacagtacaatgccaatgccattcgtgccaagccacaacaagtaaaggacaaggcagacgcaacaaagcaatatgccaaaccaaaagcggttccaaaaccgtatgagagcaagcacaaattgccaaaccgtccatgccaatcatgcggaagcacaaatcattggcgctccgattgtgggcacagagatgccaaatgcccaaaatgtggtaaaatcggacatctcggcaaagtttgccgaagcaattcttcaattcgccacatccaaacggtgaatacaactgaaaggcatgcacaaatcaacacagtcatcatcgacttaaattgcatggaaatcaaagcagaccatccaaaatggtggaaaatactaatcaaagtgaatggcgcagattatccaatgcatgtcgattccggtgcacaaatcacattgttcacaatccaaacatggattcaaatgggcaaaccgcctttgacgtcagcaaatattcgcgtcaaaaattgcaatgaccaaacatttgcaattaatggacaattcatgtgcaaagtgcaatacatggatcgtccaccaatgaaattgttggcatat

SEQ ID NO: 81039 - DNA, 1740 bp, Heterodera glycines
atgcaacaattcgagttcgagaacggaagcgagagcaacatggacccagcgaatgagggccaccatcgcaacggcgcacagcacgacgaaaatgtgcaggacggggatggtcccgtcgcttcaacgaacgaagagcaacaaaaagttgccagagtaaacgaagcaacgagaggaagcaacatggcgacaggcgtggcgacaaatcagcaagggatgctacccttcccatcacgcaatttgcggagtgtatccatcccggtacggacagcgcgggacagaatcgagagagcatccgggactctcgccgctcgaattgcggaggctcgagaagtgatcgaccaagaccttaccgaaggggaggcaggctaccaagcagcgcgacttttggccatggagagaggactcaaggaggcaactcaaatcttccaaggacatttcgagattggaatggcagcagcgggagcagaacccgcaggtcaccaggacttcttctacgacctactgacagcgccactgccggcagcaacgaaagagttgcagttgcgaaaccatccaacaccagctgaactgcttcaaattgcggacgagcacatcggagacttaaggacgatgcgacaggcactcgaggatgaagaagaagcaatcgcgcggtctcgattgagcgggtcattcgggaccaacaacagccatccggtgggggacgacccacctccactggaaaatcggaacatggaagaatgggagagatccttccaaggggcggccaaacgatggcaaaacgacggacaaggtgtaccgcaacacaaccgaagaccaatgggacgggtcgcgacacccgtcatgtcgaatttggacgggatttttcagcggcgtgccaaagtaccatccgtcgccagcatgagagtgacgaacccagcgcgagaatggatcaatcgaaatcgagacgagatgggggcgtttcccccagcaacagcccatcggctggcactgatgcaaccaaaaatcgaaaagcagcagactcacgtgaacgacgactatcgggagcgtcagacatacccgattcgacggcatgctcgagacgagggagaacatgatcggaagcacgggagggacgaaatcacggaaatgacaacattcgagactgttcggctgcaaccgccgactttttccggaaagcccgaggattggacaacattttgggcctatttcaagcgagctgtggacgacaaacccattcccgggtttgaaaaacaattgcatcttctgcgctgcttaaaggagggatcgccagcccggcgggctgttgaagtctaccctccctccgacggcaactacccggtggtcgtgcacctgttaaaagagcgattcggcgacactgacgatttacagcgggcaattcgggcccggcttcttcacttgccaccggcaaaggacagcgtgaacagcctgacaacgatgatcgacgagtttgagcggtgcgtgtgccaactcgagcagcttggggcgaacgtggacgacgactcattcggcccattgctggaggcaaaattgccggtgcgagtgctcacggaattgcggatcagagaaagtatgatgggatcgaaatgggcagtgcgcgagttcaggagagcggtgtcggcgcaagtacggtgcatgcggtcagcagagtcagcattggcagcaatgaaagacccggaagagggcactgatcacaaaacagaacgtgatcagacgggttgg

SEQ ID NO: 81040 - DNA, 766 bp, Heterodera glycines
atgggacaaaggaacggacaaaatgtgaatggtacgaaatggagaaatgcatatgagaaattggatggaaaaggggcaaaaattaggaatgatcaattttgaatgaattgatgaatcgggactcgccccgatcttctccaagaacatccctcattctttttgcttcgattgagtcccgtcccgttcatttgtgcaataggcggggattgacccgccttctcgtcgccaatgaaaaaattggcgacaacttagttaaaataaacaaatcaaaaacctaacgctttatcaatatataaaaaaacaataaataaatgttaacaaaaaacaacaattttcaagggttcatttgataatggtgggaaatacctcgaagaaattccaaaatagtgtgaaatttttctcaggtgacaatccagcgatcgcagaattgtatttgtggtcggcaattttctgttcacgtcgaagaacatcagtgaaatgccacaattttagtgaaaattcaatcactcataattttacgagtagtgatcagaaatgcaccagattttgcagggtaacagctgagaagaatgcttattcatataattatttaactgtcccataatgtttctttaaaaattttaaacattgcaattttgcgtacttttccaattttttgcaaaattaattcatgaatattttttcagaaagtgctctgaaacgcaccaaattttatttacatgttaataaggccctcttatgattgcattctgaaaataggtgctga

SEQ ID NO: 81041 - DNA, 3332 bp, Heterodera glycines
atggagaggggactccaggaagcaatccaaatttttcaaggacatttcgagattggaatggcagcaacgggagcagaacccgcaggtcaccaggacttcttctacgacatactgacagcgccactgccggcggcgacgaaagagttgcagttgcgaaaccatccaacaccagctgaactgcttcaaattgcggacgagcacatcggagacttaaggacgatgcgacaggcactcgagaatgaagaagaagcaatcgcgcggtctcgattgagcgggtcattcgggaccaacaacagccatccggtgggggacgacccacctccactggaaaatcggaacatggaagaatgggagagatccttccaagtggcggccaaacaatggcaaaacgacggacaaggtgtaccgcaacacaaccgaagaccaatgggacgagtcgcaacacccgtcatgtcgaatttggacgggatttttcagcggcgtgccaaagtaccatccgtcgccagcatgagagtgacgaacccagcgcgagaatggatcaatcgaaatcgagacgagatgggggcgtttcccacagcaacagcccatcggccggcactgatgcaaccaaaaatcgaaaagcagcaggctcacgtgaacgacgactatcgggagcgtcagacatacccgattcgacggcatgctcgagacgagggagaacatgatcggaagcacgggaaggacgaaatcacgggaatgacaacattcgagactgttcgactgcaaccgccgactttttccggaaagcccgaggattggacaacattttgggcctatttcaagcgagctgtggacgacaaacccattcccgggtttgaaaaacaattgcatcttctgcgctgcttaaaggagggatcaccagcccggcgggctgtcgaagtctaccctccctccgacggcaactacccggtggtcgtgcaacttttaaaagagcgattcggcgacacggacgatttacagcgggcaattcgggcccggcttcttcatttggcaccggcaaaggacaacgtgaacagcctgacgacgatgatcgacgaatttgagcggtgcgtatgccaactcgagcagctcggagcgaacgtggacgacgactcatttggcccattgctggaggcaaaattgccggtgcgagtgctcacggaattgcggatcagagaaagcatgatgggatcgaaatggtcagtgcgcgagttcaggagagcggtggcggcgcaagtacggtgcatgcggtcagcagagtcagcattggcagcaatgaaagacccggaagtacgcactgatcacaaaacagaacgtgatcagacgggactggaagttcaagcaggtcgggaaccgtttcaaagagcatttatggtacgggacagccaaccaacccgtgcacaatccaacggaacacgaagcgaggagaggtacgggacgaacgcccgtttcgccagacgatcgatcacacatgccaacgagaacgagagctcaggcgggaattggccccgtgtcgcatcaaacggaccaattgccacaacggagatatggaactgttcactatgcctaagaagtggacatcgaccaagcaaatgccaagcctatccgacagcacaggcacggaggaagagactcattgagcagaaacgatgcttgcgctgtatgagctccaatcacttattcaaacaatgccaacgagtaaaccggtgcaacgcatgccgaaaagacgaccatcattggcttctgtgctggaagagcatatcgggtggccaatcccgatccttcactgagcacgaacgaagggcaaagaaccatgcgacgctgatcagtgggatggatcgaccaactcacttcactgcagtacgagacgagcagaacaatcgagacgagttcgatatgaatgccggggaacaacgagcttttaccactttcggaagccgactcccggcccagcaaatgatatgcagagtgatcgcagctgcagaggaaggcgaagacgagtgccaaacaactttgttgcttgacccgggaagccatgtcgacggcgcagatacggagctaattcaacaactcggaccgcaacctatcgacaagcggccgcttacagttcaagtgttcggaggaaagaagcagcggattcggtcagcaacttatcgcctacgactcaaacggaccgacggcaaatgggagagcattgaggtgtccgaagtacctcagatctgtacgccaatcaaaacagaactcatcgagtcgggagcaacacccgatagcgaaccgcgaaccgtcacacagacaacgcaacctcaaataatgatcggcattcgaaagttctgggattacgtgatcggatttcggaaaattgagagtggcgcgcatgtgatcgacaccgtgtttggacaagttttgtgcggcgaaggcacacaagcgagcagcggggtaactcccgcggcatcaatcctaacaaccatgccatgcggaaatatccaccaaactcgaacaaataaacgacaacaaatcggagaagtacgtcgaaattggaagcgaaaacgaaagagtcggaaaaacaattcgcgagggattgttagccgagaccgccacaactcacctgcagagtttggtcccgatcggtcgggtgcgaacgaagttattacgtctcgagaggagccaattggggaaatggaccctaaacagcgaaagtggcccatcggacggatagtcgagacaaaaggagcgagcgaacataacagaaatgccatgatcagaatagccaacggacgaactcggagacgaccgatcaagaaaatttggccgctgaaagaagcgcggccaaaaacgggcgaaacggacgaccgagctgacgaagcagtacatgaacgacacgaagaagaaacgcgagcagccaagactcagagcgaaacgagggatcggaacaaaccctcggcaacaaggagggaggagagaaacgaaaccaagaggaacggaaaaagtgccgaaaagcgaggacgagaagttgaagatgtacagcctgacaaaaaggcaaatcgacaaattcgggacgacaattctcgagggaatggccctcactattcggacgagaaatatggcagcgcaacgacgacggagaaatcggcagttttcgaaaaagcggcagaagtgccttcggcggcacaatcaaaagcgggaaattcggcacgcccgcattcggctcagagacatgagaaaaaatatctgggagatagttcgatggccccaagtctcctcaatgttcctaccaagtttcagccgaattcgacgatatctgaaggaggagatag

SEQ ID NO: 81042 - DNA, 1710 bp, Heterodera glycines
ctcatccttttggcagcagctgtcatttcccttgtgctttccttttacaaaccgccgaatcgagaagaaatcaacgcaatttcatcttcgcacctcgcaacgacaacgccgaacagtgccgaggacgaacaaagcagcggaataacagaacaacacgcgggatggatcgaaggggcggccattctaatcgcagtcagtgggaaggacggcggagggggggggggacccggaaaggaatggaaaggcggaggaggggggaacgcggaagggcgcgggagagggcggaggggggggggggaccggaaaggaatggaaaggcggaaaggatggagggcgggggggggggaatttgtcatgacgggaagaggacgggaagagggaggcgacacgaagcggacggacataggctgatgaatggccaattcggcactttcgcatccgcccaatggccacggatactcattagagtaaataccgctgacttactcttttaggttattgtcgtcgttttggtcactgcgcttaatgactggagcaaagtaaggaacagaacattaattaaaaatgctttaggctttcttcccaatgctttcgttgttcaggagaagcagttccgcggtttgcagtccaaaatcgaaacggaacataaattctccgtaattcgcgacggaagggcgatggacattgtgatcagtgaggtagggaaggaaggacacagcagcgaaacgcattgtttgtctgttattcattttgttttcgattgtcgttggcgacatcgcccgggtgaaatacggcgaccttttgcccaccgatggcattttgctccaaagcaacgacctcaaaatcgacgagtccacgctgacgggcgagtcggatcacatccgaaaacaccccgagacggatccgatccttttgtccggtctgcggcgccctcccgcctttttgtcttacagtcaatttaggcactcatgcgatggaaggcagcggaaggatggtggtcacggcggtgggcatgcactcgcaaacgggcattataatgttggagatgggccatgggtttgcacttcaattcggtcttcaggagtctgttgggagtgactaaaagtggcacgacggaagcccaaacgagcaattcgagcggacagaacacgcaaaattcagtgtccagtgtcacgaaaagtgccaaccgaaacggacaacgtacggcaggcactttctttgcaatgccaacccctgactttcagctttgaacggcaatttgttgaagtgcgtcgccaatggccaaatgacttccgccgctttgtccgccgatgtgccgccgccaaacggcggggcgacgacggcacacgcggcggtggaggacaatttgaagagcaaatcggtgctgcagggaaaggcgagtcaccgcgccgcgctcccttcccccaccccccccccccgcccatcgtttagctgtccaatttggccgttcaaattggttacattcggttcggtggttgctgctgccaccgttttggtgctaattgtcaaattttcgcttcataaatacggcgagtgatttgttcacttttttaccgattcgcttctttttcagtgtggggccccgaggaaaaaaaacatttcgaggccaaagacattgccaacttcgtcgatttcatcatcatcggcgtcactgtgctggtgatcgccgtccccgagggattgcccttg

SEQ ID NO: 81043 - DNA, 1968 bp, Heterodera glycines
atggatgaagagatattactattaaataatgccaaacaattagaagaagaagaaattcagcaacaatatgttgcccaattgaatgaaagaattgaacaattcagagcaacaaaacgaaaacttaaaatgtaaaatataaaaaatttattaaaaattatttaacttttaaaattctgtataaaaattaataacttatatgttaatagaacataatatttaattaaaataaaagaataattaattaataaaaaaaataatatttaattaaatattcgtataaaaatgcgaatattttcattaaatataataaagtaaaaaatttcgtaaaaaaaataaaataaaattatttaaaatgtagaataaatgtattaaaattatttaactttttaaaaatccaaaattttgtataaaaattaccaaatttatagcattttttttattactatataaataaatattaattaaaaaaattatttccaaatttaagtgaaatcaatcaactgatcaacaaggcggaaagcaacgagcccttcacatttgccgtttacattcacatcaaaatgaacgaacggcacaacccgcgggcgttgcacgagctgttgatcaattgggagaggacaaaacggtgcgaatggaactgtgatcagttgcgcctttgggtgagaaatcattcgacaaatgaggacaaaggcatcacaagtgagtgggaggaaaagcctaaaataggggatttggcattaatagggatacgatttttagggttttctagtgctcgacattttgaaaaaaacctcaaaactggacctggacctggattccatgttagatcaggatttccttgacaaaaacccaggaaaatcaaggtccatgaaagatccaggcactcgaggcctggatcccagcctggacgtggattttttgaaatttcttttaataaagcaaaccaatgtttgaaaatatcaatgaattgattgactgatttggcttaattttgttgctttttggataaaattttacgcttttacacccctaaattagaattttttggcacttattttccatttttagcacctatttttgggttttagaacctaaaaatcgtatcccttattcatcaaattgaagtcgaattaaaaaaaaaattatgggtttaaatggcattaaatttattcaaataaatggcatcaatcctcttcacccttcatatgaaaatcttagcaagcaaaaatagtaaaagaaacttcaaattctcattttgtctcgattcgttttattattccaacttgttttttttgaaaaaactacaaatcgagttcaaatcgatgaaaaaaattaatctgtttttaacttacaaattaacgtactaattaaaaaaaaaagtttatttgttgtcatccaaaatcacgaaaactgacataaaaactattcttaatcaaaaaacatcttaaattttagtgctttgactcgattataagtttttcaactaaaaaaacgaattgaaaactaagaatagttggccgagaacgagttgattgccttacaattagtatcaaatacagtagtccattaaagttgttcaaaaattaatttcgccggcgtttctaattagcatcatcgtgttatttattattttgccgacattgtaccgtaggaaaatatttgtaatattttcgagtgcgcgaaactcgacaaaacccacaaatttttcttgacaaaaaatttcgccattttcaagacttattcaatgaagtgcatccgctgcacattcatgccaaattgaatcacacaaatgaacagttggcccgtgacgtcaagcatttgctgatggtcgacgcggcatttgaccgcgaggcgcgcgacgaatgccaaaaaatggcatttgaagtgccgttgcgcaattgggcggcaattgcgcagcaaatggacgacgacgagatcaaagcatatgtggtccaaccattgaactcg

SEQ ID NO: 81044 - DNA, 1501 bp, Heterodera glycines
atggaacaattggccgccttttgggctcagtcgctgaacagtcaatcaatggaagttgggcgaaatcaattcattttattccgccgtctgatagatttatggatgtttttttccaaatacgaaacccgcctttttcaagactgatcagcagcgaaacggatttggcgccatatcaaaacaatccgaataatgcaagaaatagaggaataataaaaattataagcgaaattaaataattattagtaaaattaaataaaaattcatcaaaaacgggttcattaaacaataccaaaataactgaaaaaattatttatagacaaaattgacgagaacaagatgcgatttgatgggaaaagaatgtgagccgactcgcgaactcttacggaagattcggaaaatttcgaagtgctgctccccgtctaatgctgctggcccatgcatttgtaaacttccgaaacccgatccggtaattcatcttttttgtactttattaatgatacaaattatatttctaattgcacttgtagagtgaattcgcggcacccccgcatcattataattggaatgaatctccttcgctcaaatacggtaacagccaatcggaggacccattggattggacgggcgatgttttatatacggaagagcaggcgcaacgtttgcatgacagatacaaaagcggtacttaccgtatcattaaaacaaaaaataccactttaattggctaattaactatttacgtcttttaaattaagcatgcgcacagtgttacccaccagaaaagaagaaatggagaaggaaaagacaggcccagccaaatttgagcaaatggaccaaatttccaattgctattcgtttcaacagaacatgtatgtatatcaaaaagaaaaatttacagaattagtttactaattttcagtgggcgagccgactccacctcaatttattgacgctgtcgaacaagggataaaattcatcatgttggtgaattttgcatgttaaagttaagtgataaaagtggcttctaagggacaagacttgcctaaaatttaccacggatctgagccatgggccggaggaaggcatcgaaattaacaacgaaactggtaactactgtggtctttcttggattggacgacgcacttgggaaaaatggcaaataatttccatttcatgtaccgatgttagtttgagttttttttcttgcttgtattttttaaatttattcattccagccaggaactgtttgccatgagtttttacatgcgattggcctcaatcatgagcaacagcgggatgatgcgcgtaaatacagcaaactgaatccagaagaacggaatgtagttttaaaaattattaatttatggacatataataattaaagcaatggaatgaggcatatgataaaacggataattatgaccttccctacgattttttctccataatgcattatcctgctacgaaaaaaaatgggttggtaaattttggttaatttgaa

SEQ ID NO: 81045 - DNA, 790 bp, Heterodera glycines
atgaaattgtgccaaatattcattttaattatatttttgatcgtcctaattaatattaattatgttggatcagaaaagaaaaaattgcgacaaaaaacatttgatgaaatatttggagaaaaatgggaagaaaaagaagaaaatcaacgaaatgaactcaaaaaacgagaaataattagaacattcaacaaaataaaagagaaaataaagcaaaaagggagaaaatattcaacaaaagaatgggctaaaattaactcaaaaatagcgaagaaattggggacaaatcgccaatatatttataaatggatcaaagaatttggtcttcaaaaaaagaaatgctacaaattaagaactgatgaagaaaaaactgaaattgtgcaaaaatttattgaaatgaaaaatagatataagcaaaaaagaaagttttcagaaaaagaatggaaacaaaattatgccgaaatttgtaagaaaattggagttggctatggcacaattaaaaaatggaagaaacaatttggaattcactgtataataacggagaaagaaaaaaatggaaaaaatgaatatttattggcaaacaaaaatagaaaatccgaaaatgagtgagaaagaaattgcaaagatgttgaaaattgatagaaatagtataagtaattggaagaaacaagttgagatggaataatggacgattattaattcggaaaaatttaaaaaaattttaataggcctatttccgataaagttactcacattttacaatttatatatgtcgatttgttagaaggttata

SEQ ID NO: 81046 - DNA, 980 bp, Heterodera glycines
gaagagcataaagaatttgcaaatgttacgaaaacttatttcgcttctcttcatgcatttgttcttttgacggacctaaattatgaagagttcgcccttaaattacatttccaaattcaaaacagccaagaaaagtttgctgaatattacacgtaaggcattgtttttgtgcccttttcaatggctttctcagaaacctaaaatcaaaatgtgacaattggaccatcgacaaatggcaaaataaaatggagagaattggcgaaaaaattgtggataaaagtagcaaagaaaaatgcagagaattcgctgtcaaattggacgaacaacggaatcggagccaaaacgaacagtcggaaaacatcgaaccgcccaaacaaagtttgttcacaaagagacgaattggtattaaaacgggacaaattttaatacggattgtaagagttggaaacagatttaacgatgactttttcagcgtcctttcatcgcacctcgtttaaacgatcggtaaaaacttccaaaatatttgctgatcagcgaatcctccgaaatcgcctcatcagcccactcgacgcccaattccgtgctgaactgttccaatttctggactcgcttttcctgcccaatttgttgccctttcccaataaattcgttgctggcccaggcgacttggcccttttggacccttctctgtccgtcgaattcgaccgttgtttttctgattgtgaacaatccgatgagattaaacaattggacattgtcaatgtctatcagttgctcgtctcccatgattccctttattacacttttcctctttcgactctccaagaagccttttgtctattggctaaaccaattgagggtttggagaaagaagcacgctttttgtctgcaattgctcaggcaattagagtttttaatctgcccaacaaatgccattttcagttggaacacatcggagttgtcaaatcgctgcccaatga

SEQ ID NO: 81047 - DNA, 391 bp, Heterodera glycines
atggccaaattgaactgccccattttaacagttgatagtgctgaaatggcttttctgctgaaccagcactgtccgtttcagtcccgtgccttttcaccgccgggaacggcgctcaaatgggcaacacaaattttgattgtggtggacaatgattattccgttaatgatgtacgcagcggcgccaccaacataaatgatgtgcacagcgagcgcatcgccaaaacacgacaacattaaatccaataattatttgggcggtgcgggggagggcaatgcgtgtaaaaattgggccaactttagacaattttaaatcggaaattgtttttaattagttaaatcaaaaaaatggaatttatttttgacaatgcatttaaaagggaagtaaaataaa

SEQ ID NO: 81048 - DNA, 1023 bp, Heterodera glycines
atgttaaaatttcaaaggtctgcatcaaaaaatacgaccaccgattccccgacaatttcacgtcgatcattgcccgaccgacggagttcatttgtgtcaagtcaggtaatgaaataataatgaattgcctaattaaaatactaattaattttgttttcccaataagcttggccacagccgtgccgttgttgtgattcggaaaatcagtgtcccattggcatggcctgtcgaagaatatttcagtgccagaagaggtgattgaaaataattgaatttaaatgtttaaacatgtttttatccttttaaaatccaaataaactcaaaatatgaaaaaaattgtaagaaaaattccataaacattttttaaaataaaaattaaatttaaaaataaaataaaaattaaatttaaaaataaaattatgaatttttagattggagagaattctccttgcaattggcattccgcacttcaaatggaaaggaatatttctcaaaatcaattgagaaaattaacccgtaattttaatttattaattttcaaataaatatttcttttttaaatttagcacttttactgacgtcaattttcccgatgaatttgttttcccaaaccaaggccatgactttgtcattgaagtgagttttaaattaaaaaaatataaatttatttaaataatttaaattaatttatttgcagttaaccgtttactgcaaaaggaccgacaaatcgaggccaaactcatcgctggtacacactttttcgcgctcacttggccgttcgcttggacagtcgtggaaaaagtattttatccgtatttccgaaaataaatccccagggggctttatttttcaacaaccctcagaaggatggttttatttcagcaggggtttagaggggggcattaatttaggggcgggaatgtgtttatttttcaaaccccctaaaaaggggggggggctctaatttagggtggtaaggcaataatttaggggatctatttttcaattcagaaatactgtata

SEQ ID NO: 81049 - DNA, 165 bp, Heterodera glycines
atggcttcggttactgatcgttttctgatgaattggaaggggattccgctgggttttggcctcgtcacttcgacaacatttcatatttttaacaatcggtggcttcgaaatcgtttcaatgccaacgcctttgaatcaaaagaaacaaaaattgcagaacaaatg

SEQ ID NO: 81050 - DNA, 1672 bp, Heterodera glycines
atgcccaccatcccattctctacgccaattcagtctttcttggactcaaattcgccgttcgatgaaattaccgtcgctggtcattaaaaagttcataaattgttacgttttggtatgttttttcagttccgtctgatcttcgaaagagcagttcagttgtggacccgttccgacgtaaagtgccgagtaatttgttctgcgctttcccttccgacccttttttgatgacttcccgtgccgtgtcatatttcgcggagaagtaaaaattacaaataaataattgcttaatgcaaagtttaaagttacaaaattgtcggaggcactgtcgaacaactctgtgaacacaatgccaaagttgctgagacgatcttccggtgtttcaatttgattaaactttgaaacggtttcgcattgtcagaagtcgccttgcttacacatggcgagtgatcgcccttctctgtgctcagaacgaatttgtcacagttcggccccatttttcatccgctgtcaaatcgtcgctgaaaagtgtcgccggcagtgcggccgcgaccgatcacttccatcgcttccgacggtcgttgtcgtctaattttttgcttggaaatggtaaaataatttaggaaagggaaaagcaaaagttgatttttacagatcatcaaaagggcggctaccatcggttcagtcatcggagtcgccttatgcacggcagcggacactctctgtcagccgatggccgaacggtcgccctgccattgttggacaaagtccgctcgccccttccatcccttggctttttgcttatcccaattttctgccagggttaccccaccgtccatcggccactgctcatttccgactccctttctgctgttgctcatcaacaccatggcaaagcccctgggttcggtgcctcaaatccttttttcggtgctgatgagcttaatttgggcggtatcactgagtttggcgatcagcaattggaaaaggatgcgacgcattccatcggtcggcggtacgttttcatatcactgttaattttggatttgtgtgtttattttgtgcagttcgattgtaagctccagcattgtggatttgtcgcagctgagagaggaggcttttgcacctcgctttcacggcacatctctcaaccgaagacgcaagttggtctccgatggaacattaacagcagaaacacttcgcatgcggcacaaacaaaggagcagaaaacgacgaaaccgtacaagcgacgatgtgctgaatgaaaatgacggggaaaaggacgagggaatgaccagcaaaagttcgggggtgagcagccaaaacccccaaatttttactgtccctcttttgaatggctctttcgcctcctcattgcccccttacgactcgtcgtcggccttcgaaagtgacggaactcaaagcagcaaagaaggaaatggggaaggagatgaggcggaagatgaaagtgaaggttctttggatgaggaacaactaagtgaaagtgatcggcagcaagcgatcggactgatttgactcgaaatttgcatttgcaggcgatcggatgggacggtcctccccgaagactttgcaaaagtgcagcagcgccgcactgctcttcttcgaccccatcccttctctaaaggcactgcttgaccactgttgcgcaatggtc

SEQ ID NO: 81051 - DNA, 251 bp, Heterodera glycines
atggaaaggaagataaaagaaagagaaagaggagaggaggatgatgaggaggaggagggaagagagaacaaaatgatatggagggaaaaggagacgaagaaagaggaagagaaggaggaaaaagaagaggggaaagagaggaagaggagcagggaggagaaaaaagttagaggaacagaacgagacgaggaagatgaacagcaggagagaagagtctgtgagaaggcgagagaaagaaaggagtggaagaa

SEQ ID NO: 81052 - DNA, 531 bp, Heterodera glycines
atgttacaaaaagttcttggatatatttcaaaagttcgtgtgacttctacttacaatttttggtctcattcacaggaagtatttgtccacgtcacaaaagattttccattggttaattgggtaaatttttcatttgttttgaattttttgaggcaagtagttttttatcatatgatgtactttctatgtttaatcccaggattaaatcatttatttaaataaaagctttctcaaaaaagaaaatttagctgaaatattgcattacaaaattcacaacagataacactgtaagcactgataaaataataacaataaattttcgaactatttttatgaatgaaaatattaattacagccataattttgacattttatttttgcagttttatttggccttcaaagatgttaatcctagctggtcactaattggatgcgcactgatttatggaatcacgccacatttagagtcattttcaattcatctgtcattgttgtaacataagaacaaagtgtgaaattaatttaaataaa

SEQ ID NO: 81053 - DNA, 200 bp, Heterodera glycines
atgctcccagcccttcgccttcgaccagataatgtaaaaattggtaaaaaaataaagctgattgtttctttttaaatttcattaaaaattacatttatttttttgaataactttatttttcgattagttttatcaaaaaaatttattatattcaggataatccttataaggatatattttgattcaattttaatcaaaaa

SEQ ID NO: 81054 - DNA, 551 bp, Heterodera glycines
atgcggaatacagggtttgcattataaattaaaaatttatccgtttgtttaggcatgtacttcagtcgtaaaggggaatgttcttgcacggttgagaagaaggtgacatcttattttaaggtgtcagtggcgaatgatacagggcttttagaaaatgtggcattttttgtgtgtgtgggaagcagaacgggatggaaacgcaacttttttaaaaattcatatacttataatttatgatgaaaagaaaagcccgtcttatttattttttgaaaaaaaaatatttacagggaaaacgaaattcaaaaagcctcaaattttgtcactttatgataaaatttttttgctgtatatgaagaaattaatctgcaaattaaaaagataaaaaaaattcgatttaatgcaactttttagcacttaaaacaaaatgctgcattttctaaatttttctttaatgttaaaagttacatgaaatcgcaaaaatccgcaacccataatccataaaccgaatccgtaattacgcccagccctgcttacaataggtaacgaataaa

SEQ ID NO: 81055 - DNA, 2605 bp, Heterodera glycines
atgccgcagtttccctttctcattttgtcctcatttttgtttcctctgcttttttgctccgttttttctgccattgggccaaatgctcgcgtggattgtgcccccaaattcggagagggcaaatccgactgtttggccaggggctgcctttgggatggtgcttatgacaaggtaccaatgcgtagtcattgcctgatcacttttttctttcattacagtaccacggtaccgttccgctgtgctatttcccaccggggacgggttatggtttggccggcaaaacgaatgaccaccatttcaatttgatacgcttaaacaatggggtagcaaatccctacggtaaagactttgccgcgttggaattggtcaccaagcagttcgggtccgctctccatgtcagcatttatgccgaaaatcggtaggaccaaaaagaaaatctctcaaatttaaatttttaaacagatttcgaccaccacttccgtttaatttcgaagcaccaattgagtcgacatatgaacagatttttgtcaatgtttatcctaaaaaaccaacacatgaccaaatgttttattttaccgttgagcgaagcgacggacaaaaaatttgggacacatccattggtaatgcagaaactttttgaaaattctttcaattattaacgataatttaggcggacttttgttcgccgaccaattcattcaaatcgccacttatttgcctactgatttggtctatggctttggcgaaaatgcgcaccagcagttgaagcacgacttcagcaagtacaccacgtggggaatgttcacgcgggacgaagcgccgaatccgttggtggaaaatgtcgagaatttatatggtacggtgaataatttgtataaattgcaaaaagtgacaaaaaaacaaacaaaattccattgctccaggcgttcatcccttttatttggccttggaaccgagcggaaaagcgcacggagttttgattctgaactcgaacccgcaggaaataacgacgggcccagcgccgcatttggtctatcggtcagtcaattcgattgatcggtcaatcagccgcccgattgggagaacccttgctgaactgttaagtaccgtaaggcgaggattgaaaagttaagagcggtgactaattcggtagatcattttcaaacgcaatgttttggtttgggtgattcgcgggattgaagacttacgcggggctaacattttgtcaatcgctttcgttaagttataattttcagtaccatcggtggtcagttggacctgttcttcttccccggcccctcccccgaactcgtcgttcgccaataccaccaattcatcggccggccctatttgcctccatattgggcattcggctaccaattttgccgatacggctacaaagacttgaacgatttgaaggcaacaattggaagaattcaggctgcagtaatcccattggatgttgtctttgtggacatcgatcacatggagcagtacatggacttcactgttggtcaacaggtgaagaaggactgtaatgtcagctgatcagcacagagagcagattctgatcaaattgatcagttcaatgatagcaaaacaaagaaagagaaagggacacagagatagagagagaaagcgtgagagagagagaggacgacagacagagagaggggagaagagagatgaaggaagtataaagaatgtaatgttaagcaaatatctcacaatcagtaaaatttgccaatttgtgttgttctacttaatttttgagaaatggggtgctcttggcgaatacgtggacgcgttgcaccggcagggccttaaatttgtaccaatcctcgacccggcaattcaagtcgattacgaagtgttccaacgtgccatccaagcggacgtttcctttgtggaatgggaacgatttgaccaagtgccgaaagatgtgcaaaatctttacccaatggccaaagaaacaaaggcaaaatgcaaattgatgggttcttaaatgggacgaatcctttgacagattatgctcagcgtcgtttggccgggacgccacgtggcctttcccgactttttggaccccgagaacaaaacccaaaaatggtacaatattttaatgttcaaatttatgtttttgttgctttaggtggtcagaggagctgcaaaactttcacaagaaagtgataattgtttaattttattattattaaaaaaatattttaggtcccttttgatggcatttggatcgacatgaacgagccgtcgtcgtttggcacaaatgaaaagccgtcggcccaaagtcacaaccttcagccgttacaatgtccactcagcgggacggattcccagtttgataagccaacttatgaggtgaatttatctgattaaataaccaattagcacatttaagaccataaatgtgtaccaatacgggtcggttttgagtgaaaaaacgctttgcatgtcggccatgacaatgcgaggccaacaacgaatgttcaacacgcacaatttgtacggatggtctcaaatggtggccacacgaaaagcactcggtgaaattggccaaaatatttgcgaaaaagtcaaatatgaaatttag

SEQ ID NO: 81056 - DNA, 1036 bp, Heterodera glycines
atggccataccagaaacgaaggcagcagcaacaggtgactggccttcctggtggaatgggccggcaaacgtgggttagctttttctttttttttgcgtgggctgaggggggggggggggcaaatcgcaaaaaaagcgatcggtcggttcactcactcccatccgttcatttcgcccattttcaatcagtgaattttaaaagcataaattcatttcgaaaatcaacgcaaatgagtggctacaaaatccaccgctcccgttcctcgccaatggtcgcgtgggcttcgaattcgtcggtctgtgtaaatcattttttcataatccccctttattcagttatctcgcacatattccgtctccgacatttcggcctatgcgagtgccacggattactttaaacaacggtggtccaccgcgtacaatccgtaccataacagcagaaaggcctattattggcctcaccatcggcacacgtcgttgttcccagtgggtgaaatcaatcaatcaatttatacgcaaaagcgtgacaccgacataaataacaatataaataaatttggtcactgaatgagatgaggtggtttcaaaagtaaagaatcaacatcataggtgtcaagaagtttagcaaagtcaatggaattaagtaacctcgcctctttaggcaaacacctatagaggcgagaggtacgaataaaaaacgaatgataccgaacattggttgaacaataagcggttttaataataaaatcatttttcagttctgaatatgtttttgaaaaggaatcattatgctgaatatggatcttttccaaaattatatcatggaagagttttaaatctatttttattctgcgttttaagagggattcttgtttaaagagttgaagaagttcgttatacccgggtatatcatccttattattattacgtctaaaaacaatacgtaaaaatgttttttgaacattttcaagagcatcaatgtcttttttcatgtatggattaaaaatcggagaaccaaattccaaaatggatcgaca

SEQ ID NO: 81057 - DNA, 2905 bp, Heterodera glycines
  unsure (1)..(2905): unsure at all n locations
gaacccaccagggaatgcaattttttggatttaattntaacaaataataaatttctcataaaagacatttcagttggtcccccattctcacttagtgatcacaacactgtaaaattcgacttaagactaaatgtttttccttgtagaaaatttaaacactttaactttaaaaaagctagttacttggaaataaatgccatactctcttctactgattgggttacctttttttcggactgtatagaaattgaccaaatttataacaaattcgcagcatttttgcattttttaatatcgaaatatgttccattaacagtatcaaattcaaaacataatttcccagaccatattaaaaaaattatgctttatcgtcgacaactttggaaagaccttaaaaaagaaaaaactagagaaaaatttatagaaacctctaaaaaacttgaatatgaaataaagaaataccttacaaatcgtgaaaataaatttttaagtggtttagaccctaaacaacgatttcgatatattggttcttttttaaaaactaaaaacacaaaaattccccctcttaaaaatagcgaaaacaaaattgccttttccgaaaaagctaaatccaatttattagccgaacaattttactcggtcttcactgaccaaaaaattcctgtttcatgtgaagtcacccctaaaaaaaatattgactttttcacaatgacacttaatgaaatttatttggctcttaataaactagaaaacaataataatacttccattgacagcatcccgaatatttttctcaaaaattgtaaagaaaatttggtttatccgctatttcatattttttgtttttcaatgatgactggccaagtcccaaacatttggaaaaaatcaattatttatccagtaccgaaaatacccaatccaataaatcctgttgattttcggccaatttcacttttatgctcaatttcaaaaattctagaagaaaatattacccagaaaatcactaattttgttgagacaaataatgtacttccgaattgccaacatggctttaggagaaaacactctgttacaactcaacttttggaagtcattgatgactttagtttagctttggaaaacaaaaaatcaattgatgttatatattttgatctagcaaaggcatttgatactgttccacacgaaagattagtttctaaactcaaaaatgttggtataaatggtactttgcttaaatggcttcaaaattatttacaaaatcgtacattttttgttcgagttggttctgcgttttctgatgaattcccttgcttaagtggtgttcctcagggatcaaatttgggaccacttttgtttttaatttatatttcagatcttcctaatttttgtaaaactgaaaacgttgaaattaagctttttgccgacgatcttaaggcctattctatactatcaaaaaatactatttctccactccattctttcattaataaatttcggaattattgtgaattaaatggccttaaaatcgctcctaataaatgcttagtttcacatcttgggcctaaaaaccctaatgaatgttacttaataaataatattccaattttaaaaaatgaagaaggtgaaccagttagagaccttggcatttatttttcaaataacttaaaatgggaaaaacatatagaatttattactaaaaaagcaataagaacatcttttgctttactcaagtcacttaaaactaaaagcccaaaaattctcataaatatattcaatgtttattgtcgatccattttggaatttggttctccgatttttaatccatacatgaaaaaagacattgatgctcttgaaaatgttcaaaaaacatttttacgtattgtttttagacgtaataataataaggatgatatacccgggtataacgaacttcttcaactctttaaacaagaatccctcttaaaacgcagaataaaaatagatttaaaactcttccatgatataattttggaaaagatccatattcagcataatgattccttttcaaaaacatattcagaactgaaaaatgattttattattaaaaccgcttattgttcaaccaatgttcggtatcattcgttttttattcgtacctctcgcctctataggtgtttgcctaaagaggcgaggttacttaattccattgactttgctaaacttcttgacacctatgatgttgattctttacttttgaaaccacctcatctcattcagtgaccaaatttatttatattgttatttatgtcggtgtcacgcttttgcgtataaattgattgattgatttcacccactgggaacaacgacgtgtgccgatggtgaggccaataataggcctttctgctgttatggtacggattgtacgcggtggaccaccgttgtttaaagtaatccgtggcactcgcataggccgaaatgtcggagacggaatatgtgcgagataactgaataaagggggattatgaaaaaatgatttacacagaccgacgaattcgaagcccacgcgaccattggcgaggaacgggagcggtggattttgtagccactcatttgcgttgattttcgaaatgaatttatgcttttaaaattcactgattgaaaatgggcgaaatgaacggatgggagtgagtgaaccgaccgatcgctttttttgcgatttgcccccccccccccctcagcccacgcaaaaaaaaagaaaaagctaacccacgtttgccggcccattccaccaggaaggccagtcacctgttgctgctgccttcgtttctggtatggccatttccatcaacacatgttggccaattaaaggaagtgttgtcctccaatttgagaaagttcaatctttggaattccttctgacggaagc

SEQ ID NO: 81058 - DNA, 778 bp, Heterodera glycines
atgagcaactgtaaggaaaattgaaaaaaatatataaaattaatcacaaatttctttagaaaattacctttagattttattttggcattttatgcacgaatttcaagaaaactaatttttaagcattgtcagcttcggatttgccaccaaagcccagcaaataccaatgccattggatggaacgattaagcgatgccgtggcacttgtgcagaaagaacgaaaacggagcctcgttttgatcggacttccggaggctgtggccgaaaagccatcagaacgcgccaaagaggacgcggaaacagttgcggaagtgttggacgctttggatgtggaggtttgcccacagatggtgtatagaatggggcggcggattgatgataagcgaaaggggccgcgtttggtcaaagttgtcttgccagcgacgacgttccaacgttttgcactggcacaatgggggcgcaaccggacggaactgaaacagcgtgtcggttggcagcgactgctcgtcaggccctccttgacgaaggaagaattggcggctgaacgggagacacgtgaacaaaggcggatgaattatgaagaaagcaaaaagaacgaaatggtgacgacgcggcgtggaggcacaatggaaaaaaacttttgaggtcacaaaactttctcaattgtttttactttaactcaagaagtttagtaaacaaaatggatgagtttaggcttttacttttagaaaataggtataaaattatcgcaataaccgaaagctggttgaacaataaa

SEQ ID NO: 81059 - DNA, 2003 bp, Heterodera glycines
  unsure (1)..(2003): unsure at all n locations
atggaaaaagttttgataagcaacccgctcgagctttcaagcgttcataactgtgcatgcgatttaaccccaaaagacctctttaggtctgttggtcccggcacgaatggtcagcgtgggaagggtgtcggtgaacatcggtgccccacaagtgactgtgctggtaaagacccccctcagcgggggttgcaaaaagggaacttaagctgtaaacgttggactcctagtgaagagaaggcagtctttgaagaatggtcgcggttggaggcacaaaccaggctcgatggtagtgcggcccggggtagctgcgccataaataaaagacagtttctcgttcactgggatggcgtgaaagagtcacggtcctcggcagaaggtgtgcctacttaccccgaaaggagtgagagggcatatttcgagaggatcagactcttgcgaaagaagcgcggatgggaatgggattgtgctaatgaccgaatagtcacaggccaacccgaagtaccaggccgcggatcgcgaacgcgagtgatagccgcgaaggctgatttgagtgtaaggagaaagctggtgaaggggaaatgcataaccccgccccaccgagatggtacggaagaccaggagagtgacgacgaggaggttgcaataaccgtacctgtcgacattatccaggtggaagaacccgagtgtacaggtgtaaccgagggccaaataccaggtgaccctacggggaacccggaaaaagaagccgcgggggagccagcacagaggagcgtaccaattagtgggataatcagcgatggtgaacggaagtacctgaaggtacgattttggagtgcctataaaaaggcccaggggtcagtgggaaacagacccgctctaaagatcgaaccgagtaaggtcaaccgtgcccagtgggaagtactggactcctgtgttgctgcggtactcaagaggagggaaacctccaaagggtgccggggttgtatcctccggacattgaacgtcgctgtatatgcggcgggacaagtgctggcggaaggcgaccgggaacgaaggcaagcgatcagacgtcagtcgatggaatggttgcttcgccaaaagtccgagatcagcaacatccgtagacacattggttggattactgatgagttaaaacggaggaggacaggaaagaacccaactttaaggcagttaaggaattttcagtggctccaaaggcgttaccaagtcttagggaaacccgtgagggagactagggacttggaaacccaacgggagaaacttgttgttcgtcttcatatggccctagacagagtgtcggtaactacgcgacgtagcgaacgaactcaacaacgattgttgcctatgcggagaaaactggaggaaccaatgggtgactcaaagttggatcctgcacaggcgcgagagttctgggctggtctaattggaaagcggaaggaattcgagagaattccagagcttgaagattgggcagaagaaacgaagagcaaggtcccaagtgatcaaactttggacgaagaccgaaaagacctatttgcctggaagaaaatactgggaaaagccagaccattgaaagcgccaggaccggatggtgtgcctaacttgctttggaaaaggctaccgtccgcaaaccaagcactttttaagtggttaatgggaattaagcgtaagcaattacgcgttcccaactggttcaccaggggaagggtggtactccttccgaaagggggagatccgatggacccggccaattaccgacccatagcgtgtttaaatacacaatataagctagtaactgggatggtaacggcatggatatcggaccacttgaccaagcactcaattttgccttcggaacagcgagctctggtggctggcacttggggttgtacccatgctatggtgatagacagagtaataacgtcgtatgcgaaggcatccgggatcccgctttatgtaggattcgtggactttngcaaagc

SEQ ID NO: 81060 - DNA, 573 bp, Heterodera glycines
atgcgcggggcgcatgggtcggaactctttcgagcagcacacggtggctgggttactgtatcgtcgtcattatggttgttgaaggtgttcagttgggcaccaattcgtgaacaaatgccatctatttgcaacaattatatataatacaaagatatttttaattttgaacattttttgaataagtttgagaggtgaaaatttgtgaaaaaaaatttaattttcgaaagggcttgaaataattcccaaataaattaatccccattttcagaattatcttaaaagccaaaaatttatttttaatagttaattaatttgcatatttccgttatttgttaaaatgttgagattaattattattaaaataaaattttatttttattttttaatttacagacagattgtaaagagaacaaaacaatacaaaaccgacttggacagccaaagttgtactgctgctggtgctggtattggttgttgttgcctcttgacacaaatacgggctgaattggcaaaccgttgggcgggaattgcaacggggccggctgacgatgatgacctatttaaaaaattaaa

SEQ ID NO: 81061 - DNA, 832 bp, Heterodera glycines
atgaaacgacggtcatgcaaaagtggtgttgatgaccaatgtgttgggccaccaattgaatcgcgtccatgtaatgatgaacaatgccctaccgtaagtgaacttctttgactgtgattacagtatgccataaaaaaaataaatcaattatacaataaattttatagctacaatatgtcatatgcattttcatttcaatttgtttatacataactaactaacaatgcattgtgatactgtatgcttttgtgtttatacgctctggttctttacagtacgcttaataattatattgtaatcaaaaatatggcaaaataatcactcaaaaaataccattggtttagagtttttctttaaaataaaaataattgagcaaataattaagtggtcaaattggggctcgtggactgagtgttcagcgacttgtggcactggcacacaacgaagtgaaattttatttagaatttggtcgagactctcgaacattgaagttcattaattaataaattaatgaaggagtgcgtgagtgcgagtctcctcggcacaatgccaatgctgcaatttgtccaattggctctggtgttgaacatcgtgaatgcgaattacgaagctgtcccgagtggtcccaatgggaaccatggtcggcatgttcaaagagttgcggtgccggtgaatcggtacaacatttattggacgattctgccttgctactcttaaacggcccaataagcttgacccgtcaaagcgtcgaaggctaaattttgaaaaaaaatttttgcaggatcgatcatttttaataggctaaattctcaaacattcaaagaaatataaa

SEQ ID NO: 81062 - DNA, 786 bp, Heterodera glycines
atgacggggggggggaatgaagttgcacccagttataatcaattatgtcacaaggttcgtcgtcgacagtgccgtaatgctgcgtcgaaggatgagtgccaaggcggcgacgtggagcgcttgctgtgcaacactcaattatgtccggcatggaccacatggacagagtggtcagcgtgctcaaacagttgtggcaccggtggcacacagtcgcgcaaacggtgggcacaaatgcctgttctgctgggggctcgaaaattttcaagaaacccggaattcaaatttcctgttaattaagataataatgtgaatttgtctcctccccccccttccgtcacccatttttcgaaaaattatttttattttatgtttttaagacaaaaaaaaaaattcttgaaaaatttgggtgtcgcaagaaagaatttctgatcaaaaaaattttccagagaatgtcgttatgctggagagttaagcaacgagtgcacaggcgcggccaaagatgaaaagcaatgcaaacagttggaagcatgtccaagctgggccgaatggggcgaatggtgtgcctatgacgtcactcaaaaaccacaaaaaaaaacaaatttgcctttgcttaaaagcaatcaaaattttaattctcgatatcattcaatagctctaagggttttctatagtcttgcaaaatttcattaagttttaaaaaagttatggcatgaaaacccatgtttatgtgtcctttgggttatacttttttttttttaatttttcgaaattttaaaatttagctga

SEQ ID NO: 81063 - DNA, 983 bp, Heterodera glycines
atgttggcacaacaaacacagaaaaggcatcatcagcagcaggtgcaacagcaaaagcaaggtgggaccaacaaacggtgattaattgatcaatacaaactgatcgaggaatcgatcaacgaacggtcgtggggcatttgggattcaattcttagtgctttcgcgcttgaggggttcggcggtgccaatgggcgcgattcattaaacatgatcattttgcctaattttatatgtgccaattttagcaattgtccccgacttttttgccacttcttcaggcggagacacaaaaacaaatatttcaatcttcatgaacaaaggagaaagaaaaaaacaaaaatatgcttggagagcccttgaagagctgcaccggatgcgagtgtcgccgttgctgtacgctcaacggttgctgtgcaaagacggaaaattgctaatcagaaaaaacgaaataaaatcaggaatactcactcccgtagacaaaccgttggatatatggggacaaacgtatattggataccgtacccaattaatatttatttttgggatgcgaattgttttgtgcgaaacagttatgaaaaagggtacgaaaaactgggaaaaccccactcagagactagctaaaggaaaataccagcagcaaattaaattacccaaccaattttgattgaattcatttttaaaaatgccaattttttgtgggtcttcgcccttattaattgtttctaatgcgtcaatcaattatttaccaattgctagggcttataattctctttttcttgcacaagaaacagcataaaatgcacaaaaaatctagaactcatttaatatgtatttgtccatatattggcatttttgagcatatttatttatgtaaattctattaaagggctatttttattaaaaccgcccttctgacccatgaggacggaaagattttcataaaaaatctgttttaggaaaaattttactataaaattaataaa

SEQ ID NO: 81064 - DNA, 537 bp, Heterodera glycines
aaacaaatttaaaaaacggtcgcgaagcgcccgcccaagcccaacaaaatttgaaaaaaaggcgtgaagcgcccgtctggccccaactaaattttaaaaactggcgcgaagcgcccgtcctgaggccgcgaagcggccgaatgttcttaataaaattaaaaacgggcgcgaagcgaccgtcttgaggccgcgaagcggccgaatgttcttaacaaaattaaaaactggcgcgaagcgcccgttatgagtccgcgaagcggccgaatgttcttaataaaattatgaaatgggcgcgaagcgctcgtcctgaggccgcgaagcggccgaatgttcttaaaaaacgggcgcgaagcgaccgtcatgaggccgcgaagcggccgaatgtccccaaaaaaattaaaaaacgggcgcgaagcgcccgtcctgaggcttaacagccggccgcgaagcggccgaatgatcccataaaattatgaaatgggcgcgaagcgctcgtcctgaggccgcgaagcggccgaatgatcccataaaattatg

SEQ ID NO: 81065 - DNA, 271 bp, Heterodera glycines
tacaaaaataaaagtgattttgggattcgggaccaaaggggggtgaccaggatttttgggtggaaaatttttttcaccaaaaatcttccaaaaacatgtcattagggctattttatgacgctgatcacgaatacgtgatcagattttacttttgacatcgtcaagacctcagaatccctgtgtgattggggattctgaggcatcattttgaggggggagggggcaggttcggatccggacggtgtaacattatttttctgtgtatttttac

SEQ ID NO: 81066 - DNA, 493 bp, Heterodera glycines
atgttgtccgaggatgatgaagacaaagtggaggatgaattggatgaagcaatatctgcacaacatcatcatcataatcagcagctaaatgcggcacaacaaaagcataacaatgggacaatgacgacggcggtggcgccaaagctgtcgcaatgccggcacgacggcacaaagctttttgttcaaaatcatcaggctaatactgttgaggacgaagatgactacgattatgatgatgatgacgacgaagattatgaggacagaataattgttgagccaatgttcaggtgctgtgttcaatgcatgaaactgatctgataggggagggggtcttcttcttggacctgttgacccgactaatgggcctcaataccaacatggcacaagggcgtaggcagggggagctgagggggctaaagcaccccccccccccgaaaaccaaaaaagtaaaaatttttttgaaattttaagcaattttcttaacataattgca

SEQ ID NO: 81067 - DNA, 3781 bp, Heterodera glycines
tttaaaaataatttcggcggcaatttttggtattttgccctaaattaattcaattttttcttctcttaggttccaaaggccaagaaacggctcagtgtccattcaattttggtcgaacgcgacgaatggtcatcctgggccgacttcatcatgtcctgtgttggatatgtacgttgaaaaatttgggaaaaattcatttaaaaatttgtggtaattagggctgaaaatttaaaataaatgttttacccatatttttttctggatttaaaaaaatattttcaacttttaattactattttacaaatggcatttagcatttgtttaacccatatttcgcaatttttcaggctatttaagcgaataaaacaaaaaaaaaaccaaattttttttttcgaaaattgactcctaagaaatggatttttttttaaaaataattaataaaataatttttttttacatattttatgtacattttgccattttcttacatacaattcaaagccctagtaaaaaatttaataattttttttatgaaggcaattggacttggcaatgtgtggcgttttccgtacctttgctaccaaaacggaggcggcgcatttttggtgggtttttaaaaaaataaaaaatttttaatcaaacgcctccttcattctctaaaaatttctatggcacttaaattttcgaaaatttttccagattttttttaaatgaattttaatttggcatccttttcaaaatttttaattttccaagggccctaattgtttttttttacaaattttccgaggccttcccgcaaatttttccaatttttccaaattttccgattccctacatcattgccattttgttctgcggtgttccgctgttcattctggaaacttcttggggacagctcgtctccgtcggcggattgggaatgtcctggaaaattttccagttttttttggtttttataaaaattttcaggttcaaaatttgcccaattttcaagggggttggcattgcggcggttgtgatggcattttggtcagagaatttgttttggttaattatttaattaaaattaatttttcaacaatattttaaatctttttgaccattcttcaggcttgaatataaataagtaaataaatatatatatatataaaatggtggaaaaataataataaaaataaaaataatttttaattaaaaaaatttatttaaatttgtttaaaaatgtttgtattcattattaaaacaaaattttaagaaattaaaatattattttataaaatttatttcaatatttaaataaaattatatttaattcatttttattcttttatatttctttttagctaaaaatttaagtattcattctttattaaaacaaaactttaagaaattaagtatatatatttttaaattttttatttaatttaaattacataattttcaattatttaaataattttaatttaaacattattttccaccaaatttataaagaattttaatcattttttattctttatattctatttttatttaaaattttaatatacaagaactaaaatattattttaatatttatttaacataaaattacatttttttaaattattaaattattttattttattttaaattttcatcaaattaatttttattccataaaaaatcaaaaaaaaaattgtttaggctcaacatttattacattgttgtgctcagctgggccatgtcctaccttttccattccctacggatggactcaaatgtgccgtggcgaacatgcgacaattagtaaaatcaaaaattaaactatgggataaaattaattcaaaaatagcgcaaaaattagagacaaatcgtaaaaaaaaaatttatgaatggattaacgaatttggtggtcttcaaggaaaatattcaaccaaagaatggaatcaaaattatgaagaaatttgcaagaaaattggagttggcaatttcataattaataaatggaagaaacaatttgtgaagttagcaagaaaataataacgaaagaagaaaaaatagtaaaattgaaaataattttaaatcattttgtgatgccagaaggaacggagtgtgggagaaagtgggataaaggacctgagagaacctctaaaagaggcgcccgtagctcagttggttagagcacggcacggattgctggggtcgtgggttcgagtcccaccgggcgagttaccttttatgttctacaatttaaaaatcagttggaattcccctcggtgccgatcagaatatgacccccgtgttgtgtgaatcgaatcggacaattgctggctattttatgttaaggtgaaggcatgaatgaaaaatatttattttattaaaaataatttaaaaatttacaattttaatttaaaataattaaaatttatattttctaatttttatttttatttccaatatttaatttggtcattaaatatttttatcaatttatttttttcattattaattttcatttaaactccttgtggacctctggatccaggcctccgttttcctgtccaggcccagctttttttggcaacctagtttttttttggcctagactttcttagttttttttggcctagactttcttagttttttttggcctagactttcttagttttttttggcctagactttcttagttttttttggcctagactttcttagttttttttggcctagactttcttagttttttttggcctagactttcttagttttttttggcctagactttcttagttttttttggcctagactttcttagttttttttggcctagactttcttagttttttttggcctagactttcttagtttttttttggcctagactttcttagttttttttggcctagactttcttagttttttttggcctagactttcttagttttttttggcctagactttcttagttttttttggcctagactttcttagttttttttggcctagactttcttagttttttttggcctagactttcttagttttttttggcctagactttcttagttttttttggcctagactttcttagttttttttggcccaaaatttcaaatcgctaattattttaaaaaaaattatttgccctttttaataacatattttttaaagtaagtttcttttaaaatattttaaaatggtttatcttaaatttatttcttttccatttgaaattaaaaatttttgttttcaattaaaaatatcatttttttcatttttaaatataaattaaaatttttcaattaaaatttctcagattttgacggacgaccatctgaatgagtacagaaaacagttcttcatcggcccaaaagtgaacttcaccatttgcaccgaagctgacctcagcgtccgttcgccggtcaaagaattttgggagtaatttaatttttaattaattaattatttttaaataataattttatacatttttattaatagtcatcgcgtattgggcatcagtgaaggcattgaacatgtgggttttaaaaaattcaatgtttattctaaaaaaagaattttctgtatttttttttgctaaaaattttttttttttttttttaaatccaaaagaaatttttttacaaaattttcattttgaaaaatccaatttccgaaaatttttattaaaaattttcatttgaatttaatgggactgtctttttttgaaaaatattttctttaaattctcctagggggttttgttttttcaaaatcttttgaaaattattccgaa

SEQ ID NO: 81068 - DNA, 323 bp, Heterodera glycines
atgagttatagtaaaaaaaatccatacttttttccagatattttttggaaccagtgggttcgggttcaatgttttgaatagtgaaaactgagaagaaaaattaaaaactgtaaatacttaacagtttctcgaatattatatttggtggtttttttagaattaatgtgttaattaatgattttgagttttgaatatttgctactttcattcctttttaaaggttttgtaaaatttttatcttctaactctcctggaccattttccttaaaattttaaaaaattaacccaagaattctgaagtgtttacacatttcaatttgtta

SEQ ID NO: 81069 - DNA, 557 bp, Heterodera glycines
atgaagcgatcttcaaatacccaagcttcttcctcattcaaaaaatctcaaaccaataaatgtattcgtaaaattgaccaatttacttccaaaagtattaaacatcatttcatccgctcaaaatcaaaatttgttattgatgaaattgataaatgtaccgaccccgctgcggagctccgttcatgtgtgcaccattcgatcgaggaagcaattttagatggacaaaacatccttggaggagcaaataaggtaggtatcataatttcctcggaacttttagaccagggtgatatcatactgccaataactccgattacgtcaaatgtcgtcgacgcagtgtttaatcaattttgtaaagtggagcagagcaaggccaaatacgtcagcctttacggtgccccttttgttgtaaccgtcactgtcctgaatactgatggtttaccccgccgacgaacgaccaaaggaaatgcccctccaattcactcttcacaatcccacatcttcaaaattaacaacaatgacaactactgtcttttttatgccttggaactgatgcg

SEQ ID NO: 81070 - DNA, 82 bp, Heterodera glycines
tatagcacggtaagacttccggtttccgacatttttggggtcggaattccgacttccgaaatttttgatgaaaagtcggaaa

SEQ ID NO: 81071 - DNA, 624 bp, Heterodera glycines
atgaccttgaaaagaggcgcagagtgcgaaataaaacaaataatagcaaaaatatgggggagagacacattcaaagcaacgccccaattggcattggagaaaagccgggtcagaattagggtcaaatggggcaaccgagaaaaagcggccagcaacagggaaaatgccgcaacacgacaatgccaccaaatcatatcaagtggataactttaaactgaaaaataatatacatcgcatggcattatgaaaaaggagagatagtgagggctaaagcacagagaaaagaaaattaagactcactagtgattaattgaattcgccggaaaaatttttgaaaaattttatgcaatttgctataagattttgtctaaaaatgactaagattttggagctaatatttaaaaataattagcaatttttggggcgggcggtgccgataagcgccgccgaggaaaattttttttcttcagaattttaacgaattttgttaaaaaatagccaaatttttagcatttcctcttttcccctttgctagcctcccccgcccctttatgaatgttaatatgtaatactacaaattaccaagaataagtcagattaaatcgaaatatgggtagcctttta

SEQ ID NO: 81072 - DNA, 64 bp, Heterodera glycines
aattactggagttagcatcatagcagtgcttttccttgtctttttgatgccctcgcaaaatctg

SEQ ID NO: 81073 - DNA, 117 bp, Heterodera glycines
aaatttcccggttggtcccggtcccgaacaaaaatcgaggtcccggtcccggcttctcaggtcccggcaagtcccggtcctggttttgcccaaaattcccggtcccggcgcactcta

SEQ ID NO: 81074 - DNA, 955 bp, Heterodera glycines
atgaaattgctaattgtgttgttgtgtgtcagcgcaatttacgcgagaagctgtacgaaaatcttagcaaattttaatttttttttaaatattttaattttaattaagtgcaaaagcgcggacaaaacagctatggcgatgaggcaggcgccaaggctggtggtgccgaaggagcagctggcgctgccggaggcgaagctgcagcgcctgccccatctggtggaggaggcatgcttttcaaacaaatttaaattaacagtatttaaataaaatttaaattcctttctcagaagctgcgcccgcggctgaggcggcagcgcctgcgcccgcaccagcggagcaacccgcggcggaacaaccggcgccagcgccggcggccgagcccgcgaaacagcaagcgtccggttaccgacgaaagcgcaaccaaaacagctatggcgatgaagccaaggccgctggtggtggcgctgaaggaggcgcagcagctggcggaggtggcacgaatcgaatttgaaattttagccttttttttccagaggctgccgctccggctcccgcagcaggcggtggtggtggtggtgaagcggctgctgcacctgcggctgaggcggcagcgcctgcgccagctgagcaacccgcggccgagcaaccggcgccagcgccggcagccgagcccgctaagcagcaagcatctggctactgatcacttcgtcaatgatgggatgtgcccggctgatcacggcgctgatcagtttcttctattttgattgatcagcaccaactttcattcaaacacttttcaccaccatcttgccggtgtttttttctttcaaacttttgctgtcttccaaatgattttcattgtgtcagtgtgtcttagacaacataaaattttgatcaaacaattttttttcatttcgcttgatgatgatgtcaactacaatgattgattaaa

SEQ ID NO: 81075 - DNA, 2100 bp, Heterodera glycines
atggacgcgcaacagcttcaacaattgctaaatgctctccagcaaatggtcacaaatgccgcaccgcaaaacgccacaccggcaaatttgagcaatgccaatttggcaagctccatcgatgctcgcctttcaacgttccattacaatccggaggtcggcacaacttttgaatgctggttcaaacggtacggaaaattgatcgaggacgacggaagcactctgcctgaggcctcaaaagtgcgactccttctcggcaaacttggagaggaggagtacaacaaataccgggacacgatcagccccacacagccggaccaagtgaattggaatgacaccatttcgcacctcaaaagcctttttgctgaaacccgctcgctgttcgtccgtcgctacgagtgtttcaaaattcgacagcaacaagggcaagacatctcatcactaattgcgcagatcaacgcattatgtgaaaatgccgacctgagtctgacaaaggagcagctcaagtgcattattttggtcatcgcactcaacgatgaacaccatgatttgcgacaaaaggcattgaaaatgttggaggacgcgcagaaaaacggcaccaacatttcgctcaagaaaattgaggaggaacttcggacaattcagcttgtcaaggagagcgccctttcgctggtcaacccaccaattgccacaaacgccattcgcacaaggccacggcaatggaccgacccagcgcaaagacaaagcggcggctccaatcaaaggcaaactccaaatgccaattcaagcggaaagccaacgcgtggtcaaccaacgcttccgtgtggatcatgtggcaaaaccgaccactggcgctccgactgcacattcaagggtgccacttgctttaagtgcaacaaaaaagggcacatttcaacaatttgccggtcaaagaagacaaaggcaccaccgaacaaccacaggtcattccacactgtcaaagtcgacgcaaattgcctgcatgtcggcacgactcaaggacgatggtggaaattgtgcattttgattaatggaaggcaaacttccatgaatggcgacaccggcgctcaagccacaattatttctttgcaaacgtggcaggagttaggaagcccggatctgtctccagctgacatcgatgccaaaaactgcaatgaccagccattcgctttgctcggcaaattcatattcactgtccaattctccgacaaaccaccgcaaactctcatcgcctatgtgagcggagaagtcggacacaatttgctgggattgccgtggatcgaagctttggaggtcatcccccgccaaattttatttccgtccagcaaatcggctgatcaggcgacaaaagtgattgacaatttttcggcagtgaagccgccaaacaaatcgatcaatgatgtgtcaacgcttaaagcggcactccaaaacgatttcccggaagtctttgaagaaggactgggacactgctcaaaggcaaaggcgcatctcattttgcggtctgatgcaaagcctgtattttgccgagctcgccccattccacacggcgccatggaagctgtgaatgccgaattggaccgtcttcttcaaattggcgcaattaagccgattgattgcatcgacttctcgaccggcctcaacaatgcattggaattgaaccgccacccactgccaaggccagacgacatttacgcctcactgaatggcgcaaaatttttctcaaatttggatttacgcgatgcgtatttgcaaatggaaatggatgaagaatccaagcaattgtgtgcgatcaacacacatcgagggcttttccaatgccaacgcctgccgttcggagtcaaatcggcaccggcaatatttcagcatttgatggaccaaatttgtgctggcatccctggtgttttcgcgtatcttgacgatggattgatcgcaacgaaaaccctggaccaacacatttccgcactttatactttttgggcgcataaaagagtacggtcttcgcatccaactggacaaatgcaaatttttgcagcccgaacttttgttccttgggcatattgtgtcagcaaacggcattcgtcctga

SEQ ID NO: 81076 - DNA, 1707 bp, Heterodera glycines
atgtcagatttaagaatggaggtaaaaataaatgatttcctttcatttattcctttcatcttaaggccagcaatgatgtgatcattcccgtcaatgttgcaattcgcatattcagttttgtcagtagagatgatttggaaaattgcaaactcacctgcaaatcatggaaagacgtgtaaggcattgaattttgttttttgcaataaaacattggcaaataaaaccgattattttaagaattgattacgcagacaaccgaaagaactcggagttgcaactgaggcacattgacgccatttgtctctcaaccaattctgaattttctatcaaaatttactacaaccaaactattcgcgagttttactacaaaaaatatttcgctgataggttaggcctttttttaaataaaatagaaacattttatcttcagggaaattgatgaaattgaagtgaaaaaagtcaggcatttaacgagtcaatttgacgagaaaaaatacgttttcccatgtggagagcatttgccaattcggcaaagtcattcctttgtttttccagcggttgatatttttcaccaacacaggtgtaaaagtaggtaattctttgggttaagggcagttcgtacaatttttttttttaattttcattaaaaccgaattttttatcaaatgatttttttaaatttttgcgacacttttgctgtttaattttttgggtggtttcgagtctctgaattctaaagaactgcgatgacatcaattcttttgattaatttgtaagctaaaaataatttcaattttttcagtggtgaggccaaccgtttaccaggaccatgtcaattacacgcgaaaactcttcacacctccgctcagtttttatgaacgccttcaacgaatgctcaaaaaatgtaaaattcgtctggtgattttccacgcgttcactttcactgatttctttgttgaaaaaatgcgtgaatttgcgtccgatgcgttttcgagggtcgtttttctttcccttcactgtaagtccaatttttcgttaattggttcattttcttccaccttcttttctcaggttgcaatctccgctgcgttagtccgaattctttccacgaatttctctcttctgtttatgctgctcattttcttttggatcgccttaggaattgtgtgccgaatcattttaacgctcttttgctgagcaaaccctccattcaaatgtaagtgcattcattgtccatcttttcgttgatagtttttaaaaatttttcaaacaaattgctaatttttgtgaactctatagggcgcgtacgttttacgttggcttttgtatcggaagacgacacacaaacagtggtgcccttcccgatcgacgacgacgacttcataaaatatgtgaaactgctcggtgccgctaaacgacgagatttttttggcattgctctctgtcgagtgacacaacaatttcgaccattttatgaaaaggcaaggaataccgtaattataagtaaattgcaatgtataaatttttagataattaccagcaacaaataccgccggttgaatttatatactcacgtattatttggggacgttcgctatttatctaatgaattcggatttacaaattcacattcagtccaacaataatgtcaatgcttttgttttgttgattgaattgtatatgaaaataattgaggattttcagtaa

SEQ ID NO: 81077 - DNA, 322 bp, Heterodera glycines
catttcctttgcggtgtcctttttggccgggggtttggccattggctatttgctcggctggcgaaccgcggcttcaaaattggcccgatgcaacacgcgagtgcagttgagcaaggacaaagtggtggacactgtcgaattggaggacattggcgagaaaaaggcatattgtcgctgttggcaatccaaaaaagtaaaacgaaataaaacccaaataaattattagaatttcctttgagtttcctttgtgtgacgggtcccacaatgagcacaacaaaaagacgggggacaatgttggcccattgattgtacagaaggcgaa

SEQ ID NO: 81078 - DNA, 1206 bp, Heterodera glycines
atgcgtttcgttgcggtgattggcgatgggaaagcagtggatattttcgtcagtatgttttaggtgttaaaattcttctaattttatttgttaagaagtggcagcggtcgtttcaaaattgtgtcggaagagagcggtcgtccgaatcacgccgaatgagttcagttttgtcaatgtgtacaatgtccgtgagggaatgcacgtcgacttccgcattcacaaggtgttcaatgggaagtgattcattatttgccactttgtatgaattcatttgctatcgaatggaaatgaccgcccaacattttctttcatttttcaggataatttatttaattcatggagctttgacggcctttccctggacaacaacgcgattttcttcgaattgtccaccgacgacttcgtccgttcgctgcattcgcgtgccactcaaatcaaattgaaaatgaccaaaaaggacggggtgccgcaccttcgcgtggagctcagtgccaattccctggtcaacgaaattcccattgttttggttgttctacgacaatggcccgacttcaacccaccaaacatgggcatttctcagttggcagttgcacttccaaacgtcaaaacattggtcagttactattggatgaaaatgaacaaatgggcccatatttacctacaattagaaatggatcacaattttaaagtggggctgcccaaatttattgtcttgtccgctttctttcattttctttactcttttagacaaaaattgtctcgggtgtgaaggacattggcggaaggcatttggtaaatcagtttattaaacgaaaaatattgtgattgaatttcttaagatatttcgcgcaaacaatcgtggagagttcaacatcattggttatgccgaccaggcaaaagtcgctgtctatgctcaagggcttcacaatcagagcatcagcggagctgagggtatgactcattatttagctttccgagattcaaaaatttttttttcaaatggtttatgccatgtttaaaaaataatggtcccagtggccaagttatgtaaatgtttcaatagcctaaattcctttcctttgttcaggtctttcgcaaactgcaccacagcccgagcatttttttaacgttacgttggacatcaggaattttcatgcctttcttagtgcactccatgcacttgcctccagattaacaatgagttaa

SEQ ID NO: 81079 - DNA, 2422 bp, Heterodera glycines
atggactggaacgaattgtttgggcccagtgccgaagggcattcccctgagtttgctgacatcggttgtggctatggcggattggtaagaaaactcccagaatattcaatctaaaatttacttatttgttagttggtaaaattggctccgatgtttccagacgtaacaatggttggtatggaaattcgggtgaaggtctgtttgaaatacgactaatccgtttttttatttaaaaatttatttaggtagccgatttcgtgcaggaaagagtgaaggcactccgtgcacaaaaccctggtcgttacgacaacatttgttgcatgcgaagcaatgcgatgaaaaacttacccaattttttccgcaaaagtcaactgagcaaaatgttctttctttttcccgacccacacttcaaaaagacaaagcataaatggaggattatttcaacaaatttgcttgctgaatatgcttatgttctgatgccgggcggtgagtggattttgaacttgccaaagttgtctttttaaacatagatgtatttgaaatcataaagatgaattttgctaattttgtactatgaatattgttgtttcattcgattaaatatgttttattttaggccgtatttacacaataacggatgttgaagagttgcaccattggatggtcaatcacctgcaaggatttccattgttccgacgacttactgacaaagaatatgccgacgatgttgttgtgccattgctatttgaaagcaccgaagagggacaaaaagtgacgcggaacagcggaaataaatgggcggcggtgtttcagcgcctcgaaaatccgccattcgaagatacaaatgagcaattaataaatactaacaaaaattgctaataataaattgttattgggtagaaatgtctgatgcatctttggtgtctgatccatccttatcttttctttgttatcatttttgctttacactccgtttaagaatttataatccagcaaattgaaatgccggaacagagcagcggtgccgatgagtacgaatcgttggctcccacttattcgctttgggttcatttggcggcgggcgcagcggcgggaatggctgagcattgtgtgatgttcccattggacagtgtcaaaacgcgtctccagtcgctgtgcccttgtcccgagtccacgtgtccgactcctatccatggcgttgcttcaatggtccgcagggagggattttggcggacgtttcgcggagtcaatgcggtcgctgtcggctcagtgccagcccacgccctttacttcacggtctacgaaaagttcaaggtgttttcggttcaaaaatataaggaaggtgtaaaatttgatttcgtttttagtcttcactgactggcaacactcatggccattcgaattcgttttcgtacgcattggccggcatggcggcaacagtggtccacgatttggtgatgaacccggccgaggtggtcaaacagcgcatgcaaatgctgtacagtccgtacggcggttcgttggaatgtgtgcgttgcatctttcggaacgagggaatggccgctttctatcgctcttactccacccaattgtttatgaacgttccgttccaagccgtccatttcgtatgctatgaattctggcaagaggtcgtctatctcgccgtatattgtttttttaattgacctttgctttagcaatttaaccgggaacgtaaatacgacccaacttcgcatttggtttcgggaggacttgccggtggacttgcggccgctgttacaaacccacttgactgcgtcaaaaccgtataatattaagtggtttcttccaaaaattacttttttttaacaacgcccaatgtaatattaggggataggtgtctcacaattagaaattaggcgttctaatgggcgctgtgccttcaaactcaaaatgcccaaatctcattactgttcgattggctaattcatcttctctggcgcttaagccatcgaatatcttaaaaaatcaattaactcatccacaaattcataagaccacattttcaggttttaaacacccaacaatcccctcaaccggttatcgacaaacggagtctcctttatctcaaaggctcgtacaatggtcaatatttacattttattttcctcttatagtataaattttaggcattctcgatgcaatttcctccatttattcaacccgtggcttcgctggctttttagttggtcttcatgctcgggtgctttaccaaatgccgtccgctgcactcagttggagtgtctacgaacttttcaaatatttgttgggggaacagaacaccataacttcgagcaggtcaaagtgttgtccgcattgttgtgtttaaatatcccatgttatgctcactgttttgttttttttttaatattaaatgaataaa

SEQ ID NO: 81080 - DNA, 885 bp, Heterodera glycines
ataattaacaaaaatataacaaaattagttgctattccactgttggccaattgcgcgacggacacccccaaaaagtgtccattgggccgcgttgtgacaatcctttcgttgtgtcccatgaaatcggtgggcaaattaaaatttattttttaatccggcaattctttctcagctcattctctcggtatttccatgaacagtcgcgctttgaccgtgataaattcgtccaaattcagcccaaaaacattcagctcggcttccttaaccaattcactcgcttttcccaatcccaagagaccacctttgacgtttcggtcagtcatttggcaaaaaattcgcgaaccgatcgaattcggaaataatctatcagtcgctaagaacccttaatcatgcgcttcttccttacagtatgactttggttcggtgatgcattacgatgcttttgtgcgtgtctttcccttgcctttctttgcgcgtgcgtttatgacaatgtttaggcattttccagcaggggactctcctccatccaaacggtgaacccaaattaccaaaacaccatcggacaacgcttccaattgtccttcaacgacgtcaaaaagatgaacttggcatactgtcacagtacgcctttaattcgacgatgttccctcccccttttttcgcctcttttccctctaaggcatttgtccgttcgaattgtcctgccaacgttcggggtacaccgacccaaaggtcattcttctgtcggtgcttctctaattattcaatttgtcagttgtttaggcatgcgatcgttgtcgctgtcccaatggtttggccggacgattctgtgaccgagtggaagcaacagacaatcattgcggggaagtgcttctgcaagcaatc

SEQ ID NO: 81081 - DNA, 737 bp, Heterodera glycines
atgacaaacgacttgctcacaccgcacgacctggaaagacagaggagtttcgtcatcggaggagtgcctgaaagcaatgcgacaaaaccaagtgcccgggcccaggagacaatgcaatggtcgaacaggttttggatgagctgggcatccaagtttcctcggtaactgtatatgaatgggaaactctttcaaaaacccagcacaaacggtgctgcaatcgattcttaaaagtgatgcttcccgctcgtcatttccagcgcgatgtactcacaaagtggaaaaagcatgtcacgacagttcggcgtacgtttgcaaaccaagaatgaacgcatgaatgttcgcccgtcgttgtccctcgaggaactttcgttcggcaaagcatgttctgcatgaggaatgcaagaggaaacgaaatgaaacgatctacgcttcgaaagtgattctccgaaatgatgccaacagtgccaaaaacaatcgctctttcttcccaactacacctagcctgctctcataaaacgcctaatttccaacacctgtaacgaggtttaggggcgtgatttcaattcattttcacctaacaaaaatttattgctttcccttaaacttccacctgtcattgtttcctctgactctaaacaaatgacaaatacctcctttcaaaacttttcttatgccaatataaataatcctaattctgtaacgggttgcttatcaatgcccgctcgagtaaaaataaa

SEQ ID NO: 81082 - DNA, 188 bp, Heterodera glycines
atgccgtcgcgaaatttgtcagcaaagaaaaaacaacagaattcgttagttcgggatgagtcgacctcttcacccagcagaacgcccaaatcggtgtcgaaagcgagtaacagcaacagtagccaacagaaacttcagaagaagcataattcatcagaactgtccacgattagcagtgaaagtgtcga

SEQ ID NO: 81083 - DNA, 1578 bp, Heterodera glycines
cctcttctcctcacccaggaggggatcaatttcaagtttgtcgctctgatataacttttgatgtttctgatatttttgaaaaacttaatcgtttgtatggaaaaaataatacggctcctgattttattaacaatcaaatacttaaaatctcttttcttcctcttgttggcctataactgatctttcaaaactatcttttaacaccggtaaattactaaaaatttggaaacattctattatccttcctgtacataaaaaggaaaataaaagccatgttaaaaattatagactatttcacttactttttctttatgcaaaatttttgaaaaaatcttagttgaccgaatttatgtatttttgactgaaaataatttaatttctgaatttcaatttggctttgtaaataaaagatctactatcactaatcttatttctacccttgaagactggtatgatggtatcagggatagaaaaaacattgatgcgttatatctagatttgcaaaaagcctttgataaagtccctcataatctacttttatataaacttcaccgaattggaattaggggaaaagttttaaattggattaaagattttctaacagaaagaacttttcaagttaaaattaatgaaaaatattctaaaatttttaaaataaattctggtgttccccaaggctctgttcttggtccactcctgtttttgatttatattaatgatttaccgtcttacattccgtctaaaattggaattaagctttttgcggatgataccaaaatatatgttatttataaatcggatactgaaagaaaaattatggacctggcacttatcaatgttttaaagtggtctgaagaatggggtattaaattttcaatagataaaacatatgttctttatttggggactaataaccccaagtgtccctacaaaattggaaattttacaattagtgaagccaagtcagtgcgtgacctaggagtcattattgataatgaacttaaattcaccgaacatattacatatttaataaaaaatacctttttccgtataaaattctctttaaattaattaaatccaaaacaataagaatatggtcattggtttataaaacatatattagatccttattagaatatgccactgaaatttggaatcctaagtcagtaaatgcacttaacagaattgaaagatgtcaaaaatattttaccaggatagctcttaaaaaatgtaatcttccatacatctcatataataaaagactagaactttttaaacttgacagacttgaaacccgtagaaaagttattgatcttaccactgcttttaaaataatcaactgtcatactcatttagaccctcaaaaactttacactttctcaaaaagattaagatttaattgtattagattaatatctaaacacaaaaccaacaaaaccgaaaactcatttattaatagaacaataaaacaatggaacaatcttgattctaaaattacggcatcatcttccatatgtagttttaaaaacaaagtcataaaatgggttaaagcccctaaatacaataaaaatatttaca

SEQ ID NO: 81084 - DNA, 802 bp, Heterodera glycines
atggcgctttttcaggccctccgccccggtctgccgcctccgctcgccgtcgccgcttcttctgacagcgacggggaagacgcggcgagtgagcgcaggcgcgtcgtccgtttcagcggcgacgagcgcatgcaacagaaaagacgacgagaaaaagatggagacgcagagggagacgacgacgaagaggcggccgaggaggaggaggaggactacgcaccggtggagagtgagtcaacgggggccaccattcacttttttgagtcccggcaaaaaatatgccattttcagtccccgacagcatgctgtctaccgacacgatgcccccgccccaacatcagccggtgtacgccagggcagcgccgccggtgatgccgccgccatcctcccaaatgccgtcgatgggcgctggtggagttgggcgggcaccgctaccgcccggcatggcaccgccgcctcccggttaccccccaggtaaatggtgttggctaaatcgaattaatccgcgcaaatgctactttccccattaggttactacgcgtcgaatgtgccgccggaagtgcatgcgcaagcgatgcgcacggggcgaatgccaccgccgcccaattcgtcgttttcgatggccgcgcaacagcagcagcaacagtccaagactgggctcatctcctacacacacgctgaaccgcacccctccgctgtcatttcagccgccccacaggtgaaaaacgcaggatttatcggaacccgtcagttgggccccggcacgtttgggcccagcggttttttggctataactttttga

SEQ ID NO: 81085 - DNA, 752 bp, Heterodera glycines
atggcaaagcgaatggcaaatttttctcctcctaacaacactgcccccaaaaaatttctgtctgaccttgaccaactacaaatccccaaagaaattgacactgacaactccattcccgactacgccaagttgcttattaagcagcttcactcccttttaagcaccgcctcggccctaattcattgtcaggttgcggctgtggacgcggtcgaagaggaaagacgactgagaactgtcgttgtgacaaatgtgcccgaaagtaaatcggacaaagcggcggagagagcccgggaggaccatgccattgtggaccacatgttgaatgccacggacgtcgaccaggcaccaattgtcttccgtgtcggcaaaaggatggacggtagaccgcgccctctcaaaatggaattccccagcaaacatgcagcgagacatatcatccgcatgcgtggaaaggtgcaagccttgaatggtctccacaatgtccgcatccgcgaaagcatgaccaaagaacaactgtctgagcggcggaaattgatcgaagaatgcgggaagaaaaggcaggcggacaatggtgattgggtgatatatgccaatcaagttgtgctgagacaagacattgaccaaattcgaaaaaatttttaaattgtccaaccaaatcacttcaaattacccataattattacacaaaggtacaaaaatttttccggtcagtaaaaaatttttacaaaaaaattaatcatccaaatttttta

SEQ ID NO: 81086 - DNA, 812 bp, Heterodera glycines
gaccgacgctttcatccggcggaattgagtcaattggcggccgacactcttttgctggcggcttcactaaactctccgacgaacttttcgcaaatggacgaggcgcgagacgcaatttcactccttttgagtgccttttcatttcagtgcgatgcttttttcggatgctcgcaatcggctggcaaaagcggcgaactttcgtccgtcgcccattctctgcactctctgctcaacgataactttgtttgcaaaattgttcaaatttcttcccaaatcgtttttattttaggcaaaaacccttctgatcgtcgacggagtgcaaatggccgatagtgtcaaattcttcgatcaaatcaaagtgagttgaacggttttgttgcgtttccaatggttaaccaatttagggaaaaatgtgcaaaattttggccaccagcaccagcagaacactttttaatgggttggagaatatacaaacatttgaagtgccgtccgacaattgctccggcgaagagttggcacagatggcgctgaattacggcattaaagtgccaagacattgttgtaatgtcaaaaaagaaaccactcatttttaggagacattttcggccgaacggataaatgccattctttgtgagacgggcggaaatttcgcacttttggagaaaatgttcgtgatggcacggggctgtcccgcaatgttcgtctccttcgccccttcccccccccccaccgcccctttcagtttcgactctctcctcgcccaacttcgccattcgcccctcagtttggtcagctgtcacagtgcctattac

SEQ ID NO: 81087 - DNA, 2416 bp, Heterodera glycines
atggcttcggctgatgtgtcaattgaagttgcacagttgaaaaacaacgacggtggtcaaatgggcacaaatgcccctgcggttattattaagccggaacgcaatggccatttctgtcgaatgttcgcacccggcaaatacaccgctcgtgtcagtgtggccaacatgtgtttttttacattttaaggcttatttttaggggtttctgtcaaaaatgcttatttctgtcaaatttttgcattttgggtatttaaacggtctattaaaaatttgataaattgcaaaaaattttattggggtggaccatttaattgggccagttttctttttcgaactcgttgtcctgacttttcctctgtttcagatcatttctccaacggcatacacaccgaaacaacaattggtcgatttgacggaaaagcctttggtcggcgtgcaattcacacaatttttgggcaaaatttccggatggattgaatgcattggtgccaaataaatgcacttatttacatatttattaggtggtattggtcacaaaacactaaattaactatttaagggacttgtgatggcatttccttggaattgtcgtcgcacggcgggggtcactcaccggcagttgttgccaacataaagccaaatgaaagcgacgggacgtttcaatttgcggagatttccccttccatttacaaaggtgacaacatttaattgggtgcaaaaataaggaatttcataaaatttcgaaaaattgctaaatttcatgaattatatttttttaaacaattccatgaaatttcaatttttttctcgagttatgctaataaaccttttttatgtgaattatgttacagtgcgcgttgtgagcagcgaaaatgtttggtgggattcaaccgaacaatcggttcatgtggtggaaaaggacgtggacggagttcactttgtacagaagggcttcagaatggacatacaaagcacacatcccgcaaaaatggtaatttaagtgttggaatgtctatttattataatttttatacaaaattaaatgccaatcagaaaatcactgttcttccattctttttccaggaatatgcgccgatcgttcaacacaaaaagccctccactgatgccgttcagcagctcaaaatggtgcatttggtttccggcctcaacactttgttcttcccgatgccatcgtcgccaaccgaaaagagtgccgccaaaggcaaatgccaaaatcaccgcacaccgccgcaaccgttcaaatttgcgctttcctcatgccacgactttgacattgttgttgccgatggcgacggaaaagcggcggaaaatgcttttaatgaccaacaaaaggacgacaacaacagcggcaagttcactgtgcctggcacaaaacgtgttgaacttgtcgccaaagcgacacgattgcctatcagaattgagttggatggcgacagtacggggcgtgacgagttgaacttggtggacatgaagctgacttggtaaagatatgcctctttattcagaaaaaccgttagaatcacacgaagaattatttatttttccttcgccgtaaaaaaatagacctactatcttttccgggtttttaagggaaaaaagtcgcaaatattttttgtggaatatgactcatttatttttgcttttttcattgcctttttccagtgacggatgttcttcggaggaggcaaaatcgtcgcccatttccgactcgatcaatggcaccgttaggacattcgttttccgcttggaacagcagaaagttggcattaaatttgttgcgacggcatactcggctcttcacctgttcatcccggaaaccatcgcaatcaaattcaatggtgcagataatggagttttaaaaatgcaagatttaaattattaattgcattttgtaaaggtgattgtcaggaggagccgattgttttccgagcgcatttgggcaaattcatcgagggccatgtacgtccggccatttctgaagtgagtgtcaccgcaaaacgccgaaagaccatcggcgacgggaaagggacagatttgcgcacgcagacggatgccgatggaaaattcaggtggcgaagggacccaatataaaaggatttttgcggctgggagtgtgtactttttgggttttttaaatttaattttaagataaatttaaaattgtgtcaatcctctcatttttaggtttggtccggtttgggatgagcaggactttgagctgatgctggaaaaggatggcttcgagttcaagccgtacacaccaactgccgatggtataaagatacggaaggcgggtggttggggagagggactccgtttggttaacagtaaattaataactgacaatgagattcaatttggattgaatttttgtttctgggtcgcataccgttga

SEQ ID NO: 81088 - DNA, 475 bp, Heterodera glycines
attgattacctgacaaaagtgaaaagagagtcggcgaagaattcttcagaaatgggctcaattttcagcttttttgcctcactccgaccaatttcaatggcataatgctatgagcaataaagaatgaaattaggtaattaatttaataaaattccacctttttataggcgggtaatgtgaaaaagaatacggtgcccggcacattttgttcctgaattattttgccggtggcactgtccttcaaaagcacacgaaaagtgctgctgctgacgcccccgccaatggtggcatttgccggaagttccaattcgctgacaaccgtcgccgcgggcaattcgttggggaacacgacaaagtgcacgtcacgcctgtcctcattgcccgtcttgacaatgacagaattcaattgaaaatgtcggtaataaataattaattaattgtctttatataatttttgatttgcccccgtccacct

SEQ ID NO: 81089 - DNA, 1167 bp, Heterodera glycines
atgccgtccttcgtccaccatcacttaacgcttctgtgcctcttcctcggcgccctttgcgccttcggtgccgtcccttcgctgtgccatcttttgggcgcccctggcggatgttccccaatcgccgttatcagcgcggcgcaacagccaaacggcggcggcgccgcggcacagtttcagcagccctttgggccggcttttggctgcccgctgaatccgctgggtgcttttgggcgcccatttcccccaccgccgccgcccccaccgccgggcatcggaggccaatttccatcgatgcaaggccagaccggtaatcaatctcaattaattaataattatttgtttggcatttgctgattgccaaaggcctttttgaccattttcattgattagagagtgtaggaaaaagtaaaattgatcagagataaaacaaatgataccactctgacctatggattcaacgcaaagttattttggttttttgatcgattgctatcatttgtgtcttgaaatcactcggaatggactaattaggggacatcgacggcatcggaacatccgttacgttcctcgtggttttttggcaccaattaaggccgccagccgatcaaaactggtcgcttcctctttgagcgggttgcttgctcattattcaattaacgctaattagatactttttgcaatggctaattagggtcccctgacgagcaattttcaatctttttttcaattctttcagtgaatcttagcccaaatttcatgggcggaggccaacagcagcagcaaaatggggggaatgccttcggcacaatgggcggcggcggcaattgcaattgtggcacgtgttgtcagcagcagcaggagacgaacggcaacagcaacaacaacaattttattggcatgccaacagccaacgaatttaccggcttcaacaacggcaacaataatttgatgaatggcattgccaatggcggtgccattgacatggccaacagcggcggtatgggcgtgttcggacgacgccgaaggcgatgaaattcaaaattggtggcataaaaaaaaatgccaagaaaagaatttttgtgcccaattctttttgcaaaatttgtttaatcatccaatttacaatgtgtaatttcaatttgaaagcattttttgaataataaa

SEQ ID NO: 81090 - DNA, 740 bp, Heterodera glycines
atagaaaaggtgttagaacggctctaaaatgacccaaaatcccctgctgcgtttgccggtgtcgaccgattgtggttggaagccaaaaaggaacttggaaataaaattcgtaaaaatgatgtaaaacattatctggaggggcatcgcacctacacattgatgcgtccaagacgcatcaattttccgcgcgctagaacaacggctgccggttttatgaccgactgtcaggtcgatttggctgactttcaaaccctttctcgacacaacaggggaaatcggtatttaatggtggtaattgatattctttcgaagcggatttttgtgacacctcttcgtaccaagaaggctgatgacatggtagacggctttaaagaagtgttttcaacgatgccaatgaaaccacacagaattttctccgacaagggtacagaattcagaaatcagcagctgaaaaaacttttcgatgaagaggaagttgagaaatatgagagcacacattctgagaagaaagcagcattagccgagcgcgcaatacgacaaatcaaaaatcgggtgtatcgctactttgcccaaacaaaaaccctaaattgggtggacgtaattgatcaaattgttaatggtattaataaatcaccgagccgggtgcatggaatgcgacctattgacgtgaactttaaaaattcacaacaaatatgggaaaaagtgtttggagatgatcagcatatggctcttttggaaag

SEQ ID NO: 81091 - DNA, 1095 bp, Heterodera glycines
atgagtattaattataacgataaaatttatcatggacaacattttgccggctgtagagatcagtcatacgaccaatggcattacactgatcagcgagaggattgcggtgctagaacaattccatttgacatcgttggcaagtatcgagaatgcaaggccactgagtgcgagacggaatggtgcatttcaaaagaaggagtaacaatttggtgtactcgtttcaaaattagtcctcgattcgtgccatttgactatgtttatgagttgccgggctatacatttttcaaggttttaaaatattatatgtcttttctttaaaataatattcatattcgtaacaaaggtcgagtttttaatgtcgaccacggtttccgctccaatgtttgtactcagaccgagactcccgtctacaatttaccgcccccaccgcctccgcctcaactaaagccaaaggaaaaggatggagaaacagaagaccaaactacacaacagttttttgagtctatcacggcagctattacaggattggatgtttctcaaaagaagcacggagaagccaaggaattttttgatgctctttcggtggcaaccgcggggatggaagtcgacgaaaacaaagagaaaaaagcgcttccacaaccgcagactaatgcctccgatttcttttctccgattgcagcagctactatgggaattgttggtgatcacctcaagcccaaaccgaaaccaaaacaacaccaaccaagggcctccgatttcttttcaccgatttctgcatccacaatggggatgagtgacgaacagaacaaacatgaacctaactcaaaacaaccaaagaaagattcttcaaaatttgcttcggctatttctgccgctaccatggggatgagcaataacgaacaaaagcagcaaattcctattgaaaaagataagcagcaaacggacaaagaaattcttgacgaatttcttgaaagtgtctccgctgccacaacatgcttggacatttcacataagaagaagccgaagaaaaaggggaagaaggaagcagaagatgaagaagcagcagccattgcgtcaattagtcgtaaagaataa

SEQ ID NO: 81092 - DNA, 627 bp, Heterodera glycines
atgattaagctatgccctgtcggaatgcagccggagccttcagcgattggctacgtgccgtgcgatttacttgcgcccggccaatgcagcgaagggtaagcacggggaatgattccagattttccggaagcccaaaaaattagaatttttcacaaattcccacaacttttgactcaaatttgccaaaaaaaaataaatagtctctgatcactttttaaacatttccgatcactgtaaaatgccaaccgccacaggtatcagtgcgtgcattcgcgtgacgatccggagatgagcatttgttgcagtcggttgcgcaaccaaccgccatctgctgcggcagcgcccatctgccccaatcaggcaaaattttcagtccctttctccatcgcgttcagttggcccatttctgacgggacagaattttttttttttcaataaaccgaagttggcaattttttcagcaaattttattgcgagacgggtcaagcccgcgctactgctccccacggcagggcatcagcgcgtgtccaaatgggtaccaatgcgatgagtcaattggccaaccgaatgtgtaaattcaaaaaaacaaaattggcattttaatacagtatgtgccaaatttgaaaa

SEQ ID NO: 81093 - DNA, 788 bp, Heterodera glycines
atgagtgccatatttggatttataatcaacctattctgttggttcacgtgcggttttggcattttgtttaatggcattttgattcgtttaatttatcggcatactccaaagccaatgcttatttatagcaaagtgattttactatttataaatattaacttttattggtcaataattccaataaatatttaggttctattgcaaacatgtttgattgatattttattgcttataatgacatttttattcatcccggtatattattatttttttatttttttcaattaattttttataattatttccattttaatattaaaaatgtattattcttagtacaattttgtgtcggaacggggcgaaacggaagtaattgtgtacggattgatcaccataaaaggggtgcaaaatcgaatttggaatttattggcattcgtttgctgggttttcctggtctatgtgtcaatgtttggctatgtgtcgcaatttatttttcgttatttggtcattatccggtacattaattaattattatttttaaattaatttataaaataagaaatttgcactttcaagggataaaaatgtttcgtccaccaaatatttttgcctcctttttctgatgcttttgtttccatttgcgcattgcgccaatttgtgcatcagctattttccgcctgtagaacacgcaacaatggacgagaaatccgtcgcggaaattctcggcattaatctcgacgacgatcaaattattttagccggatattcgtttaatgtaaaaaaataaa

SEQ ID NO: 81094 - DNA, 555 bp, Heterodera glycines
atgagtgccatatttggatttataatcaacctattctgttggttcacgtgcggttttggcattttgtttaatggcattttgattcgtttaatttatcggcacactccaaagccaatgcttatttatagcaaagtgattttactatttataaatattaacttttattggtcaataattccaataaatatttaggttctattgcaaacatgtttgattgatattttattgcttataatgacatttttattcatcccggtatattttttttttatttttttcaattaattttttataatttttccattttaatattaaaaatgtattattcttagtacaattttgtgtcggaacggggcgaaacggaagtaattgtgtacggattgatcaccataaaaggggtgcaaaatcgaatttggaatttattggcattcgtttgctgggttttcctggtctatgtgtcaatgtttggctatgtgtcgcaatttatttttcgttatttggtcattatccggtacattaattaattattatttttaaaataatttataaaataaa

SEQ ID NO: 81095 - DNA, 498 bp, Heterodera glycines
atgacaaaaacaaagaacggacgagagacagaaacacagaaccttatgatgtaagtgaacaaattgttccaaaagaatgagtcaatttcagcgatgagaacggggaggacgaggaagaagaagttgcacagcaaaaggagcaaatctgaaaaggaatctttgcacggcaatttcaattggcacaacaattgattaattagggaataataattaatcacttccaccacttaattgacctgacacagacaaagcgagcaaaaagtggttgacgagttgttgtcgcatttcgcaatcgcagaaaatggcaatgttaaacaaattggacaaaatgccgaaaaagctgattgtgagggatgggaagggaaagaagcggtgatatggataaattttaatatttcattttaatttaagtcaaagccccccccccctctccccctaagggttaccttatcggcgcattggcatacactctgtaggcacgttgctcttctgaataaa

SEQ ID NO: 81096 - DNA, 2691 bp, Heterodera glycines
atattatcaaaaaaatattttaatctctgcagagatctttatgctctgagatgaattccatcgcttcctcctccgatttgtccactgaaagtgatttctctcactgccccgagggcatttattcagaagagcaacgtgcctacagagtgtatgccaatgcgccgataaggtaacccttagggggagagggggggggggctttgacttaaattaaaatgaaatattaaaatttatccatatcaccgcttctttcccttcccatccctcacaatcagctttttcggcattttgtccaatttgtttaacattgccattttctgcgattgcgaaatgcgacaacaactcgtcaaccactttttgctcgctttgtctgtgtcaggtcaattaagtggtggaagtgattaattattattccctaattaatcaattgttgtgccaattgaaattgccgtgcaaagattccttttcagatttgctccttttgctgtgcaacttcttcttcctcgtcctccccgttctcatcgctgaaattgactcattcttttggaacaatttgttcacttacatcataaggttctgtgtttctgtctctcgtccgttctttgtttttgtcatttcttttctgaattgtccattttccttaaggtattcctaccctctcgcgcttaccgttcagacgagtggtacggtatccctcccccaaggcattaattaccgtatttgattttttttaaggcgtttatttgactgttctggtcagtgttcatcgctttctcggtgtttgtcatcccttcaaagtttttaataataaaaaaataaataaacaaattctaaaaatgtaaaaaggctaagcgttgggtgtcacggaaggccgtcgaatgggccatcgtcggctccgtgctgttcagcttttccgtgaacattccgacttggctcgagttgggcgtggtcccgtgttattccacccgtttcaacagaacgtccaggcaaaaaacagcaataaatgcccaagtaatgaatgcctttccccgcctgccattcagccaaattcaattggctcctttccacgacatctcttacattctgatcaaaaagtgcctggtctacacccttctgatgttcatcgtgccgttctccactctgatcacagtcaattggaaaatggtcggatttctttcctctacttttttaaatttatgaatttcaaatcatcgttaggtctgtgcgcttaggtccagcactcggctgaggaccaaacacaccctttcgtccagcaaaccgtcgaacagcgagtggttgggacgaccaaacgcttttaatttgcaaatgtttcagcaacatcgcaaggcaactccatctgctgaagagcacgaggtgaaatgaatgaatggtgaatgaatggattgatgtgaacattctccacactttcgcagatattccgaagtgttcaaagtgatcagcaaaattaattactcgaggtaaacggacaaacaattattaaattgtaatttacaaataagaaacatttgtttatttaaagtaattactaatatttaaatcttcctatcggagggtttgccgttctcaaaactccaaaatattggcgccatctgtggtgtccttactttagggccaccgaaactaaaatggaggggaggaaaattccgaaaaggaccccaaaagggcggtaaaaatggctccatgttggtttgggtcataaattgaaccattcgcccatttcgttcagtttgctgaggccttcttcggaattgttcaagtcgcgcttcacgaactccaccagagaccgttccatcactctgatgcttttggccatcgtcggcctttttttggtgtgcaacggattggcctttctgaacagcattgtcgagtcgatgattctgttcgccgatgacacaaaagtaaaaacaattgacttgttttataaaaaataataattaattatcataattgtactgtactcttagcaatctctgcaaaatacggtggaattgttgaggaattcaagcgaaggagctgaggagcagaaatttgtgcagaatgatgcgaaggaagagatgtggtggatggaactgatggtcaaatggttcgaatgttcggtggaggtaaccccaaaaagcgaagaatgtccgccgatcactgatcagtccacccgtcactttgaggtgtccaatgtgctgatcactttgaattcctccacctcgactttgatatatttggtgttcagttcgaaataccgaatgattgttaaatcaatcgttggcctccaaaagcgggacagagtgggcatattcgatttaagaatatccaaatttatttgaaattgctattttcagtttaatcggatcgcttttaccaccgctctcgctgcccgacgagcgatggaactttcactgattcctgaggtattcgatgtgcctcttaaagagactaattccaaaatcaggaggtcgaaaaccggagccggcaaagtcgaaagcgtacgaccacactgacatcgacggtaaccgcggcacggacccgcgaagggtcgacagcagcgagtttaaaatcgaaccggcacgattcaatgcactcgcagttgcagtacaggctagtgacagagggggagcagttcaaatgagaggaagggaaacggaagagacaaaaatattcgattttcccggaaatgtt

SEQ ID NO: 81097 - DNA, 391 bp, Heterodera glycines
atgatgagcttttgtagtgggcttcagctgtcgtctattggcgatgccaatagcgcaaattcggcgacggccgtgccaatgtcagcagcgagtcacagacgaacgatgtttaaagggcttcaaaaggggtccaaggagcttttccggtcacagggaacactgaacagatcgatgacaaattcagaatcgaatttgaggtgaaagagaaattttgaaaaaatgggaaaaaatttcagattaatggacgagcaggaaaagcccgagaagagttcagcagaagatgagaggaaaaagaaaatcggggaaacgatggaaatggcggaggcaccgcggcaaaattgttataatttatagtttttatttgttttaaattttatgctttcaatgctta

SEQ ID NO: 81098 - DNA, 537 bp, Heterodera glycines
gtcgaaactgaaagtgctctcctcctccgccgacttttcttcgttcctttttttggcccttctcttcggtttgatttttaaatattacaaatttcgttgtgtgacatggtgttccgtattctttttcagatttctccttctctcagcccaccattcaacaaaaatccatccaggaattgttgaacacgccgacgttcttaccaactgccgagaaacacgactacttcgtcgccccttttctacaacagcagaaacaacgttggctgtccgtccgacccttccaagaattcagaagaagtccccaaacggccgaccttggactcctgttgcaatatttggacaacaaacggaatgctccgtcgctaatggaagatgagggaaatgggagacacggcataagcgggtcccctctgggcacaatgcgattcggcaagcgaacgttcaactcgccattgggcacaatgcgattcggcaagagggaatacaacaaatctccgcttggcacaatgcgatttgggtgagaaaagtgacgacaga

SEQ ID NO: 81099 - DNA, 3076 bp, Heterodera glycines
ttcagcaggctttgtcctgctacgtcgtctcaatgtccgcttcgacgatcgtttcaaagtcacaaaacggagggggacaagaaaacaaaacactgcggagactcaccaaaattgactttttatcattttatcttattctaataacgtaattttcagggccaatttacctcccatcagctctttcgctactttgccgacctgagcaaccccgactttgtcacccatttggccatggtccattcccgcttctccacaaatacttaccccagttggagcagggcccaaccgaacagaatggtggcgcacaatggtgaaatcaacacactgagaggtgggcacggcacaaaggaaaattcagcaaattcttttaaaattgccatattctttacattcctcttcccatatcattgtatttgtaacagctttatttacactgatttcaggaaacatcaactttatgaaggccagggaggggacaatgcgaagcagggagtacaaggaggaattgaacaagttataccctgtggtggaaaatgaaatgaccgattcgggtgaggagccattcattggctgtgacttcaatgaattggcctctcacgatggaattgtttagggtgttttgacaatgtgctcgaatttctcgtcagagcaggcaatcggacgttgcccgaagctgcgatgacgatggtgccggaggcatgggagaaagacgaggacatgaggtgggcaattggttgaccaatggacacactcattcctactttagtcatgaaaaacgcatcttctaccggtgggcagcaatgcaaatggagccttgggatggcccgggtgcgttctccaacgcccttttttgtttaatggaaatcactacgaattttcagcacttttggcctttagcgatggccgtttcattggtgccattttggacagaaacggacttcgtcctgcccgttattgtgtgactgcggacgagcacatttatttggccagtgaggtcggcgttaatgacttgcccgtggaaggagtcgtcaaacgcgtgagttgcctcttttctattaaacgtggtgaaactttcttgttgcaaatggtgttcaaatacacattatcatcgttggttattgcattcgttctgcggttggtcctttctctctcttttcttcttcccccattctgtcgtcacttttctcacccaaatcgcattgtgccaagcggagatttgttgtattccctcttgccgaatcgcattgtgcccaatggcgagttgaacgttcgcttgccgaatcgcattgtgcccagaggggacccgcttatgccgtgtctcccatttccctcatcttccattagcgacggagcattccgtttgttgtccaaatattgcaacaggagtccaaggtcggccgtttggggacttcttctgaattcttggaagggtcggacggacagccaacgttgtttctgctgttgtagaaaaggggcgacgaagtagtcgtgtttctcggcagttggtaagaacgtcggcgtgttcaacaattcctggatggatttttgttgaatggtgggctgagagaaggagaaatctgaaaaagaatacggaacaccatgtcacacaacgaaatttgtaatatttaaaaatcaaaccgaagagaagggccaaaaaaaggaacgaagaaaagtcggcggaggaggagagcactttcagtttcgacataacaaatgtttgcattgggaattgagtggcgagttttcttcttgactggcacttttaaatgcagccactcaaattgcgccttctcggacataatgcacttaaatcggctaatgttcgccaaattgacataatatacagcggccgtttctgaccgcccattcgaattttcccttccagcgattcgggtcgtatgctcagttgcactttctaatctgacatggcatttggtgatggtggaaaatatttactcagtgatgtgtgaaattggtaatcccaaaagtgttttgactgcaagaaatgggaaccaccgctgcttcattgtcatctcaacttccacaggaatttgaatttgtcactcctccaagtccattaggaaggaatccaggggatggcggaccactggagaggaaatatgccaaataaacgaatttattaagggattttcacgacgtgccaaaaagggaacaaaatgaaacggtctacaattgctcattatcagcattttcactagaacgtcgttggtttttggttgtggaattttattccttcgtttttcatttttcaaatggattttcgcttcggtatgcttcgtagagaaacgggttgatcaaaaatcctccgccgccatttgatccgccagaaaaacgtttgccgaatcgaagaggctcacgaaagtatggccgtttggccattgggtatgatccaagagtgagttcattttcagttgtttttgaacgatggggaacaccgctaaccatggactggtggaaaagcatggcacactgggaaattataataaatcagaaaataaagataaaaaccatacttgcacaattaacagcaaaatggccaaagtggtattgttggacggcagcatggatttagtcaattaagaaattggagatgaaaaatatgttatcggtggaccaaccttgagatatttagaaaggaatgtgaaagaaagtaaattaacggtaacctgagtgaaaatgcgtggcaaattatgggctctacgaaaacaccaaacaataattggttgagggcttttactacttatttacgatgggaagaaaaggtcaccgggcaatataattagcctccaggggatcattttctgttaattacaactttttcgtgcccaaaattttgaatttgtgtactttgagtttttgtaaatttaatgaatgacttccctcgggaagatttggcattgtttttacgttgaagtcaatcactgccaaacagaatgcgaagcacaaagaagaaaatggcaaaaatgtgttgatgcattgttaaattgagttaattggggcgggacggaatgcaaatgtccgcctcgttggggcaaatctttaacacttttaacga

SEQ ID NO: 81100 - DNA, 154 bp, Heterodera glycines
atggactttgacggtggcgatggacaacggacggagacggaagaggagaaacgaaagacattggaagcagcaaagcctagagaaaatggaaagggaggaaaagagaaaaaagaaggaaaagagagggaaagggaaaggaggaaaagaagggaag

SEQ ID NO: 81101 - DNA, 372 bp, Heterodera glycines
ggcattttggctgatcaccgctttttccttacattattatgcgctgcttcttcccccgtgtcgtccgaagtgttttcccctcgcccctttccttcgtccgttcctctctctccactttttatcccatcgatgaccaattgttcggtttggacgaggaacaacgacaggtgttcggacttttttctgatagtttctccattccttccgttagcttcgtcaattggtctttcgactcgctcaaaaggaattggccccttttgctgatgaaattgaccgtcaaaatgaattcacaaagcttcgcgatttttggcgattgcttggtcaacaaggcaggaggggggtcacagtgccagcggagtatggcgggtcgga

SEQ ID NO: 81102 - DNA, 646 bp, Heterodera glycines
atgcctttccttctcctccctctgaccccatttgaattgccttggcattatttcccttcaggcgccgtcctcgccgagtctgtccacgccctggcgcccgtcccgcccttcagagcatcggtcaaagatggatacgctgtgatcggtcggtttagcagcagcacaattaaacccatgtcgattaagcctatgatggggtgggagcacggcgagttatcgcagcacacacagccaaaatatcagaaggacgctcggcagagaatgcaattggcacgggcgaatgcgtacgaataaccaccggggcaatgggtctgcgcggggctcacttttaatggccttcattaacaaattagtcgctttaagtgcctcggggagctgatgcgattgtgcaagtggaggacacgcgcgtgttgcagcacaatgtgagggcgaattttccaaaaaaattagcgaattgcccaattaattacggaacagaagcgcaccctttaggaagaggaagagctgacggtggacataatgaaggagcctcgggaaggacaggacattcggtgagaaagggaagcaccgatcgggcgaatcgaagtgccacagagagaggggaagcgacgtggcggagggccaacttctgctcggacacggcacg

SEQ ID NO: 81103 - DNA, 1731 bp, Heterodera glycines; identical to SEQ ID NO: 16703

SEQ ID NO: 81104 - DNA, 1595 bp, Heterodera glycines
ttcccaggatatgtgaataattttgattgatttttattttatttattttccttataatttctctataactaaatgaaaactttttgtttaagctcgtgtaaaaagtattaagccgatctttaaagttataacgagtttaaaaatctctaattttttggggattaaattataatttcattaattatatataaattctgaccaaatataagagattttattcaaaaaactaatttaaaaaattagtaagagaaaggattttgtaaaaaaaaattgatactttgacgggtatgtgatcaaacaatatatcttctccctatttttgggtggtcatatttatggtggtgattatggaattttaaaaattttatatttcagggtgaacccggcgctaccggcctacccggtgtacctggccaagatggtctccctggcgtgccgggtgaaagtggcgagcccgggtacggcttcccgggccagcctggcgtgccgggagaaaagggcgatgccggactccatggaatgcctgggctaaagggggaaaaggggtctcctggtgagacagtggcctgtgatgcagcagattttttttaaaatttcaaacaatttaggaccattgccacttgtggcaccacctggacgacctggccaagacggtctcccagggcttcccggtgccaagggagagcctggtcttccaggatttccaggcatggattttctggaattttcaataaaaaaacaattaatttttttaaaccaattaaggcaatgatggcttatccggcatgccagggctaaaaggacaaaagggcgagcatggatttccgggacagaatggcctcgaaggaccgccaggaatggaaggacaacaaggatttccaggtaatttttttttgaaaattctagaaatgagaattcatccataggtttaattggtccaattaaaaaatccaccaatttactcttattggctaattaaggaaaacaattcatacatattttagttgcttagaaatagactaatttaataagattttccatatatttcacatgagaaaattaatagatatttagaaaatttgtttggtccatttaaaaaagtccgtcaattttctcttaatttagctaattattaagagaaagttatggactttccattctctatgattaacaataataatacattatttatttgtttctttttgaaaattaaaattaagatttaaatttattttccaggaaatcccggtccgcctggaatgccaggctccaagggcgaggcagggtggcctggcgcgcccggcctcaccgggccaaagggtgaggctggcatcgcattcaacgggccaccggggtctcccggcttccctggcataaaaggagaagctggctttccgggaacgcctggactgcccgggctggacgggtaattaaaaaaattatttgaaatttaaaataattaaaaatggatttaattaggcaacctggccagcctggttccccaggagaaaagggtgttggtggcctaccgggtttacctggtgcacctggcttcctcggtgtgaaaggcgagccaggctttggcggaataccag

SEQ ID NO: 81105 - DNA, 1528 bp, Heterodera glycines
  unsure (1)..(1528): unsure at all n locations
gcccggccctggtcggctccaaaggagagcctgggccaaggggtaagtcccaaaatttttataaattntaaacgaggcttccctcccctacttntaggcattcctggcatcagcataccaggccttcaaggcagagatggacagcctggaattgacggtattcctggacgaaagggcgaatcaggcttggccggactaagaggcaaagcaaaagcaaaatttaattttaaaaacattgactttgaaaaaacaattaattacctaattaaggacctccgggcgattcgttgaacggtttgcccggcccgccaggcatttctgggccacaagggccaaaggtgtgaacatgtaaaaattcaataattttttcatttttataatgaaacaaattttgcagggttatgacggcagggatggtgcgcccggtttgcctggcattcctggcaccaagggcgatcggggcggtggatgttcaatttgcgcaccgggtgctaagggcgagaagggcaatgccggcttccctggctttcccggccctcaaggtcaattaatattgaatttaagaattatttaaattttgcatgaaaattcttggcataaggagaaaagtgggctattcccccaaataaattttcagctggttttttctcccaaatattttatggaaaatatatttggtaattaagacggatgtccgcccaaaagaccaacaaattaaattattaaaaaaggcttcaacttcaaaccaaagctgagagaaaaatgtttattacaaaaaaaaatttcaaaataggattaaaattcaaaatctttgtttttttccgaaaaatcccaatttcgtctcaatctcgattgaaaatatgaaactttatttatcactgcacaaattagctttgctacactttttgcaaaattataaaattctcgaaaaaaaattattattattttttttttgtattttccaaggttgaaactataaaccctaagggggcggggtattgagaaatcatgcaattttcaaccgagttacttatatatctgaccatctttggccctacaaattttaaattgtgctaattaaggcgatcgtggccatcccggcatggctggcccagctggcgaccctggcgatgacggattgcctggaccaattgggccgcccgggccacccggcgcaccgggctttgacggcattcccgggctgcctggcacaaagtgccattcttttttcaaaattaaaatttttttaatgccaatctttcaggggtgaaccgactcagctggtgctgcgacctggccctcctggataccctggccccaagggtgaggccggcttccctggtttgcctggacttcaaggcccacctggcaaagaaggactgcctggccttcctggtacacctggacaactaggaaaacatgtaaaaatttaaaaaattttatccatctaaaaaatgaaatttaaattattaatcgtttatctatgaaaataattagggtatgaatgggcttgcagtttcgtaaaaca

SEQ ID NO: 81106 - DNA, 580 bp, Heterodera glycines
gaggccattacggtggttacagtttcgagcaaccaagcattgagcgtgccgaaactgatcaaattgacagcgacaaagacaccagcagcgaggaagcagttatcaatggctccaccacttccacctttggctcatcatcatcaccggctttattctttttttgcattttttataactatcattagttggatttgcgtctttaatgggtgtgaatgtgttgtaaatggtgatggacaatatgaagaagttgagattgagactacttttgatgggatcgatggattaatagatcttccaaatcttgacacattcaactcaaaaaacggtaacaaattacataaaattttatagattagaataaaaagcatacattggaagttaatcaacaaacaaatttaaatttccaaattatgcattttattttaaaattaatgcgatttgttttaaacaatttatctttaatggtttttgagttaagtcctagcatctattcaaatgctgataattttaaggacaaccatttgatggtggaaatgaattagtgtatcacgacgaacaaatggaattggaaccatcattc

SEQ ID NO: 81107 - DNA, 1278 bp, Heterodera glycines; identical to SEQ ID NO: 16707
  unsure (1)..(1278): unsure at all n locations

SEQ ID NO: 81108 - DNA, 924 bp, Heterodera glycines
aaaaataaaacaatttccgatgggcctttctcaccgttcgccttttgcgcgttcttcgggtggtacgaattgcaaaattgggccgattcagtccaggtttaaagcatcataaattttaaaatcaaaacataaaaagttggcaaaatgtcttttagggctcgcaaattttgccctgacattgcgcaaaagcaaaaaacagatgcaaatggtcgccattgtgcttctcacgggtaacgaaagtgctcaaaataaaagacaaaaaagtaaatattaaaattaaatttatttttaattaaataaaattaaaaatatttttcaaaatttattttcagtgatcgttttcttttcaactttggtctattttctggagaaggacgagcccaacacaacattcacttcaattcccgccgcattttggtggtcagtggtggcggcacattttaaaattgaaaattttgaaaataattttcatttttcgaattgaaaaatgaaaaataatattttttaataaattaaaagaagagatttatttttgttgctgtgccattccacaattttcctgtcctttttcaggtgtttgttctcccaaacgaaatgggtgccgcagacggcgggtgaatttttgtgccaaaaaaggacttttcttattaattgaaacaattttcagccggcaaaattgttggaggcggcgctatcacttgcggggtgctcgtattggcactgccaattgcgattttggtacagagaaattgaaaacgaagactaaaattgggggggggggggtaattttggataattaccctccaaaagagttaattgcttgtactattaatgatgatgtgggcacaggtgaacaacttcatgcaagtggtccgtttgcgggaggaaaaggtgctcaagcagtacgcgtcaattgccaccgcc

SEQ ID NO: 81109 - DNA, 2410 bp, Heterodera glycines
atggcgggcagaaatcaaggtttaaatgtggggcaaaatcagggaggacgaccaccagaagatggaaggtacaatttgcgggcaagacaaaaccggcgaaattgggctgagttcgaagcagagtacgacgcggaaattgatcgtgagctgcgaattttggaaagaaaccgctcagaaaatttggctgaacaagcaccgaatcagcaaaattcaaggaatttgcggttgaatcagaacagaacgtacgttctggcggcaagaccgccagaggatggaaatcaaggacgtgaagttgccttatggaatcgttttcaattcgaaggagtgcaaaatgagaatgcaaatttggggaggccggtagcgcaatccagttcaatttcggggaatgcaggggtacaaaatcgaattgtaatggatgaaagcccacacatttcgtatgagcataatcctagaaaccgggctggacaagcacatgaaatgagagagagacaaaatatactatacgaagaattactggaaactttggaaagacaagttctaagaaatgaaaatgaatttttgggaggacgagaagtgccggtagagcagcgaaatgagcagagaaatggacgacatgttgaaaacctgcattggtatcatagggcacaggaaaatgagcacgatggccgccacttcgaaagaaacaatcaaatttataagccgcggtatgaaatgaactggagacaagaacagtacacgaattctgaacaagggagaaaccgcagggcatatgatcgatttcaaagtcatgaagaaaattttcccaggccaaaccagtttgagagaaatcttttaatgaatcccatggtaccggtcgagaccaatccaagagctatggataatttggcttttcaaatgtaccgtatgactctggcaacacagtatgcaagtgttctcagggaaataccgacaattgaaggcaccgaagggcgagataagattcaagatttctttttaaccgtggagacgttgttaagtgactgggaacctgacaagcaaattaatgtccttaaaacgagactacgggggaaagcattgaaggcattaaatatggcacttataaaatttggtcccgttcccccctttaatatcctaaaaacggaaataatgtcaactttgagagaaactgactgcagggaggcttcagcttttactgagctcactcaattcgccaaaagaacaatgaatgaggatttaatgagttttggtgaaaaaatctatcgtttggtcaaatgctcatactcgggattaaatgcaactcaaattgacgaaatcgcaaaaaagtttttcattatgaacataaacgacggggaactggcgagatttttggagtgccaaaataaaccggagcaaacatttgatgagattttgatgctggcaaaccgcatacatttggcagaccccgaaaaagtcaaagagagaattgagtctaggatgagaaacgaacaacaaaccagaccatttcagagcagatcaaattggaacagtagaactgagtggaatcctgaccgaaatcgaccaccgaataccggaaacttttggggaaataggaggaatgaatttcgtcgagacaatcaaaatcagaattggagaatccatcaaacgaatcagttctcagggtctaatgccacgccattaaattctgtccaaccgaataggcaaactgctgaaagagctaacccgagaagcacaaactcgatttttcttagacaagaagaaaaacaggtaaaagaagcaacagaagtgaatattggccgtcttggagtatcggagcatgaaaaatttttcgattctctgatccttcatacaaaagcattcccggctgagaacccggccattccccaaatttcggaatgcttaactttgcatttgtctgtgattggagtcacatcgaaggcgcttaccgattccggtgccgaaactgcaattgttaatccgattttcttgcacactttggcgaaggagaaaggtgtaaatttgttggattgtgggtttaacccaaattcgggaaacagcaagttgccatttgaagtttcatcgttcactgacacaaaaattaatgtaattggagtgatcaatgtcccggtacaaatgaaatcggttgagtgtcaaattccttgcctcataacacgtgaaccatttgcctatgaccttattttgggcactacagctctacacaaccttggattttacattggaaatacattatccggggaaatttttaattttccctcacaaaaaacggataaaaaatacggtcaaatgcatgaagttaaagtgcttaattctcattacattccgcctttctcctcccattttgttagtgcttacataaacaattttcattgtttagaaaaagaaaattttctaa

SEQ ID NO: 81110 - DNA, 4253 bp, Heterodera glycines
atgagcggagaggaagagcagttggctttggagaaattgggcgtggtcgaaagtggagacaaagaaaatgctggacggacggacaaaagtgacaaaattgtggtggagactggagtcgtggaggccggggagaaaggtttgttgcacattttggtacataataaatcctctaatacattgatgttggagagtggcgataaaattggtacggcagaagtggttgaaaaaattttcaaacctggaactgaaatcatttctaatgaatttgatggtatttttcggtcaaaaattttgacagtaaacacgaatcaaaaaggaaacaatgaaaaattttctgaattattgtcagtcttgaagcatgatgttggtccgcttaaagaaaatgaacaggagttaattgagaaattttggtcccaattttgtgacgttttggttttgagtgaagcggaattaacccagactgagttagccgagcataaaattgacacgggtgatgcatccccaataaaatgttccccccgcccaattccatttggaattcgtactaaagttactgaaatgttggaggattatttgagtaaaggggtcataaggccgtcaaatagtccttgggctgctccagtggtattggtaaataaaaaagatggaagtctgagaatgtgtgtggactaccgaaaattaaactcggttacccgaaaggacagctatccaattccaaacattgaagaaatgttaatgtatcttggcgagagaaaaattttttcatgccttgatttaatcagtggttactggcaaatcaaagttcaccctgaagacattccaaaaacagcatttgctgtccaaaacggcttgtttgaatttgttgtgatgccatttgggttaagcaatgctcccgcaacctttcaaagagtaatgaacaaagtactggagggtttaataaacaaaagcgtttttgtttatctcgatgacattttggtggccagctcaacattcgaagaacacattcaagatttgagtcaagtttttgaacgaatcagacagtatgggttgaaagtcaaagcaaaaaagtgcaagtttgcgcaactaactgtaccatttttagggcatattctcacaagcgaaggccttaaaaaggaccccgagaaattcatgccaattttggatttcccaagaccaattaccctaaaggaactacagagattccttggcatgctgaattggcaccgaaaatttattaaggattttgccaaaattgcaggaccactaacccgacttatgaaaaaatcggaggatcacaaaaaattgggatggaatgagccagctgaaaacgcatttcaaaccgtgaaaaaactaattgttgaagacgtcgtcctaaaatatccgaatttcgaaatggcagagaaaaacctggattttcgttttcacatttatacagatgcaagtgcaactggactcggcgcagtccattgtcaaaaagacaattccgaaaaaatgcgcccaatttgttatgcatcgcgtcgttgtagtgatgctgagaagaaatacggtccgacagtgcttgaatgtcttggaataaaatttgctgtttcaaaatttaaacattatattgcttggctgcctactgttgtcataactgatcataaagcacttcccgcgatgtttaggtcaaaaaaatcagtagggaatgcaagggttgatcggtggattatggaattgggggcaccattcgaattggaagtgatttattcccccggaaaatttaattatgttgcggatgccctttcacgggcttatcaccctgaaaatgaccaagaaatggacacgaagaagaatcgattaagatttcaaatgtaaatgtccaagagaaacgcccaaaacttccaaacagtgtcactctcgaagaatggattagtgctactgaaaaatcagaattatctttcattatggaatttctttcgaaaagaaaaattccagaagacacaaaactaaaagaaaaattgatcaaatcattggcgaacttcatgctgatggatggagtgctttatcggttaaatggaaaaggggagcccgaaatttttgtaccagaacaatttcgaaaacaattgttcaaagaacatcacatcggaatttgtgcctcgcatcagagcggaaagaaagtttatgggcgtttaaaatcccttggatttttctggcctaatcttctcggagattgtatgcattggacccgttcttgccgtgtttgtgcgcacaaccgaattccaacacggaatcatccaggcttgaaccctatagtcacaattcgtccaaatgaattgttgtgcatggacattttgaaattagggccaacccgaaatggaaataaatatacattaacaatgatagaccattttactcggtttgcggaagcaatcccgattccggacaaaaaagcagaaacagttgcacaaaatctcattgagaaatggatcttaaaatttggggccccggaacggattcacacagatttgggtaccgaattcgtgaacgaaactttaaaagaaatttcagaaaaaatgttaattgctcggtccacaacatcaggttatgatcccgcatgtaacggaatgtgtgaacgtttgaacagatcaattgttgagatgatgagaaaatgcataacatcgccctgggaatgggacacacgaattggatttattgtcttttcatacaatattactccaaatgagtccactgggtttcctccttttactctcttttttgggagaacagccaacttcccgacgaacctcacagtaccaaaacgaccaaatccggtttatttggttgatcacgatgattatcttcagcattttcgagaaaattttgaaaatatcctaaatgaggcaaaacaaaatatggttaaggctcgggagtcccaaaaaacccaatttaatgaaaaatcgcacgtgcgtttgaataagtatgctttgggagagaaagttatggtgttttttcgaccacgagcgcagggtgaacacaaaaaactgtaatggcgttattttggaccatttattatcacacaaatctctcccacttccgcctgggttgtgccaatcgataaaagacacgttgaaccaatgaaagtgccattggaacatttaactcatgtgccaaaagaaatccccgacaaagtgtttttacccaggcaacagcgcaaaaaactcttagaaaacccattttctgatttagtgatcaatgaccagcataacaatcgaattcggattaatccgatcagtttaaaaaattgttataattcagagccgacgccaaacagtgccatttcatggtcgaccgaatgcaacggagaaggacacgccaattgctgccggattacgcttggcaaaatttttaaggatttgccaagcaatgaccctctgcgtcggttgccaatttcaaagctcagcgagctcatctgccttcactttgcctccgatgtcctccatggccaattaagggaatgggcatccaaaaaagacagagaccctacggcactgattcgattcgtctcagagccgcagaggaaaattcgtggaattgaagaaaccatggaaaaatggctgaataactgcagcaaagcttttccagaactgaaggcatcgaaattcaagccgatcattttcgaaattccaccagggccattggaaaaatttggcaccgaaattgcgaaggcattcgagaatatccgcgccgtaaaaattcacggattacaccgaacgatccgaactccgcacatcatcgcaggggacagaacagccgaagaaattggaaagagatgtgaagcggaaataatcctggctgaaaactgcattggattaagtgatttattgggaaagacggcctttggacgggaagtgaaagaagtgattgtatgtgttggcacttccgacttggacattgacactccattggaatggtgtgaaaaggctgtcaaaaaactgctcactcaccttggacaatttgccataaaaatttgggtcgttccgcccccattttatcggcaaaaggctgttaagcatgaagaattcctaaaaatgctggtggagacggtaccaaaagaagacctttgcttaatgaagggatttcggtcaatcattgaagtcacgatgtggggaaatcaagaggagaagcgatatgtggatgagcggggccgattgaaattctcaggtgtcactgcaacacttaagcatttaaaagaagtgttcggtctggaagttccg

SEQ ID NO: 81111 - DNA, 808 bp, Heterodera glycines
atgcaatttcttcgtcaacacaaaatttcgcccgaggaaaattggaaagacaatcgcaactttttggtttcattacaaaatggtggatgcgaaagtgagaaagaacaaaaacaaatttgttctttggaatttctcctcactctggaaaaacttcccgaactaaatggaaatgaaggacgagagcaaatacggacatttttcaaaaaattttcgttagctaccgaagaatggccagaaaaacgccgaatttcagcactcgagtgcaaagtaagtggaaaggcggaacgtgctttcagcgccgctgcagtgaatcggccggcgaaatttgatgcaatacgaagcgaaatggagtcacttttggacgaatgggattgtaccgcaattcaagcattcaacgaattgtgggatggaccaaaacggcgaccaggcgaaaatctggaagaatttgcagaacgtgtttaccaacttgtgctttgtgcatatccaggtttgccattggatttgtacaacgattatgcggcaaaacacttcattcgtgctttggaaaatgccaaagtttcgattgcattggaaatggctcgtcgtccgggtttgagctacgacagcttggtcgcgttggctgtgcgtgcggaaatagcgcaaaaagccgcaaatttaattgcagaggatgaaaacgcacacatagcacgcagctttaaaccaaataaggcggaaaagacgaccaccgattgggaaaaattttacgtccgaccgacaaataaaaacgtctgttataactgccgtaaaattggccacatcgcgcgaaatt

SEQ ID NO: 81112 - DNA, 372 bp, Heterodera glycines
gaacgggccaactccgtctgagccaactttgagtcaatataactcttgaagttattgaccgaatcaaacaatcttgatatcattcgaaagctcttcacaggctctattagcctactaaaaattacagaaaatttcgaactataaaaaaagatagaaataaaaaacttcgaaaattctgccttttttgcggttttcaactgacaacttttttgagagctgattaatcactgagaaatagcttataaatatcttctaaacatctagggctttcgaatgataccatgattgtgaagtttggccaacaaagaaaaaagttatagctttttgaacattgctgagacggagttggccagacggagttgacccctaccg

SEQ ID NO: 81113 - DNA, 248 bp, Heterodera glycines
atggccgacgtggagcagtcctacatgaccgaggcggaccgccgggcgttggagcgctttcggcgcgctgaacggcgcctgttttccaccgagattgagctggacaaggtgctgttcaccttccaacagtacgacatgctcagacgccgctgggccatggagcaggcacggcaaatgccgcacggcagacggaaaaggaacaagcggcggcggcagctgtggcggcgacaacggcacagtcaccaaac

SEQ ID NO: 81114 - DNA, 2736 bp, Heterodera glycines
tttgcactgatcattttgaaccgattttggcacggattggccaattggagaaatgtcgacagaagcaaaatgcacattttgatcaactgaacacctcccaaaaggatcagtgtgaaaaatgggccaaaatggagaacgaaattggtgtgcaatgaatttgcaaataactataaataattatgcgtaataattggcctaattatatgtttaaaagtaaaaataattgctacaaaagtggtaatattttaataataattttgggtttctctcagctgaacacctttcacaactaagaaatgaccacgcgcagcagcaaaaggagttttgttccaaaattgatgaggtgatttttaacacatgcaattaaataataaattaaacagttcgcagccaaagcggatttgaacacaaacccttgtaaaaaaccaaataattgatttcaatcaatgatattacaaactcggattcgtgaatcaactcattttttacccttgaaaaaaatgcgagaatttaactgtttttttctgtttgggcactaattccgaaggattttatttaattatgtattttgttgaaaaatgggttctcgaatttttgtaggaattatttggatttttcgtcgaaacgcgggtaattcagggtgcggatctgttcttatttgtaagaactgttctgattttgggctattgtttttattttgttcttatttcttaaaattattcataaatttagaaatttatagcataaatgttcatattttacaaataaatttttaaaaattttccctgtaagggaaaatgggcaatgattactgtacctaccgtaaccacatttattaggttttaaaaaagatcaatattttttaaaataattcatttattttttagatggtgaggaacggctctcacaattacaaaatgaccataagaaacttccaaaaaatcagtgaattggaaaatcagcaaaaagaacgttcaaaaggcgaggagaaattaaaacctaaacctaattagtttacattaaaattgattgatttttaagccactgcggatcaattttcaaaaattgtggaaaaagtctgtgatttggagaaagaacagaaacagagaatggtaaattaagggtaattttcattaattgagtatttaggcaattttattttaaatttatataaattattattatttcaggcacttttaaatttccgacaaaattgtttggatgtcaaagtttgtcataataatctccaaatcattggcgacaaaaatctcattagtcccccgcctatataggactcttaagaaccaataattaaacttatatagcaagcaggctattctaaatatagggttttgcctaatttattgataaatggggttttactttttgtacgaattcaggtcggtggttttgaattggtcgaagtggggtaatttggtgatcatgaactatttttacgatacctaaattttaattttttttaatgggattacttccgacactaatgaccatatacagtttcgaatattgtaaatattttaactctcctctctttatttctgatcctggattaagaatagttcaaaatgaatgcactataattagcgaccccaaaaatcctccagcatagatgtggcgggcgcttcatggattccaaaaaccccatcgcaaatgtacacgcctaatttttgtcataaaaatattaaacttggaaaatttgtttttttgttacttttctttttttcaaaggcccaagatgagaatcggaagctgaaaaatgaacaaaagaaaatggaggagaaggtggacaaattggaggagcaattgaaaaaaaaatggaggcggtgggatcaatcacttgcaaaaattcaaaaataaaatttttgccacaatattttaatgctttagaataacacttttttataataaaaaaatcctttaatttcagcaaaaggcattccaaaaagaatttaagaaaatggtcatggaacgaattgtaacagttcaaacgaaggttgaagcaatggaaaaggaacatcaacagcaaaatggtaatggaacttatttgttagcaacgattactgtacctgccgtaacattattattactacggtcaactatttttaattgagtttgttttaattttagcaacttcggaccaattttcacaaatgcaaaatgatcaaaagattctattggaaaaaatcagtgaattggagaaagaacagaagcagagaaaggtgaattgggggtaaaaatatttattttataataatatcgttaattgggtcttaaacattttattttaaataattttatatgaattattttaaggcacttttaaattttcggcgaaattattgggatgccaatatttgtcatgagaatctccaaatcattggcaacaaaagtctaactgtgcatttataagggaaattattcaggcattttttatatcaatttactacatgatttcacctaaaaaggtttataaaattccgtctttgctgaacatccgattctgctgaaccaggattcattaaacattttttactatgaaatttcagtcaaaaaattggttaggtataaattttttcaatatcaaattatcataataaatataaaattaaattttgttaaaattgttattcctttattattaattttatttttcagtttgttcaactttggattcgcaatcaaacaacagacaaaattggatggactaatttatga

SEQ ID NO: 81115 - DNA, 70 bp, Heterodera glycines
attattttcatcttcgcattggttagcatcgattgacacattttaatttgaataaagcttggtttggatt

SEQ ID NO: 81116 - DNA, 1063 bp, Heterodera glycines
atggacaaaacgccaaaaaagcaaaaaacagagtgccaaaaaggcaaaaaagacaatgaccatcaaagggatggaagcgaattcggtggagcagctgaaaagcataatacggaagagaacagcggacggacaaagggagcggaggaggggacgaagtgccaaaacagcactgatggaaaacattgccaagctgcgcaggatccaacacttcttcgagatggtcgaacactgcaaccgccacttgggccgaatgggcgaggccaactcagagtgagtccgacgccgatcaaatcgatctacagatgctttcactttcccctgctgttcagttttatctcccaattgcctgctaatggtgccggtgatccatcggctgatctctcagtccaatcagttcgctttttgtcccatccctcccaattggactctctggcggatgaattgcagcgcatcctccacaatttcaccttccaatctttgcccatcctttctccacgtattctctcacttctccccgaggccaaaacggcggacgacggaccaaaactgttgtcgccgacgctgttcagctttcacaacgagggcattttctcattgccctctctttttggggtgggcaaagataattaggctaattgatcaatcagcaattccctatcaaatcgaatttaaagattttaataattgtcatgaatgctgagctaacacacaaatcttgtccattcagttgatctctacaaatgagtccgatttggttgagcttttggatttgatcatggatttggccggtgcctcgcgagtgttggacaaaatcgaggctcaaattgcccctcgacagtccattgttgagaaagagctttacccgaatgttttaaaactcgaaaagatggaacggaaatggcaaatggtcagcaaaacgttttcggaagaacaaaaaaggcatttgagagagtttgggtacactctgatgagggacagccaattccgaagtttatacggacgtacgaagaaaggtgaaacaaaaagggagaaccttttgggaaggaaatccgaacagatttaa

SEQ ID NO: 81117 - DNA, 1515 bp, Heterodera glycines
atgccactcatcagacggaaaatcaatgctgcggtgaaaaagtaaattcaataataccgtatcactaggtttggtacggtcattcaagaaacgatttaagtgccaatatatgtcaaaatgttcaaattcaagatggcctacacgatgaaactgaatgagtcgtgtgcaattcttggcaaaaagttcgattgttcatttgcgtggcttttggagcggtacaaactgtcggacaaatacgcaatcaaagcgaacaatcaggtaaaatacacaattaaattttaataattcatcaaaataataaaaatacttctctttaattgtaatatttatttaatttaataatccatttcaacagttatcatttctaataacttttttcttttcattttcaattactattccattttgagtgttttgtgcaaaaacctttctttttatttttcattaattattgcaaatgcaattagtaataaaacgaatcattcattttttaatatttaataattaagaaaaattataaaaataattttatttgtaaaaattcaggtcaaattccccggacatccaaaatgtgtctttttgacagccgccagtgccaattatttcccatctcttcggatgctaatcgcgaacataaaagagcattttggatgcaaccaaaaaataattgcttacgatttgggaaatgtgacgaaaaacagcgaatgggtaaaagaaattttaattaattttatatttttttataaggtaattttttattcataaattatgcaaaaaaattaattgaagattaattttaattggtttgaagatggctgagttgaattcggtgtgcaatttggaattgcgaaacttcgatttttcccaaatggttgctggccgagtgcgccacataaaaagtttcgcatggaaaatttttgtcatggcggtaattttaaaagaaaactgcaaagtttctaacaaatattttaggatgttttgttggaatatgacactgtcatttgggtggacacgtcaattttctttggcagtgacaatttggcaacaattttgaagccgcttcaaaatgggaaaattggcccagtccaattaatgagcagtaagtttaaatggacaatttttaattgtttattttttgaaaaattgttttttaagatactggtcacggcaaaaacattgcgacgcacccgggtaattattaaaattattttaagttcaaaagcataactaatcacaatttgccagggatgtaccaatatttgccaatggcggcaaattttttgcccaacaaaacatacggattgttagggaatgatccgcaacaattcgaggccggctttgttattctgcagaaaatggaacagacgcggcaactgatgaaatggcataatttaaattactaatttaaaaaaatgaaaatgccattattataaaaatgaattttaccccgagtcggtgccgggattggtcggggtttaaagctgcgggtgtccctgttctgcttttcaaattaaa

SEQ ID NO: 81118 - DNA, 539 bp, Heterodera glycines
  unsure (1)..(539): unsure at all n locations
atgacatttcgagtcgataaaaagtgagatcctacgaattaaaaatgccaactatgaatttttaattatgtctatttttgcatatctcacgcgaaaggacattgtgcgcctgtacaacagggctggacgtaactggattttcaattacggaatacgtcattcgtaattacgtccagccctgctttacaagtgcttccatcagttggactcgcggcgcatggggctgacaaatatgcaatgtgcggacaaacccaaacggtagataggtacaatgtttcttaataatattctttaaaattttttactcgtttaattttcaatttattaaattttataatcttgatattattcgatatccctaagtgttttttatttaatggcctgcaactgggcatcttaaacaaaatatataaattccaaatatacggaaattttanacaattatcattacgcttgcgtaaaaattaaatcctaaataatagtaaattncgaaatgttttacttttacattaccgattgatcgttatagaaaactctaa

SEQ ID NO: 81119 - DNA, 1595 bp, Heterodera glycines
atgtcttcagaaattctgtacgtttagagtgtttctgttcttttttctgattttccaaatttcttttgctcaatttttgaccagcagaattgggagaaaaaaaaattcaaaaccaattttcaaggcttagagagcttcatctacctcaaaaaagatttttaaaaaaagctaaaattcacttttggattccctcgctttgcttttccctttcattcattcatttacccaatttatttttcagttggcgtgccgtgcttctgctgttggttgattgtgccagcattctttggttctttttggaccatgtcaaaaaacgacgacgccctcgcaaagaaatgtaaaaaattattttaaaaaatttgagaattttataaaatctttaatttttcagctttatctctgccgattgttggcttttggtgttcgatttccttgcgccttctcaacttggccttggaattgcacttatcagccgtcgatttgacctcagagtggacgaacatttcaaaacgcgcaaatggaaattgaacaaacaattgctaattcactcgaaaatcgtaggaaatggcaccaagcaaatgcaaattgtcaattccgatggaaatccattgccaatcccgcgaaatccgttgccgaaaaaagtcatcggattcaccggatgcattcagatcatgtaaaaatagatgaaattggaatttgattcgtgtgaccatcatattttctgcacttttcagttacatcgatcaaaatgttgtcgcatttctccaccgttttcgccgtcttttgggcatttgtggaatctatttggacattagcacgggcaatgatcgcattttggactactttttgctccaaatttggccaatgttccgcgattccatgcatctgatgcttttggacaccatcacttttcgccgtttccgtcaattggccccgtcaatgctcagcaattgtctgtctcttcgctatgtcgtttttaatgacgaaattgtgctcgcttttccgcccgatgacagtgccatggcgtcggatggccaagcggtggccaaatggttgtacacgcctcttccgaacggggtgccgaagtggctcaaatgctatgttaaatcatcggtggatcaatggtcgtcaacgatggaacagctgaaaaaggtggattatccccccccccctttttaatggctttttccatatatgtttttattcggcccatttttaggcattttccaatgcttcttcgccagtgactttccgcattcgcttgaaatcttcaactgtaattgactccgttgttccatttgatcggatcaacgaagtgactggggagcaattgacacttgaacaatatgcaaatggtttttggctcagccgttgtccaattgaatgggatgagaggaactggcacaatgtgcagcatgaactgcttaatccgccgaatccaattcactttctgatcagagacggcggatttgatgacgggtgaacaattttattatttttgtttgtttccaattagacgttgagtccaactaactataattacggtttattttgatttgatttgagaaaattatggtacgaaaaaaattattaaa

SEQ ID NO: 81120 - DNA, 961 bp, Heterodera glycines
  unsure (1)..(961): unsure at all n locations
atggccttcgttgagttgggcgtgcgccttttcctctgcggcgatgtgatggccggcagaggcgtcgatcagatccttccccacccatcggagtcgcatttgtacgagggatttgtgaacgatgccaacgattacgtgcggttggccgaacgccactcggggccaatgccacaaaagtgggcattctaaagctaatggatgaaaattaagcgaccgttcgatgagttaacgatcaaaagactgaattgcaattgctaatgactaaatatgcggacatcttagtgaatttctgttcttccgttgcagaagggacttcgactacccctggggcgatgccttgccaattttggacgaatggaagccgctcgtccgaatcatcaatttggagacatcagtgaccaccagcgaagacaagtgattgattttgagtgttcttcgtccattgcccttttttgctttgtcagttggccccgcaaaggcattaattaccgaatgcatccggacaatgtgccctttttgaccagtgctcgcatcgattgctgcgtgttggccaataaccacgtgctcgactggggccacaaaggtgggcgcgagtcggtcgtggaattattggcattttcttgtttttatttgactgtcatccatttaaaatccctcaggtcttgccgaaactgtttccgttctgcgccaagtcggcattcgaactgtcggcgccggacgcaatgaattggagacggacgcgcccgcagcgattgaaattgggcaagggcgacgcgtgttggtgttcgcctggggcgacgacagcagcggtgtgccttcgtcgtgggcggccgctgggactcgcggaggggtcaactttctacacgacggaatttcgacaaaaagtgcggaagaaatcgcacgaaaaattggaaaagtaagggcgaaaaggngacggaggagaagccatttaccaaataaa

SEQ ID NO: 81121 - DNA, 123 bp, Heterodera glycines
atgagaatgtcattttttaaacaattctacgagacaaatactggcctcctatcagttagacaaaatatgaacgtttgttgtccaattgagagcgctttcggaaatgataattgcttgaaccag

SEQ ID NO: 81122 - DNA, 799 bp, Heterodera glycines
atgaatgcacgagagattggaaaacaacagaaaatgtacaaagaaaggtgaaaaatttaaaattatttatgaaataatttaaacgattcgaaataataattttataaataattgaattaataattagaaagcaaagttaaaaagaatttttcctttttcaaaatatttgaggtgtattcagttgactttaatttcatttttttcagtctgtcaaagttcgcatttgagccaatttgcccaattatttgcgatggcaccgatggaaaagagaaagaaaaaaaggaaacgaaagaaacggaaaaagaggaaaaagaagaaaaaagagagaaaaagaatgaacaatcggaggagaagcagaaaaattcaaccgaaaggcaaaacgaaggacaaaaggaagagacggacagagagaaaaaagcggagaaagaaaaggcaaaaaagggaaaagagaaaaagaaaccccagaggggagggagcaattaaagcaacaaaaaacaatcaaatgacggaatccattttctgggacaagcgagcgacctaagaatttttcatgaatttgaatcagtgaagagagggaatcccattcactcgctttaccgattgaaatattacatttattcttaacacctatatataagcatgcttatgttgatgtgaagtaagaagtgtttttttgacaaatgccaatggttcaggacgtggaaaagcaaagaattgccaaaattttttggacactttgatggaggcactggcgggaatggaaaatggcaaaaattcaatcaaattgccgaagaaagta

SEQ ID NO: 81123 - DNA, 1366 bp, Heterodera glycines
atgacttggcccaactttttgctgcccgtctttctctcctccgttttaatgtgcgcatgttgggccgtcggccatttccaattgtccttcctttggattgtcctcttcaccgttctttatgtggtcggttttgtcgtttttcgtctcgtcacttttttccccacttattttgccccgacggattttcccttttttcgttttgtttttgacttatttattttgaaagaatcgattttcgcgtgctgctgcaaatatttcccctcgcattttcccctctgtcactaattaatattgatgcgatttttaggttttaactaaattttttgctcaattgatttgaagaaaggagctaaaaaaacgcatttctgcattaaaaattttcgattctgatgtcactatcggtcactagaaatcgctattttgggggtcggggccattttggcgcagacaagtttaaagattcataacttcgaccaaataaaataatgttgatattaatcaataggtctaaatgttccttattagtctgcaaaatttcaaaaaattatattgggttttaaaaaagatatggcgcgctgcgccaaaatggccaggaaaatgcaattttttgaggttttttggccataacttttttgtttctcagctaaattttttgaaactttgcaggttaataggcactatcagtagttaaccccccgggaccgtaacaagcttggttgaccatccctttgaagcatgcgccgcggtgggaggggtggggctaattaaaatattaattgaggtaattaattagtgaaggcagattggggacagtaagtagatagttttagtggaggcagagtgagagaggaggcatcgatttgaaaatagtgtttgaactattgatgagttaagtattgatcgctctgttattgctgagattttgacttgcagtgctatttaattaaccattggacagtggagatgaatgaatggcaaatcagcataacatagaagaaatttttagtcaatcccaaagagtctgttctaattttttgtcattattaattttattatagctcttatcgtaaggagattgttcaaattttcttgctaattggactaggtctcagattacgaggtgtatgggtgcttctcactcaaattgttatccctattgagatctggagtagaattattaatatcaagcatagaatggcaactcatacataattttacagtataaactaagccaatgcccaaggaagcataatcctaggccaaagctttagccattaccaccacaatcgaaagcttgcaatcaatgtttaaaaagggtgttggtttgtttcagttttataaaatcaatattttattattattacta

SEQ ID NO: 81124 - DNA, 4292 bp, Heterodera glycines
atggaaagccactcaactaaacactcttctaactcccctattgaccatattctccccaaaaagccacgacaagggatcgttcaacaaggagaaggagggacagaatcttcaaaaagagatgcagaagcttacgtgaagaagttatacagctccattgaacatgtggtcaaataccattacgccaaagtcaaatcgcagttcagcattgaggatgtccccgctgatcccgagggtcttttggttggaatatttcaatattgcatagataacggaataaaggatagccgtgagcgtgggattgagcctactcatgttggatgtgtgataagcagctctctgttggatggtggagacatcccaattcccttacggaaaatcaacgacaacacaataaactccatccttaatctgtttctcaaggtggcacaaagtaaacaacagcaaaaagttacgctatggggtgagcctttcatggtgactataacaacagttgatcgttatgggcttccatctaaacgacatgtcaaagggggccaacgacggaagctcgcgactgtgcgacatcaaattaacgatcaatgcttgataaaaataagtaatccagatgacttaaactactgtttgttttacgctctccaagcaacaatggttgctaaaacgcgaggatggccccgaatgaagtttcaccgctatttgaataacaaacacggacaaaagggacaacttcaatgtgacacggttcaactcatgcaacaaattgaagccccaatgaatttggagggttatgatgcagagactttcgttccacgtgttgtgaatcattggaaccaggcacaacagcagcatcgttttgcagtgttcatcttcggctcttcgggacagtacaaaccactctacaaatacattgacaacagctacgatacaccactcctcttgtactacagcaataaccattttgatggtgtccagaagcagggtggattgttcgggaaaccatattgcttggagtgtgaacgaccatatgataaagcatcggaacacagcaaatcttgtaaagcccgctgcgtgttgtgctcaaggatgggtcctgaatttccatgttcttcgactcccggattctataaggaatgctccggctgttataaaagattccgaaacaacgattgttaccattaccatcttcattcaaacttctgcatgcggtcaaagaagtgcaaaaactgtggtgttatctgggacgttttggacaacaacaagaaagggagaaaaggacatcaatgtggcgaaaacttctgtcgtctttgcaataattatcacaacaccgaaagaggctgctttattcaaccgtttgagcctaaacaacagaacgttccctatcgcatcgttgcgttcgacctggaaacgatgcagcaccaagcgatggacccccgtcagccagagaagaaacaacatcagcctaacttcatcgcagcgagagttgcgtgccccgattgcatagacaatggcaaaagaaataaggcgacagcggtctgccagatctgcggaccatatcgtaccgtcgccttctgccaacgccgattcatggacacacaagtgaataaacaagtggtgacagagaacccactgaaggcatttgtggactggctagtctttcaacttccaaagaaatacgacacctatgcctattcacattttggaggacgcttcgatatggtgcttgtcttccgcgagctcttccggattggctttaacccaaacatgctaagaaaaggaaacaagctttatgagatgaaggtgcaccagaagaaaaatagtaaccccaacataatttttcgcgactcgtataatttgatgccctgctcattgggtgagcttataccatcatacggtttggatgtcgacgacaagccgttcttcccacatttggctaacagacccgaaaactatggccgtgagatatttccaactcccaatgactacttggctagcggaatgatgccagagaagagaaaaaagtttgatgaatggtacgccgagcaccgccacgagccatttcttttggatgaagcgctagcaagctattgtaccaacgacgttgaaattttaatggcagctctggtggcatttcgacgcgaattcttcgaagtgtcacgaagaaatgaaggaattgtcgcgaaacgcgctgcttcagatgagcatcacaatggtatcgacgttctgagagagtgtatgacaattgctggagcctgtatgcgtcacttccgcatgaatcatcttccttccgggcacttggcaattgttccagaacggggatatgacaatgcacaaaatcaaagcgagctctctcggcgtttcttacattggtacatggaacaacacaaagtccaagtgcgaatggccaactcacctggcggagagaaaagaattggacaatactttgtcgatggatgggtggaggcagagagaagagcaatcgaagtaaatggatgtgtatggcatgcatgcacagcttgttatcccgacgatgagatgctgatgccaaacggaaagacagccggagcagtgagggagcgcaatgtcaaaaggatggaattcatacggaaccaagttgacaaattggatgtgtattgggaatgcgagattgagcgcatgttggcgaaagataaacaaatgaagatgagatttgaagaatacccagatgatggaccgctgagaattcgcgacgcttttatgggaggaagaacgggaccattgaaactacttcataatgtgggcgcggatgaaaaaatttcttactttgacttcacttctctctacccttacatcaactgcactactcgttacccggtgggtcatcccaaagtgcacgtgctcaattttgaagtggagtggagaagtgccgcggacaacccatacccattggcgctgctcaaagtgtgggtcgtgccgccacgacaaatcgatgtgcccgttctaccggtgaaagtggatgaccgactgtgctttcctctgtgcatcgcctgtgccaaagaatatccaactggaggcgtggacaacgactaccactgtcagcacactgatcaacaacgcggatgggtcagcacctgcacatcgattgagctcaacgtcgcgctcgacgagggttaccgcgtcacgagggtgttccgcgttctggagtacgaacagagcgacgacaagctattccgcccctacattgcggaattcatggctcaaaaaatccaggctagcggctttgacagcagcatcagagggaatgcggagaaggaacaacagtttgtccgagagtgtgccgaacagttcgacatcacgatcgatccaacaaaaatggccgccaataagggaaagcgatcgatagcaaagctttgtcttaacaatttgtggggccgattttctttgcgcaattacggcttgtcgcaaacattaataacggatgacccagctgttctaggagactttttggataatcgctcaatcgacgtcatgactatagatgaactcgaagaagaacatattttgatcacctacgaaaaaaagaaggagtgggtgactgagcatggatgctcaaatattgttatttcgttgtggacaacttcggctgcgcgtttattgttgctcaaggctatgcagaaagtagtgagatcgtggggatgtcaacttctctacaccgacaccgacagtcttgttttatcacatccacttgatttttgccctctcaagacgggacaacaccttggcgaattcaccgatgagtaccccgaccatgaaatacgtgagttctgcagtggtggagccaaacaatatggattagtgcttcggcgcaaaaacacttcatctgatgcagaattggaatatgtactgaaagtccgaggaatgacgctgaattacgacgtcattaacaatcaaggtctccgctatgagacgttcaaacaacaggtgatgcgttatgcgagaactggagagattgagcagataaggatcgaatacccaaactttcttcaaccaaatattcgaagtggtggatcagtgacatcgactcaaatgcaaaaatgttaccgtccatatgttgggaagggaattataggcaacgatttcaatgtgaagaattttggccacactttgtaatgtttttgttttctgatgtatctctctttctcatcaatacaccataaattgtctctctttctctctttgtttctctcacacgtacacacatgtgctcttttatctaaattatgtaatttatcatattttgttattttgtttaatattaa

SEQ ID NO: 81125 - DNA, 684 bp, Heterodera glycines
atgattttgtggcatttcttaatttttatatttttcattgcttttgaaattgaatccggcataatccgaccaaattttgatgagatattcggcaacgaatgggacaaaaatcaaaatgaagggaaagtgatcagaattgagcaaaatgaacgaaacgagaacttacaatcagcagcagttgatcaaattggtgaagaaatggggacagacccaattgatcaaatgagtgaatattccaatcaaaatgttatgaagaaaagtgatcaaaatacgaaaatgaaaccaaatgatcaacagaaaagagaaacaattcaaagatatgaagcaattaaagaaaagttgaagcaaaaaggaaaattacaaaacaaagacagagtaaaaattgaaaggaaaattggaaaattattaggcgcaagtcgcgacaaaatatataaatggaaaaaaagaaatgaatttaaataaaaaacaaattaaaatattgaaaagaagttttatgaacagaaaaagaaagaattcaatgaacgatttgatgaatttaaaagtttatatggccaaggcaaacagaaagcatttgtgaaggaattgggcattgataaaaagacatttataaattggaaaaaggaattgctgccaaattatcataaaactaagagattttttaaaaaataaaggaatattttgaaa

SEQ ID NO: 81126 - DNA, 208 bp, Heterodera glycines
atgcgcaagggcgaggcgatgaccatgtcatgcgtgtcggggtgagtaattaggagaatttaattgaataattcaaacatttcacagtgtttcttcgcccgcttcggtggtcacttggcaattgaacggttcgccaacaaaaattcaaccgcaggagcaaaaaaagcaattgcaggtgtctgacatttacaaatatttgtggatataa

SEQ ID NO: 81127 - DNA, 282 bp, Heterodera glycines
atggaaaacacgtggggattcccaaatttcatttcttttgcggtgagtaattaattataatttaaataaatgcattttgaatttaattttaagcatttgatggacccggacaaaggcttttacaacaaagaagaggacaaaattgctttggccattgatttaacagtgacagaagaaaaaacggaaaacccataaacaatcgagaaattttcggaatgaaaccacttttacgtactctattttatctttttggcacaaattcagatttttgtacatattaaa

SEQ ID NO: 81128 - DNA, 903 bp, Heterodera glycines
atggccaccgtttggagcaaattcgcttctcagctcagtaagtgcctttccttctctcttctgttggcttttatttttgtttttttgccatcacttttcgcccttttcaccttttaaaggttcttggctgtcggaaatgccttcggaaaagcgaaggggtcgcgccgagacgaggccaaacggtggggacggagttgcgggggtgcgcaattcgcggtcacttagcgcactcagccgacggcacaatttggtcagaacgtcaaaaagctcggagaatttgcaccgaatcagcctattgtcgacagcgacgacaattggcaatggacaacagagacaaaaggtcgaaaaatggaaggaaaatgaacgaaaatgagaaccaatggacagcgcaaatcatcaaaagataacaatttgtgtttcagccatttttggcacaattcggactcaatgggccaaatgcccattccgaggaggggtcggtgccgtgccaaaacagccgaaagggatcggtcgaaggccaccaaagtccattaacaccggcaaggacgaagacgaggcgatttccattttttggcaaagaaaacgaaacgacggcagcgccggggggagagggcgaaagcggatattcaagcggaagttcgtcgagaaggtgtgcctagtccaaattatgctctgatttgccaataatcactattaccctcctattttctcctctgactgtttcctcaccaatccatactaattgactccccaccatccaattatcgtcctctctattaactaattgcttcaggaaaaagtccaacggtcgcttcgttccttgcgcttcgtcttcctcggcatttttcctcaatttaaacgcgcggcacaaaagcaatgagcggcaaaggcaacaaaattcaa

SEQ ID NO: 81129 - DNA, 2321 bp, Heterodera glycines
atggcactcaaatcaatcaacagtgcttctcttataaagataaaagtcctgctgaacggaaggatcgtgaagtttattctcgactccggggcagagatcaatgtcatcgatgaggaaacttatcgactgatcggacagccaaaaatttgggaatgtgccgaaagaggcagaatgttcgacgggacagaaaaatcttttatcggaaagggagaaggacacttcgaattccaaggcgtaaaagttaaagaaaatttttatgtcgccgagaagggatcgatgaatctgttgagtgtccaaacaatggatgcatttggactgttggatggcattaaagccaaaatcaactctccgataaatctttgcagcgcagggaaagaatcgagaggcaaaaatgccccgatcaaatccaacaaagctgacggcacgccaaataaggacgccgaaaaacaaatcagtcagctaaagcaggagtacaccaatgtctttaaaaatgaattgggactctgcacaaaggtcaaagcgcatttagaattgaaacccgacgcacagccaatatacagaaaggctcgtccggtcccgtacaacgccaaaaatgcagttgacggagaattggatcgttgggagaaaatgggagtcatcggcaaagttgagcacacagaatgggcagcaccgattttggtcgtcaaaaaggccgatggtaacgctcgactgtgcatcgactattcaaccggactcaacaatgcgctaaaagaccaccagcacccgttaccattaccggaagacatttttgccaccttaaatggaggccagtacttttcacaaattgatctccgggatgcgtatcttcaagtggagctggacgaagcatcgaaaaagctgtgtgccattgccacccatagaggaaattatgaagtcaaaagacttccctttggcatcaaaacagctcctggcattttccagtcgataatggaccaaatgttggcagattttgacttcgcgacagcctacctagacgacatcatcatcgtcagcaaggaccaaaaaaaacattctgaacatttgaaaaagatgttctcgcgatttcaagaatggggatttcgcgtcaaacgagaaaaatgttcgtttttccaagatgaaattaaatatctcggacaaataatcgacaaaaacggacgcagacccgaccccagcaaaatcaccgccatcaatgagatgccagaaccgacggatgtctcttcacttcgatcatatttgggaatggtaaaccattaccaacaattcatcaaaaacatgcgcttcgtcagaaagccgcttgatgatttgctaaaaaaggacaccgaatggaattggagcgacaaatgcaaaaaggcatttgacaaaatcaaagaaattttgtcatccaaattgctgctcacgcactatgaccctcaaaaagagatcgtagtagcagcagatgcttctgatcagggaattggagcagtgatttcgcacaaattcccggacggaacgatgaaagccattgcgcatgtatcttccgctttaactcctgccgagaagaactactcacaaattgagaaggaagcactagcaataatttttgcagtgcagaaatttcacaaaatgatctatggacgtaaatttacgctcctaactgatcataagcctcttctcgccatcttcggcaacaaaaaaggagtgcggcaatgcagtgccaatcggctgctccgatggtcactcattctcttggcatacgactttaacattgagtatgtcaataccaacgacttcggccaagctgatgcactttcacggctaattgccaaaggaaaagatgcggaagaccgcgtcatcgcaaatacttcggtcgattcggaggtagaatcgattttcattggaaccgtcgagaagcttcccatcaaattcgatgacattgtccagtcgtcgaaaagtgatcagaacatcaaaaaggtcatgaaattcattagaaatggctggccacaaaatattggcaacgaaaatgtggaaatcagaattttccaccaaaggaaggaacaactcagcatcaccaaagattgtttgatgtatgctgaaagagttgtgattccaacgcaacaccgagccaaaattctgcaactgctccacaaaggacatcctggaatgaaaaggatgaagcagttggctcgtgaatatgcatactggccgaaaatggaccaggaaattgaacaatttgttgaaaattgtcaaccatgccaaaatgaggcaaaggcgccaaccaaaacgaatttgcaatcttggccaagacaaatggaccgtggcagaga

SEQ ID NO: 81130 - DNA, 888 bp, Heterodera glycines
tccgtcttcaacatcgtcgtatgcattgtctcttacgccattcccttcgccggctttctttattggtactcttccgtccctttttttctgtggcgaaaaaaggagcatctgatggcgagtcagcagagcagcagcaccacagggacatcgagaaggtgagagagcggcaagagaagcaaagaaaagggaaagaaagacagacggacagacagacagagagagggcaattagcggggcggaaaagcccttccgggtacaattaattgccatttacacaatgggagggcggcaaacggcacgaaactatgcccggggcaatgcttgagacaatgtttcaaatccaattcggaatgaatacgaaagattcgaatatttttcagccaacaatcgtcgaccgctgtcatccgaagggttcgatagatttgtttttgcctttcccttcgatcgctcaaaagtcaagtcacccttcttaaggttgtgctcacagttttggtgttggctttggtttatttggtctgttggacgccctattgggtgggcattttcggccgacgactgctcaatttgcggctgagtccaaagcaaagtgtgtgttgggtgccgttttgctcactttaaaatgccaatgcaattggccaattgtctctctaattgatcgctcatttggctaatgccattccttttgattttctgctttctcccctcaatcggatccattcactttgtacccctccccagttcaggtgtcatcaccatgtacttcgtccatttgatgccctacgtcagttgcgccgcttaccccgccattttcacgcttctcaatcgaccgatccgttccgcccattcgcattggaaacgctcaatgcaccgacgcattcagcaaagctc

SEQ ID NO: 81131 - DNA, 807 bp, Heterodera glycines
tcctcctccgccggcccttcgctttccgttgccaattttaccctcgtcgaaatggcacttcccctgcggggctttcgtcagtacgtcgctttgacttacctcggctgcaacctcatcggcctgttcgccaattcgtgggtccttttcgtggtcggccccctcctgtggctgcacaatgtccgcgtcccaaaatccattcttttccacattttggcactttgcgtgtccgatttggccacaatgtgtggtcagtttctttctccccatgtgtcaattcggcatcaaattgctgctttttgcctttctttcagcgatggttttgctcaatttggaaattttctgcggcacttggcgcctcggctcgatggcatgcactgcctatttgctgttcgattccatgaacaaattctctgctcctattatcggtagatcgatcgatcggatgttaaatgatagccggggggcataaattgttgcgaccttcggactaattgctttaatgaatcctttgtcggcttaaaatgttcttccccccccccctcttcagtgttgctaatctctcgcacctgttactccactgtttgcttagacaaacgtcggcagcaaagcgcggcgagtttaaaggtcacacaaaatgccaaagggcgaagaaaacatccggaggattatgacgacaattcattcaaaaagtgatttgacaattcgaattttgcttttcccctcagatggcctttctccatgtttctgtctctctctgtttggtgctcgtcctcctttggccacttttcgcttattctgaggtcacca

SEQ ID NO: 81132 - DNA, 292 bp, Heterodera glycines
atggggagaaagaaactgaccacacattgtggccaaatcggacacgcaaagtgccaaaatgtggaaaagaatggattttgggacgcggacattgtgcagccacaggagggggccgaccacgaaaaggacccacgaattggcgaacaggccgatgaggttgcagccgaggtaagtcaaagcgacgtactgacgaaagccccgcaggggaagtgccatttcgacgagggtaaaattggcaacggaaagcgaagggccggcggaggaggagtccaagccgaacttcatcattggg

SEQ ID NO: 81133 - DNA, 662 bp, Heterodera glycines
atggagtccgcttcggttgcgagttcggaagtgttcgaacaaaatggaaatggtaggaaaaatatttttattttccagaagaaagaaggggacaaagtccataatttatgaaaattttaattagaatctttaattttttcaaatttaatatataaataaaaaaaatttttccattaatatatttttaaatatcatttaaatcgacagaacaacacgggatggtttacaaaagtgatgactgttgcaatattggaaataatttaaattaaattaaatttgaaaaatacagcagaaaaattgttgggatggcaccgcttgccccagtgaattggaaatcattggtgccaaacgtttgatggtccaatacaaagggaatcgcttaatatgtgtggtaattagcaaaaattaacaatgaatttaaacatttaatttatagaaattttaataacaaaaattaaatattttaattgaaggaagtcactcaatgttcacaaaacgctgcattctgagcacaagttcgtccatttcttacgtcgaagaaatgcatcagtatgaaaatgtaaattatggacaaaaataaaaatatttttctaattattatattaatttttaagtgctcaacgattggacttgcgatcaaagaaatgccattgtacggaagg

SEQ ID NO: 81134 - DNA, 887 bp, Heterodera glycines
atgccgtgcccgggggtgggggaaatggtggcaacttttgggtgtgtggccggccaactctcccaacagggttggccaacttctgctgctgctggggccacacgaattcgcatagacaaaataatgcaaaaatgcaggtgggatatatgaggataaaaattaaattttaagagttgaaaatataaatagcaaaaaaaaaaaaggtttttactgggacaaaatgtgcctaataaaaattatttacattgaaaaattatttacattataatatgtaattaatagagggagctgttctaattagagatcggaccggtttcggtttttaaccgaaaaaatcgactgagaaatttttgagtttttcggtttcggtttttttcggtttttaaaccgaaaccgattgaccgaatttatcaaaaaaccgaaacaaccgatcgacttttttaatgcgatttgttaacagattttgtccaacatgaccaaatttttgcaattttgagccatttttttaagaaaattaaggatttttagttttggtaaacttatatttttataaattttgggtcatttgttgttcaattccgtttcatatgcgtgttccagtgggttgtgctcttggttctgtttctaatttttgcttgattttctcctaatttgtaaaaattattccttttttcgatggggattcaatcacaattttataattaaaaccatataaaatattgtcaattttggactaaatctgtcaacaaagcgcactaaaaatttcaaaatttttcccggcggcgcccaaaacgcattttgtctttaaaacagaagaagcaaaaaaattcctttacatctcccaaaaattcaatataaatattaaagagcatttttctgttaataaa

SEQ ID NO: 81135 - DNA, 339 bp, Heterodera glycines
atggcgttggcgaagaagaaccgcgtggtaaaggcggccgaagaagttgacctgaacgtgtccatcgcctcgtcgttcttcgaacgcgggttcgaaccctcgcgtctcgtcacttccacgccacggcccagccaacagcgggaggagacaccgcaggaaggtgaatcaattcaatgagaatacattttgtgatttgacatggtggaattggtcttttcagcaagaagcatcgaagacgtgacggaagcagactttgacagtccgtgaatgtgttttgtgccgaaaatgttcattttgttgggatttgcttttcattttatcacattgtaatatatttaa

SEQ ID NO: 81136 - DNA, 526 bp, Heterodera glycines
tcttcggcttatctgatcaaccagcccaaatacgcattccttgccgaattgggcatccaacagcaaaacgatggagtatttgacggcacatggaatgcgtcggggaaggaagtcgactcattgtgtccggcgacgaacacaccaattgcgaaagtgcgatttggaacggcggaggtgcccaaacattcaatcccacttgaataagcacgccccttttaggattatgaacgtgtgatcgaagcatcgcgtgccgccagtgccatttggatggaaatgccggcgccaactcggggcgaaattgtgcgccaaattggcgattctcttcgcaaaaacattgacaatttgggcaaattggttggttttccgtacccttcctaaatttcaatccttttttcttccttttccatgcgtttattatgcgtttcttttgaggtttcactcgaaatgggcaaaattttgtcagaaggccgtggcgaagtgcaggagtttgttgacatcgccgattacgcaactggtctttcccgta

SEQ ID NO: 81137 - DNA, 738 bp, Heterodera glycines
atggttctccgcccattctcttcgcatttctccttccccagtgatcagtcagtcagtagtgatggaacagacttcaatgattattccgatttgaacgaatgaataaatacatcttaacagtcaatgagtcgtttgggggttcggggcttggtcaaaggcgccttggcctttccccattccctcccaaactccatccgggataaacggtgcatagttggtctgggggcacagtgcgcatccctcactatgtccactattcaattgtccggttctgtccaaccaaatgtcctggagcccaataataataactggaatagtttatggatcattttcagatgtttttcctcatccgtgcaacgaaattttcaattcaacaccgaaatttggtcctccttttcatgataacaatggctcaacagcagaaagcgcatttcacgacttttatggaaagcgtagttttgggaataatatatgcaaatgacagtgtcaaaacggcggagacacagagatgaaatatttttgtgtttaatttttttttttctatttttttgacctaaatttatatatcgtggaatttgccataaattggaatttcactaattttttttttgtgacacaatatgtttaaaaggaagaatacggagtttctgatagttggatttaaaaaaacggcattttggacaccgaaggaaaactggacaccaaattcctaaaataagccaggaattaggttgaaaa

SEQ ID NO: 81138 - DNA, 1325 bp, Heterodera glycines
atgggactcaaatctccggcattccaaacactgggattcaacccaccaactttcaatgacattccaatcgctgggactcaacccaccagcatttcaatctctgagactcaatctccggcattccaaacactgggactcaacccaccaactttcaatgacattccaatctctgggactcaatctccggcattccaaacaatgggactcaaatctccggcattccaaacactgggattcaacccaccaactttcaatgacattccaatcgctgggactcaacccaccagcatttcaatctctcggactcaatctccggcattccaaacactgggactcaacccaccaacatttcaatcaatgggactcaacccaacagcattctaatcactgggactcaacccaccagtcggactcataacaaacgaaaatatcactgtatctctctctatatgccagtgatcactgatcagctgacaaataattaggtattaagaaaataacgtaagcataaaacgggaaaaagcgtatggtttgaaaggcaccgacgcataaaaaagaaagaatttatttgataaaagctcgaatgacacattatgcatattttacaggattatgaatgcatatgaaattgaaatcacaaattaaaatgcaagagatttagataaaaagttaaggcaagaaaaaaagaaatgaactcgttatgatgggattggatgggggagatttgtgttaatgatttagagataacgaagcaaaatggacaggaagttctgaactcgtcgatttaaatggcaatctttcaatttcctttccaatttttttggtgtttttctcttttgttccttccgtccgtccgtctcatttcttcttcttcagtttgatgttggagatgcgttcgcccacgtcgttgaagaaattgcccacgtcgtccaccactttgtccaatccgtgcttcttggccagtcggcccaccttctctttgaccatctcccacaagtgtttgacgtactcgcgcaactcgcgactgcgtcggttcgccacgcattcgaagtcgcaatccttcgaaattcgaatggctttttgtggccaaatctgtcctcgaaattacctcatttggctgtgtgtccgtcggcagtttggcccggtcggcctccaattgttcgggagtctttccgcaatcgctcatcaccatcaatgtccggtaatggtcgagcgtggaacagtcgaatgttcattcccttcgacgtcaacggccttaacggaaaaactgcggagttctgatggaatattaccaattaaaattgaaactgtcatcaaatttaata

SEQ ID NO: 81139 - DNA, 949 bp, Heterodera glycines
aggccatccattgtcacaatcgtcccgatcggcactttgtccaattgcccccgtcgcgtctccgcggtttcactgtgctcgcgctcacccgcaataacatcgatgtgctgcccagcgaagaagtactgctcgagaaactgcccgacctgaaggctttcctttaaattttattttattattaaatttgatgacagtttcaattttaattggtaatattccatcagaactccgcagtttttccgttaaggccgttgacgtcgaagggaatgaacattcgactgttccacgctcgaccattaccggacattgatggtgatgagcgattgcggaaagactcccgaacaattggaggccgaccgggccaaactgccgacggacacacagccaaatgaggtaatttcgaggacagatttggccacaaaaagccattcgaatttcgaaggattgcgacttcgaatgcgtggcgaaccgacgcagtcgcgagttgcgcgagtacgtcaaacacttgtgggagatggtcaaagagaaggtgggccgactggccaagaagcacggattggacaaagtggtggacgacgtgggcaatttcttcaacgacgtgggcgaacgcatctccaacatcaaactgaagaagaagaaatgagacggacggacggaaggaacaaaagagaaaaacaccaaaaaaattggaaaggaaattgaaagattgccatttaaatcgacgagttcagaacttcctgtccattttgcttcgttatctctaaatcattaacacaaatctcccccatccaatcccatcataacgagttcatttctttttttcttgccttaactttttatctaaatctcttgcattttaatttgtgatttcaatttcatatgcattcataatcctgtaaaatatgcataatgtgtcattcgagcttttatcaaataaattctttctttt

SEQ ID NO: 81140 - DNA, 1091 bp, Heterodera glycines
ttcatgttgtggttatcgaacgcatgagaaatgcattgacaaagtgcggcgcgtttgtccgagtttggccctggcgagaacggaattctctctccaattcgatttgtgccccgagaaatcgctgcttgaacaaaattatcagtgcgccgaatgtttttcgcccatcggattcggtaataattattttttggcacgttccttgagatacgttttgggattataaattttcaaatgccgcattttgtcaaaattttgttgaatttttccgttttgatttaagacgacgactctgaaaaactgcctcggatttgcgatttcaccggccttttctgttgtcggcgctgtcattggaacgacgaaatgattgttcctgcgagaattgtcaagaattgggacttcgaggcgtgcaattttgctgggttttgtaagaaattgaaatttgctcattaagaaaagagccgtgtgccgagcgacaaaacaaatgttaaccaccgcaatgaaacggccactgataaacttcgaaaaggagaacccgacactgttcaaatttgtacacaaattggacaaaatccaaaagatgcggacaaatattatgctgatgaagtgctattttgtatatgcaaggtaaaaaagggggaaaataaaaaaatatggaaagaaaaagttatggctttttcagttgcaaatttattttcattttttcgctttcagtttgcccgcaaaatgcgtattctccagcatttgagtcgtttccaacactttgtggagaatgacacaatgttcaccatggacgaccttctccaactcgccaatggccgcttattggcggacatcgaagcaattgtcaggattttcactgcccatatcaccgaagagtgcgaaatatgtcggggaaatgctttcttcttcagcgcatctatccgttcagcgaaaacgcggccatttgcaagagttgctgtgctgtctgtctatcaccgctcgtgctttgaccgtgccagcaaacggtgtccgcgatgtttacgcagaaaggcgagaagaaaagcgggatggaagagaatgagggggacgaggaggaagaagaggacggacaa

SEQ ID NO: 81141 - DNA, 812 bp, Heterodera glycines
atggaccgaagagcctataaaagaaaggacggtcttcgatgttcttcaccttcaccggcctcttcgcttttctctgccgattatcttgaaaaaattttcgacttccctaaggtattggattcaaatgtgatatttgattttgcttttaagccattttttctttatcttttttaaaatttttttgggggtagggagaattacactcattttaagcacaaaaaaagagcgttttccgcttggtttgggttgtctatgatgactttataggtccaagctgctgctgaacgccgcccaacatgtccaatcagtcgcctgccggtccttcgccgtcctcaacaaccaccactgaacaggtagagaatattcaaaattaacaattaaattaaaatattattaaaacggagggcttgctttaactttctttttaaaaaacaaaattaaattagagcaaaaaattaatttaaaaaaacaatttctgattattgcatttttagcgctgaacacgtcaagccggcagctgtcaatggccaaccgcctgcattgaatggcatcgaggtgatttttctttacaaaatttttgatacggtaaccatacccccccccacctcgctggtaaatttttatgaaattattttttttatatgcattttaaaaattatcattttttgtattaataaaataaaataatggaaattaaacaagataaatgtcagaatctactgcaatgcttggaaaatgtggcatttgagctgacggagcatgtgtgccaactccaactgccggatgtgccgtcatcgtcttcggtggaaaag

SEQ ID NO: 81142 - DNA, 297 bp, Heterodera glycines
atgtcaaaagtgtgtgctcgagaaaagtgtgtgggtattgaacgatttttgaatgaacagacagcagagagagagcaacagcagcaggtgttgtgagattataatcataattatgatttattgatattgcctagagctatttaaacagaaccataatttcgaaatgaaaaatttcagatttttagaatggatttttccaaatgtacactaggttccgataaaattaaggatctttatagcgataaaaaaattagataataatattctgctcattattagtttggtcggtgtaataaa

SEQ ID NO: 81143 - DNA, 1374 bp, Heterodera glycines
gcacgtgccagctccctccaagcattatctcctaattttaacattatcggccttctccgaacgggccttgagcaatcggtgccaccaaatgcgcgtgagtgtgccaaaggcattcatttcgccgctttttaatcctttttagacattttatgcactggccgtttgtttatctcagaccactcgtgcccgagactacaaaaatgtgattatttccgagtttgacagcagagaagagcttatccaggtgagttccaagagagggactctgttgggaaaggggaaatgtcccttttgttcccacgggcattgacctttgtccattgcttttcctttaggccatcatttgctcctgcttcatccccttttactgtggactgagtgcgccctgttaccgtggcgagcagtacatcgacgggggcttctcggacaatcagccggccgggcaaattcgaccacggcaccatcacagtcagtccgttcagcggcgagtctgacatttgccccagcgatgacgacagtgccaggtcagacagactgccgtgccatttggttgccccccggcgatcgcttgctttagcatgttcggcttcgacttttacggcacgcccattcaattcaccactcagaatttgttccgaatggtcgtcactctttttccgccttcgcccgaaatttgctcccgaatttgtcgccagcagggctttgaggacactcttcgttttctgaccaaaaattgtaatatttttcaaaatgtttcctcctccaatgactttgccaaggcatggctccgtgtgtgaaatgtttgacggtccaatcgaatgtcatcccagtgacacagcatcagcagcagcaaaaggaggaggaaaagccgatcagaagcagagcaattcgggagaacaaatggcagacggaggaggaaaagcggtggcgaaagacggcgtcagtgagcagaatgagcaatttgtgagaaggggaaaagcaaatgatcaacaaaagtcaattagggacaatttgcaagggaaaggcaacggcgaaatgtaattcaaaattatcgcttaattaccccccacaatcaggcggaatgagtgcaatcgctgctttgaacatgtcgaccgtgccggtccgccccgtttctcctcagttccgttgccgaacaccattcttaaatgtgagactaattgaacacggggcgaaaaatggacaaatttaaattgggccaattaatgtataattattattaattactttttattttagcgctttccgaaatggaagaacgaaattgcacttggatgaattatttgcgtcgccaacgcatcttccgctggtggtaccgtcttctgatccccgttattttgccctgtgaaatggtgc

SEQ ID NO: 81144 - DNA, 204 bp, Heterodera glycines
gtcctattacattgctttttccccattcagatggaacgtgccaagcgctacattgtcgaccaggagaacagaacggagaaggacgcacgtcgcacactgctcaaattggctgaaatgttcgagtcgcccattcccacaacatcgaatgtggcccgtttacgcaaacagtttgacgacgacgacaacgatgctgatgacaattag

SEQ ID NO: 81145 - DNA, 3697 bp, Heterodera glycines
gggatgaatctcagcttaaaacatcgggcagacgagactctcgagggttgctcatcggatcagtgcactctcacgcccctttcctttcatcggccgttctcttcagcacaatttccattctatttatttcctttttattatcgtacttcttctgcacgccgacatttttttttttgatggacggatctttcgaccgaaaacattgcctaaggcgcaacgaatcggcggcagaaaatgcaaatgcgacgcaacggagaagccccggggggaggaagggaagccgagcattggacggtgggcaaattaagggaaatgattaaatgtgttgttttcgtataaatctcacaaaattggggagggaaaggaatttggggattattatttatctgctgtttactgagggggccgtgaatccacgcactctccggcggacaacgcacacacaaacaaaaacacccccccccccccctgcgcacgccccaatttgaaattggagcaattgccgggggcatcgaaaggcgacaacgccccgggcaattttcaaaagcattacagaaagcgaattccgcgctgcgatcaaacacattctcgagacgggtgacatagaaggggaggacgcgaaaggaacgaaggaatacgaacagagacagcagcggaaggaggaggaggagggggagacggactcctccgcatcgtccatgtccagtcacaccgaaacgatgaaaagcagcaggtccaaaactgactgatcgctgctatttgttggcactttccccaccgttggtgccatcctttagcattgattctggcactaatcatttgccatgttaaaactgacaccaatgaatccgattttcgctgattacccatttgctttgcagcaacggctccgattggcctttctgctccgatcggatgaaaatgatgcagaagctggccaaactgaacctgaacgaggcgggccccgcccctccgagcccgtgctcagtgaagacaccgcttgagggcgtatcgacggaggacactttgcaaagactgaggccgaaggaggaccaagcggaacaaagccccacggggacactcgcgacacggacaccgaaggactttttcttcataaaagtgctcggcgaggggtcattttcgacggtgggagaagcaaaagtgggaagtgaagactaagaagagaccgttaaaggtgtattttgcgaaagaagtgaccacgggggacgaatatgcgataaaagtgctgctgaaaagcgaaatccgacgggaggcaaaagtgcgctatgttctccgcgagaaggacattatggccgcgctcacttacgtccacgggggtcacccttttgtcattcgcctttattgcacctttcaagacaacgaccgactttgtgagttgggaggggcaccaattctgatcagtggatcatttcgatcattttggattgacattgatcacaattccctcggcctcgggctgattgtctttttttgcacagactttgccttggcatatgccaaacatggcgagctgttggattggctgcgccggctcggctcattcgacgaagctggcacccttttctacgcttccgaaatcctttgtgctttggaatttctgcaccggtgcaaagtgatccatcgcgatttgaagccggagaacattttggtgggcgccgattggcacattatgctctctgactttggcactgcgaaaataatcgatgagcaaacggacacaatgggtaaggaaggcaccaacaaatattttcccctttttctcgagaacccatcactattaataatttagcttgttcctcctcgtccgcctatgtttctcccatcgaacgtctccccccgggcgaagtgccgggcattgtcccgtcggtggcagtcaaaccgaccaaacgaagcgtgcggagttcctttgtcggcacggcccattacatcaggtgtccgtgtttgttagcttttcctacgctttcttcgtttgtttttcagcccggaagtgctcaagtcggaggatgttgggcccgagtgcgactattgggccctgggcgcgatcattttccaaatgatttctggccagccgtaagtcatttattggctaatcggcagccaatggcccattaacattttgaaggcctttccgcgcggtcaatgagtacaaaatcctgaagaagatcctcagcctggacttccacttcccggatggctttcccgaggtcgcccgtcacctcgtcagccgactgctcgtttataagcccagcgaacgcctcggcagctcccaaaagggaggcattgaagcactgatgaggcactccttttttaaggtaggcaatggacaatgaatgacgaaatcactcaatccgttgtttataaaggacgtcgaatggtcgtctctgttcacccggaaaccgcccgaattgaagccgtacctcccggcaagcagcggagagccggaattctatggggagtacagtccgcagccggcttatgggccaatggactttgagcccggactgaacgaagcggcgttataccggctgatgggcctcggcagtttgggcggaggcggctctgacgaattcagcgaaatcgaattcaatcgggaaggtcggagaaaggagacgggcgggaggggcatatagaacttccatttgaatcaggcatttctcgagattcgccctcctccccttcccaaaagtttattccgttgccccgggcgtcgtttgtttatttggcaataaaaagcagcaaaaacacactgactgtgaaaaatgggcttcattccctctcttattgatcattttgactgctcattctcaagtcagtcttcttttttgcggctttcggtggaaaaaatgcttttggttcgtccaattccaatcgaaatccaagctgcccaattgaagaccgacttggcattgtgccaattcaatcgcacaaatggccaaattccgctcgaattcccatttatttcggccaatttggtcttttttttaactgtgccaaattattttttaacgttgtatatttcaaaaatgttcagacattcgtctcgacgatgcttcttcctccccgtccgttagcttatccgtcgccccatcggttgaacaaagcgaacagaggcgccaaaatcgactggaaaaacaacggagagagaacaaataccaccgatttgtggaggacaatttgatactgaagtcgggactaatcgacaaaaagaagggacttttcgcacggcggagaatggtaaagaaaagaggaaaagccaaaaaagaataagggaaaagcctaagaataggggaaaagccaagagaaataaaattaacgatgagaaagcagccaaaccgatttatcattgagacattttgaatcaaatgacatcattgccattgactcatcccaatgttcgtcaatttcagtttctgctaacagaagggccgcgtttgtattacgtggaccccgtcacaatgcatttgaaaggcgaagtgcccttctcggagcaaatgcgcaccgaagcaaagaatttccgcacatttttcgttcatacggtaatttggttaaagtttcgcatttttaaaaaatatttaagccaaaaagaacgtattatttatttgaccccgaacggcacgccaaagattggtgcgatgcgatcgattgggcacgggagaaatatttgcgcagggatcag

SEQ ID NO: 81146 - DNA, 57 bp, Heterodera glycines
ttatccggggttttaaaggtcgctaatcacgaatctgacatgtattttgactaattt

SEQ ID NO: 81147 - DNA, 812 bp, Heterodera glycines
atgcttcacaatacactgagttgcaaggccaaaatctcagtagacaccataatatctattgaaaaatttctcaatcgagatataactactcgaaattcagcgcagaaaaaaggtgagcacagtttatacataattttctttattgcagtttttgcttcttattatagataagcacatgaataccttagtaacagaattcaattttgttttcgaattaggcaaaaaagagttattcaattgttcaatttttattttggaataattcagatgatcaacgaaagaacctcaacgaatcattgttatattcaccggaagacttgaatgagtacagttttgagacagaggacgaagacgaaagagaaggcgaaggaagcgcaagtgtggaactgctcaattgggtagataaatacgaaccgataaatattgttactataatacaaattaagggtaatttcgctgatgaattcgaagggacaaattttgagatggtacggaaacgatggctacgcaaatcgctgatctccatgagcatgaacatggacattctggtgatttgcactgcgcaaaagttcgtgatattggaatgctccaaacggccaaccgatgggttaaattcgatggaaatggctgcgagggttgagattgaacgtgtcgatgaccggtctttcattttgtcattagccgtctttggagtacagccgcctcagtccaactcctccagccaatcattgacgacagattggacttgcatttgcattgtatataatcattccgccaaatactaccaaaatgtgagacatttgcttctctaa

SEQ ID NO: 81148 - DNA, 1628 bp, Heterodera glycines
  unsure (1)..(1628): unsure at all n locations
atcaccaacaatattcncttcttttggcttccgttctttcactggtattggcacttctcgtaaggaccgttatgtcaagaaatctgctgccgatgtgcgtacaaattgggtgccgattaagagtattctcagggatggaaaaagaagtgccgatcggacatttattgcgccaactcccgggtggccatttgtcgctgtttccgataactatggacggattgtgctcatcaatacgcgcactagacgtatcattcgaatttggaaagggtacgactgccaagagggtagcagcccttgtcttacaattagggaggggttcgaaatttttaaatgcgctattcaacaaaacaaaaaaacatcgaaagtctggtgtggtgggtacccgcagagaaagaaaactttccatgttttgttaaaaacgtctccgaggaggggggggggggttacacccctcattgtttgtttatcctggcctacgcctatgcccttgacgatgtgcttccttcgtttcctattttcacgatttgtttttcagttaccgtcaagcgaggtgcgcatggattgagacagtcagcacttcacgaacgacgccaatgaaaaaagctctttttctagcaatttttgctccaaaaagagggcttttggaaatatggtcgatgctggtgagggttttttacaccgtttcaaacaaggcgaccagactatggtttcagaggagcccaaattcctaattagtgaggggaactcgcagcgtagcaggacagaacgtcgccggaacaaaacagcgccgggacataacgtcgctacaaaaaataaatatattagaaaaattcaaaaaaaaaattaagaaacaaacgttctcatggattttttttggttttctggcaatttattgttagcaatttattatataatatctaattttaaatatttcaaatgttttggttttttgcgccgctttatgtctcggtggccggcgatgtttttgggggcactggaatccgaaaatttattaatttatcttcgtctcaaaagtttattttctagaatggaccacgcgttttggcttttcaagttgaggagggcagtcggttgctctcattgcctgttgttcacggtggcattttatttgggggctctgatgttcgtgagactgaatcgcaggaagcgggtggtcgagcgggggccgtttttctgacgcctgacggactcctttatgtgatgaaaatttatttgtgaatctgaattcattttttacagtccgtcgatgtgcccttttatctctccgcactttcgacgagtgcgacatcgatttatgacgaacatttgataaaagatgttgggtttcattttcctaattaattaaaatgtatcatttcagttcagtctcgaacattttatgattaaaactgagaatgctgacaatgaatcggacgttgacttagaaaaactggctgaatttgcgcttcgaattaaaaccaacctggcaagacaaagatttctggaagctttaattgtttcatcgagggggacttcgaccaaaaagagcgatgccgggaataagaaattgcgaactttgatatcagttcgatcgttgcgcgaacttgtgaaccgaatggttggaaaat

SEQ ID NO: 81149 - DNA, 1584 bp, Heterodera glycines
cgtgtgtgaagcatctgtctcaaattcaatgtgatcgtactaatccgttgttggcaaaggctttgtcaatactcgaattcgtctatgacaataggtgggtttcttctaattttccgaagcattgcttttcaattttaagcggttcttcggccattgcttcatctctattaaatatcgccaagtgtcgtttggaattaaacgatttcgttggctttttcaatttgaatctgtatcaaacttttgacaataatgctcaagttggaacgccaataactgccaaatatgatgaaaataatttatcgacaaaaattcccacaaaccttttggcaaaattgggtgcaactttatttgctccgttcctcgtgaattctttttcggacttcgaaccatttctgaagagtctgacatcaaaatttcggctgagaaaggtagggttgtgttgccatcaaatttactctatatcaaaattgctgattgaatttgcttaacttttaggatttcttcgtcacttctctctgcgctttttggctttacccgccgtgtaactttaaattggactgtttttcggctcattttgctgaatttatgctcggtcttttcaatttgctcgtcgaagactctgacaacagcaattggaccacatcctttaaagaaacactcaaaacaattgaacaaatggtaattgaaaggtacacagtttcgttaaatttatgtataaagcttttcttttattttgtaatttcgtggaaactgagaaaagcctttcaattcttggatttgatttggaatttctaattcagcactaatgtgccggctgctctgatggtcgctgtgcaaatgggcgatttgtgtcaaaaaatgtcagttacgctcaatgaaagaaaggccagtcgaggaagcggtgattttttaaattaggttcggttgtaatttcacacaattttatccaatttagaacagaaaactccaacggaagatggcgatgcttttattgttttcgataaacccgaattggagctttattcggagctgtgcaacgaattgccatccttttgggcacttttgtcattgcatttgagcgttttacaccttttgcaatggctttcacagcaaatgacagatgaatcgctttcgtcgcaattgtcgacatcaaatttctccgttgccaaactcctccaaaagggtgttagtttctatcgggaacaggttggttggtcggttgtcgttgttttcaacccattcttttagttgggtctttgggtttctaatctcccgactttttctgcccatggcattgtgtcgcttttttcttcgaatgtccacattgaaaaaaataccgatgagattcattttaacgcaaaaaccttccacgctcttcggttgctttgcaaagggacacttccgcacaatttgcgattggaattgatactttgcgactgcgtctgggaatgcgccagtgcttggtacaaggacgaatcgcgaagagtcacaaaactgaaggttgttttttggcgttgcattcattgcttctcatttcggccaattccctcgtcagcgttctatcgacctgctccaattccttag

SEQ ID NO: 81150 - DNA, 1526 bp, Heterodera glycines
atggcaccgcaaaaagcaaatggaacggacatggcgaaaccacggggatatgtacaacagcagcagcccaaacaagccgaacgtgacgaacagaagcccagcatttgttcgatgtgccaatcggccgacccgagcccggcgcaccgggcttctctgctcgtccaatgttccgcttgtcaacaccaaatgcattcgttggtcacttccccaacaattgttcaatttccctttgtttaagctcgtgcattgacatgccgttgaacatggtcgaagtgatccgcaaatacgattggctgtgcattgaatgcaaacggtgctcagtgtgtgagcagcccgaccaggaggtgaccgggggggcggaataagcaaaatgtgggcacctccctccctctccaggcggcgatgatgtgctgcgacgcgtgcgaccgcggctaccacaccttttgcatcggccttgaaatgccgccgaatgggacttggcactgtcccaagtgcaaaggttgctgatactgctcactcactgtccaccgcccgttcggccgaccttccgtcgctgcttaattaatgtttataaggcctcactgaattccttcctatccctttttttgcgttcattaggggggggggggcggaggtgcggcaattgaccgatggtcggtcgctcttcccaaattacgccatggagtgaattaggttcgcaacatttccaactgtttaaggcactgtcatggacgaacaattgaagaaacggtatctgagtgtaaaggaacccgaaacaccgaccgaaggacaacaaaagatggtgtacatggacttgggaagcaaaagtcagggagaaattgacggagcatttgaaatgcctccaaagaggcggaaaggaaggccaccgaacaaaaaggcataggaaagttcagtcgaattgtacaattgttggtccgaatctgacaacgataatcccatcttttacatttgtttttttgtccatttttctattccaaatttttgttcgatttttttgaatgttaaattgctttttattctccatttttaaatgtaattttaattgaattgatttgcttttacttttatctttcacttcaccttttttctgttgttcgtccctctcgaacgatgtcgagcatttccagcggcgtcgacttaaccacaaaataccagcgactcgccgttgaatatgttaaggtgtcagtcaaaccgttcacctaaacatgcaaaggggctttgaacagttaaggtgcggaaccaagtggcggtgcttaagtcggctttggtggaagaacagtcgaaaagggccgatttgggcaaggaaatggcacagagagagacgaaactgttcaaattggagggcgaaagggactcgctgctattccgcaacgaacagttgctgaaacgggtggagggactgcaggagagcatggacgcccaacaagcgacctttggcatggccaaaggtaaaaaggtgggaaaagggcgaacggacggactgtcgaatggcaaaaatcgaaaaa

SEQ ID NO: 81151 - DNA, 87 bp, Heterodera glycines
atgcgaaaagcgaaatgcgaaacgccaaaaaatgcgaataatgcgaaaggcgaaatgcgaaaagcgaaacctcggcccatccctgct

SEQ ID NO: 81152 - DNA, 755 bp, Heterodera glycines
atgacccgtacaaaatactccaacttgacgtggtttgtcctttcatttaacataaaagaggcatttcaatttgcgtccgaatataaaattgcatttttgggactagaaaaaaagtcattttacccaaattaatagcatttttctgagaaccttgggatgccctgtgttttgatggtgccggtgcctattggaacaattttgcgagccattatcaaaattcaccattttcattgactggaagtacccaaattgattgacaaccggaacaacaattcaggacgcggatgttggcgagatcaaaaagaagtaccgcgagctgagcaagcagcaccacccggacaagggcggcgacccggtgacctttgacggcattgtcaaggcgtacaaagcattgacggatgaggagtcgcgcgagaactggcgcctctacggcaacccggacggacccaaaggtgacgactttgaccgatggtgattggcattttgaatttgatttttaattttttaccccctcctaaattgccgttttttgagggcatgtacaaatatattggtaatagtttcggtcggtcaattccaatgaattgaaggatcgttaaacagttttgaatcggtctgcctattagttcctaaatgacaaaacgcaaatttttccttcgaccgattccatatttaaccgaataaatgaaattattcaaatatgttttttcagccacaacctttggcattgctttgcccaagtggattgtcagtga

SEQ ID NO: 81153 - DNA, 1406 bp, Heterodera glycines
atgggccgtgctcagttcgaatacgacgaagtcggcaacacattttattatgtgattgtgtccttttttgctgtcatccttttcccgctcacccattttctgtggccatcgctgcgtacgttcttttaaaatacattttttatggcatacaatttttttttaaatgtaaaaatttgggacagacttattgaaaatggcctggacctaattttcggttgacctgtgggccttattttctgggcacaaaccagggctattaacaggttttttgatccgggtggaaaattagaaaattgcaaaaatcttaactctcaaatttatacaccaaattcaaaagttcaaacagtacgcatgcaaaagttccaaattttggcacttttttagacaaaaatccaggaaaaaaggtcttggagtaacacaaagttttcaaatttcagcaaagaggacggaggtgctgaagaggggctgccgttgcgagggcgacctggtcaagcggtttcgcaaagagcaaataaagccgtgggagaaggcgaaatgcgtgatcaaaggttgtttcatactattggcattcatttgctttttaatacttaaaaatgatttattggaccattttgtttttgcatccaaattttaacccgtaaatttgtgcatttcgaagctatatcctttcaaattttgaaaaaacaaaggtccccccaccctttgattttaatcgggcactcaaaaagacaatttatggactggaattttaaattgagttgaaaatgtgttagtttttctaaaatctaatcatttaagggtttgttctgctcattctgtgggcactgttcattctgttggcctacaaagtttcacaattggaacagacatttgaggagttcgttcatccaattcgttaatattttcctaattttattcacttttcaggtatgacccgtacaaaatactccaacttgacgtggtttgtcctttcatttaacaaaaagaggcatttcaatttgcgtccgaacataaaattgcattttttgggattagaaaaaaaaaatcattttacccaaattaatagcatttttctgagaaccttgaggtgccctgtgttttgatggtgccggtgcctattggaacaattttgcgagccattatcaaaattcaccattttcattgactggaagtacccaaattaaatgacaaccggaacaataattcaggacgcggatgttggcgagatcaaaaagaagtaccgcgagctgagcaagcagcaccacccggacaagggcggcgacccggtgacctttgacggcattgtcaaggcgtacaaagcattgacggatgaggagtcgcgcgagaactggcgcctctacggcaacccggacggacccaaaggtgacgactttgacgtgcaatga

SEQ ID NO: 81154 - DNA, 488 bp, Heterodera glycines
atgaacacaatccgcgacattaagaatattgaattggtttgtggtagtcgaatttttgtggttcgtgctaaaattgcaagtgttgtgtctacggaatacaatgtaaataaaaccaaatagaaaacatatcttgatttttaggcttgcatctcttgtcgtaaggggaagtgtaactgtggtatggagaaggtaaagtcttcatttttgagattgtcgctcttggatgatacagacgttttggggggtgttgcttttttcggcgtgaaaaatgtagaaaagggtgacggaatggtatgaaaaatgtttaaacacgaaaatttattttttttaggaaaaggttaaaaacttggttgggaccatttgtactttgaaggttaatgtgagtgtgaaagaatatggtggtaagaagggaatttattatgctttgattgatatttatgaaatttgatttgttttgtctataaatgaaatgttaattttttatttaa

SEQ ID NO: 81155 - DNA, 456 bp, Heterodera glycines
atggctctcataaacgctttgttcaaatcagaaatggcgaatcgaacgcgccggtgcccacgcttatgccgccctcgtccaccttctccaatttggtgcgcataaagtgcccactttgcacattgtccagcacgtggttgccattcgcgtcacccaacagccaaccgatgatactcagttcggaagtcattcggccgtactgagtctttgtttgttgcgaacggaccatgaaattctattgaaacagcaattaattaattagtcaattaataaaaacataaaacaaatccagcagaattgcttcaattaaataatatgcgtatctcaattcgcacattgtttcataagattttctgtttttcaaaaaccctaattacaaaaaacgtttatttcgactttttcttaattaaaaataagcatttaatgcccaaggaatattcccatcaaaaacaccaa

SEQ ID NO: 81156 - DNA, 1584 bp, Heterodera glycines
gctctgctttttgaattggaggtgagaaagacaaattgatttgtaacattattttttttagggttttgcccacaaatgccttcgttacatttgccaaaatgctgccaaattattcagatcaattgactttttgcaaattgatcagaatgtgttgtgcaatcttctcgagagtgatcgtttgttactaagcaatgaatttgaaatttggaaagctgtaaattttgattaatattttgcacttgctttttttaaattttttttttaaatttaaaggcaattcgttgggccgataaaaaatgtcgtcagaatggcatgaaatggtcagcggaaaatcggcgttccgtacttggtccggcactgttcaaaattcgttttccaaatatccatgaggagaattttgcaaaatccgtcggtatgaccttaaaataaaaattttatttgtgatggatataaatattttagcccaaaatgatataaaatttttattaagggaaatttaacaaattttgagatttatagttccatccggtgtgttaacaatggaagaagtgatcggtgtgtatcagttcaattcccatccatatctgtgtcatccgtttcgctatccttatggagtgcccgggctgtacgcgttgaaattcccaagccatggacgaatttctgattggaacaaagccaagtgcagcattaaacgaagagggacacttgcgttggaaattaaaaatttgtcaaaatttgcgcaagaaaacattgggagtgaacgtataagcaaaactgtgttcatcaaagaatttccttggaaaatacgggcatatattagaacaaaaaaagaggctcccgaacattccgacagtggagaatccgacagcgaggacaatccgacagaggtggacaattggacagaggtggacaattggacagaggtggacaattggacagtaaaatacacaaaaagattaaaaaaaaatgccgtcgccgaagggaccaattgtggcatagcaagaaaaaagaaaaatatgcaaataaattgatgagtgtttttggcaataacccaaaaaaccaaaagatttctttttttttcttgtaatggtacagtcaatcggtccctttcggcgacggcattttcttagattgaaaagaaaaatggaagcactgacaatgaaaaatggttggccatttaccttgtgtgcgatgctccaaaagaaggtgcaaattaaatgatattaattgacaataatattgtttcatttatttatagatgaaggttggatttgccaatgttcgtcaactgttcgaattgtctcgcaaaagagcggcgtgagagattatatgaggggagaatttacggaagaagatactttttacaacgaatcgaacagttgtggatatgccaatttcatttcatttgcagtgagtgccaattaaaacaaataatccccaattaaattttaaatgaccataattaaggaactgatggatcagagcagaggattgtatgacaaaaatgaggacaaagtgacagttgccattgatcttactatgaaagacgaaaaaacggaggaaaatcataaataccccaatgtt

SEQ ID NO: 81157 - DNA, 808 bp, Heterodera glycines
atgtcttggatttttggcatcaaacctcagccatcgtcgattcctgcgcctccggacgaccccaacagtgcgttttgaataaacaattcagttaaaactgcactaaaaccgaaaactgcctggattatggcttattttgtttttttttcaaattctaggaaaccctcccacgcccgccgatgagaagcagcagaaaattggggcacagagtgcctacacatttgactcaactgcgctggaacgggcggcacatgcagcaaaaacgctggaaaagtcgaccaatgcgaagcaggtcgggcaaattttaataggaatttttcaaggccgatgcctactttttgcgctacaaaattctctgcattttttactatttttattatggcatgcattcggagagtttttcaagtgtatcaattttttccctgcttaaaattaagtggagaggcgtctaatgatagaggaatcaacacagaaaatctagaattttcgacaaaaattcctacaattttggttaggtttgggtttccctgcctcttttgattcctattccttgtgtaatttttcactctttcaaggcacttgagctcagccgattgcaagaactcaccaagcagaaggagtacgatttgcagcagaaggtcagtcgcaatatcactgaaaaatgcacccgtccaaaaattcagaatttccatttatttttttccagcaattggaggctcgaattgcggccatgcaatcggagaatgtgcgcgttgcggaggaagaaaggcgcaaaacgttaattgaggagacaaaacatgcgcgcgca

SEQ ID NO: 81158 - DNA, 201 bp, Heterodera glycines
ccggcaaaaatttgcttgaattcaatgttttgacaaaatggggatgtaccgacaaggcgcctgaggaatttcagctagatcccgaacaattgatcatcaactcaaatgaatctaaacagattatcaggaaagaatgcagttataaattggggaaaattggtgtgctaatggccaatgctgccattaagcttccaattcccg

SEQ ID NO: 81159 - DNA, 749 bp, Heterodera glycines
gaaatagaatttaaaaaaagacaaaataaatcctttgatgattctgcatttgtggctgaagaaatgaaaaagaaaaaaatttgtgcaccggaaattgaatgccagcattgtggtggtgtttttggctgtattccggacgaacattggtggcagtcagaaggaaacggatgttgtccaccaactcaaaaggctgtctgttgtttaacagtaagaaatatctgtttttaaattatggctgggtttagggttgataatttagagacaaaaccatcaaaataaattgaatttcgtaccaatagatttatgagaaattttttaggtctgtatataaaataatgcattacaaagtaactttatttggtgaaatttattactaaatgatgctaaatacaaaaaataaagtatttattatttttggaccgaaaaattaataaaaataatttgcttggaaaataattgaagttaaaaattgttttcgattttttttttgtagaaactgccggaggccccgcttacaattagcttattctttatcttgactgtctctgttctttagacctcaacgacaagcacaacctcaacaacaacgaccacgccaaccacgacgacgacggacgaatttctcagatgcaaaaaggcacggttcgagtcgcaccccgtaagggacatttacaaagaggacaaggacaaggcatgccaacacaatgagcaccactgttacgtgctgaactgcacgacaggtaaataaa

SEQ ID NO: 81160 - DNA, 2335 bp, Heterodera glycines
atgagcgagggcagtgttccctttctgtcaagaaaaacggggttccatgatttggctacggtactttcagaattatttgaatttttgccaaataataattgcctatactaaatttgtttcatgtaatttcattaattttgttaattatgtaagtttggtcgccagcaattctttgcacttgtctatcgtgacacgggcgttgacattctgcgcactaatggcatggtcttacatttgttcataaaattcaaaactttcttgaaaatataaaaaatttacatcaagattttggccataaatgacttattggactaaaatttcttcggattgtccttgaaatcatgcataaaaattttagaaatctgaataattttaaggcttgatttgagcatttaacagaaaagcgcatttctttgaacggtgctgggtcgtttgtaagggtatttggtaaagtgttaattttacagatttttcgagaagaactagtacaactttaagcaaaacaattaaatatcctaaattaagttttcttggaatgaataaataactttgtgttctctataagaatattattaattttaaaagtttaacaaaaataaactaaagtttatggtcaagaaagtacaaaaaagcttgatgagtagaatgttttcgttctaacttttctctattattttaaaatttcttgagtttcaaaattttcttgaaagcttacaaattttaaaaatcaaatttttggcggaaagtttttaattatgccaaaatttcaacggtattttctttaaaatactgcataaaattttacttttgttttttgaaagaagaataattctgaagcttttgagcacatatgagaaaaaaatgggcgctttgtaaaaattttacagatttttcgagaagaactcgtactaacttttcttaaacgtaaccaaattaaatattcttaaattaatttaaaactaagtttatggtcaccaaagtaaaaaaaagtttgatgagtcagaatgttttgactataatttttctttattattttaaaatttcagcaaatttcattgggattcaaaaaaattaaaatgatatagaaatattaatttagttgatgagccaattcattttcgtaccccttgccggattcaactaacaaacattgtggcggaagttaactaacgcactagcatcgaaattttcaaaaattaccttattttttgaaatcaagaaattttctgaaattttaatggtttttagcacttatttgtttttgtttaagctggttcttagtttttgttttgttttttaaatgaatgatctaccaatatttcgcaattgactcacttacaaaaaataaaagaaatttcgttttttttttaaattttacactatctttcttcacaaattaatgccaaaatttccagcccccttccgaatggcagctgcaaattcagcggaggaaaaatgcccgtactaatagcaatgccaacgatggcggtaagagaagagtgccatgtgactgtgattttttcttttagaaaaaccgggaaagggaccagaaaagcaagggacgagacttagatttgcaatcgggaactaggacaaacaaaaaaaaagcgattttataaatttaagcgatttaaaattgaaaatttaacttatctcttatacaataagaatagaacattgaacacattgttggcaatttggaagtacaaaaagccaactaattacagtacccactcctaccgtcattttgcgagttgatttgacaagtcaacagactcaagagcggattgtctatgatcggagtgagtgacaatggatgtttttaattattaaatttattaatcagcaaaaaaataataattagataatatcttaattgaaaatcttttaaaatatttattaaaagacaaaaaaaaacgattctttttatggtaaagaagcatttttatcattagcaaatcctcggaacaaaaagcctttcatgaattaaaattctctgtgaaataataagacgaaaatgataaaaatttattaaatattttgagaaaaattatttaagataatatattatttaataaataaaaaatgtaattgaaattgcagccctaataacagcacaagcttatgctttagccgcgacgaattcgtccgcggtggcgccctcggcgcatgggacttcggccgatttgttggcggtgctcgcgcctccccctccaccgccactaaaagcggcaaaacaagaagtggatgtgctaggagggattagagctcgtgaacaaaatactttgtaaagttttttcctattttctccttaaaaatttgtagaattaaatta

SEQ ID NO: 81161 - DNA, 165 bp, Heterodera glycines
aaaaattgcggtgcaccccaaaacgtcgtcggccgaaacgtcgtcggaagactttttgaaccataactttgttcactgtaaatcaaattaagaattgttggtgttgttcgatagctctatgtgtttattattaatttgcaaaatctcaaaaattttcgttaagtt

SEQ ID NO: 81162 - DNA, 732 bp, Heterodera glycines
  unsure (1)..(732): unsure at all n locations
atgaccactgtattgtatgactgaaaaaaagtttaaggatttttaatggtgaaaaatcccaaaaataattaactaaattggcaaaatatagtgtcgttacaaatgaccagtttttgtgctttgtatgaaactaaactgtaaagaaaatgctaaaaaaaattaaccgacaaaaaagcgcaaaaataaaaggatttncggttctttgacgaaagtacctctaaattttagaaaaatttcggtgcttgtctctttgaaaaattcatagaaaaaaacaaccgatttgaataaaagatttccctactgcattgcttttaataaaatttttgtttttccctttgatctccttgggaatcgacatgtttctttggaatctacatgtctttttagaaacggtactcagccgatgagaactttatattgtaatataaactttttaaatttcagtcaattaaatgttttttccacttactgcaattgttgttaaatattattgaaaaatttgttaaaatattttaaaattaatgaaaatcattggtgacccattggtccaaattttttatgtttcacagttggagcccatatggggcatcgccgtttagtgcaaaagctccgaaatgcgcacactaattaatttttgtgcattttaggggttgacttacgacgatgaacaatctttttctcgttgtaggataattaattatcacgagacgaaaaaccttttaggaatcgaga

SEQ ID NO: 81163 - DNA, 1099 bp, Heterodera glycines
atgtctgacaatatattcgccatgttggatgattttgacatcgaaaacagtaattaaaaaacaaatcattacatatacatatacatttataaatatatattatattattttttagtcgacccgactctaaatttttcaaatgatgcgtggatggaggaagtcggtgaaaccgtcacggtaaataattgtttaaaaatgtttaaataaattaaatacaaacaaatgattttgttctaatttttcttcagaaggcattttttgattcatttttttgattacttatttagaaggtctgaaaaaaacttaaaaattctaaaaaagttttcactgaatagttatgtttactaatttacttattttgcgagattttattacttagggtgtaacataagttttgaacctattttttataaaatttttattttaaaatgtaaaaaataaaataaagatacgataatacattccattattatctataatgagttgccatttttttggcaagagagtaatcccaccggcattaaattagaagttataaatctaaaaaccaaaaattgtcatttttcagtacatattttttgagggtgaggttctcggtcatatggaaaaatttaatgataacctaaatatgtattgatagaggacagttaatactacaaatgccatctgagaaatattttttgtacataattataaaaatttttaaggagtcgagttttaaaatggcacaagaagttgaccattttttaagaccacatttggtacaatttttctattaagtggttttgtattgacccaaaatctatttaaaacatagcaaatttgaaattctgaatccgaatctggcctctgattcgaaccttgacttctcattggtctctgtactgcttgaactttgtgcacggagttgaagcagtacaagcaattatagaaaaaatagacaaaaactaaaaccagattcagattctatggactgatttggtcttaaaatatatggataatagggatttgtgaaggttttgtgttagttagtctaagtgtacaattaatgtgttgatgtacatttttggcatggttaggaaaggagcaggaaaaacca

SEQ ID NO: 81164 - DNA, 559 bp, Heterodera glycines
atgcgaagagaggaaagccatgttagtttttttactctataacctaaaacaaatttgaaatttccaggaatggttgcaagaaaaagttatcaacatcgaaaaaacacaatttgaaatggagaaacaactccaaatgttaaaacaacaacaacaacaacaacagcaccaacaacaacagcaccaaccgcaacaacaacaacaacaaccacaacagcagaatgctgagatatttgaagtggaacgcatcgttgacgtccgaaaagcacgagatgggaaatcagagtataaggtattaaaaaatgtttttaaacaatcataaattagcaattttaaggtaatttggacgggctacacggagtcgtcctgggagcctctatcaaacctttggggcgccacagaagaactctacaatttaaactgtttcattgttgcggaattattgagttaataaatgataataatctccgatttacaatttcctttagcaaatgtaggcagacatatttagaggaaaatgagctgaaattgtgaaaatttcacaaaaataatcatgaaaata

SEQ ID NO: 81165 - DNA, 901 bp, Heterodera glycines
atggcatccatttcacccaattccgaacccctgatccgaattcgaacaaaaatcgaaaactcaaatttttcgaaattcacatttatccaacataatcgctccaaaagtgaggaggtgcatgaggaaggatacacggtgatttggtttaagcgtttccgatctattatttacatgagtatcgtggtgagtgtttcacaatttcagctcagttttctctaaatatgtctgcctacatttgctaaaggaaattgtaaatcggagattagtatcatttattaactcaataattccgcaacaatgaaacagtttatttgaagaggataaggagctaaaagtgcaagaattatacaaagccataaaaataaatagtaaattgatggttattggcgcttatcaactcaatccttctgcaacgacgagacaacctatatttacagtatatatttatgaaattacaagaatttcaaaaattgttcttgaaaatagtagatagagaatctcacaatttcagcgacttaatctctaaatataaactgcatcagtgttgtagacggatcgtgttaataatattctccgatttattattttcacgatcacccttgttaaatcctcaaaatttcagctcattatcctctaaatataaactgtaacagtgttgtggaaatatcgagttgatagcgctaataatctccgatttattattttcatgattatctttgtgaaattttcacaatttcagctcattttcctctaaatatgtctgcctacatttgcgaaaggaaattgtaaatcggagattattatcgtttattaactcaatccttccgcaacactgaaacagtttatttgaagaggataaggagctgaaagtgcaagaattatacaaagccataaaaataaa

SEQ ID NO: 81166 - DNA, 548 bp, Heterodera glycines
atggtcaaaaatgatgtgtttccgtgtttcgggtaaataataattacataattaaaagtgacaccataaaccatcaccatttacgaatttcagttgaataaataaaaatttcataaaatgattttattgaaacaatttttttttgttgtaataaaatttaattgcgtatttaagcgtgaaaaaatagtgaacaaatatcattcattaaaacaccatcgataataaattaaataatcctctaatatttccaccaataaaccaaattaaattcattccaatatgaaatatttcaattcgaaaggcgttttctgcttgcttttagcagcattcatcggtaatttaatttaatttttgaaacttttaactattaaaatatacattaaaattttaaaaattattcgagaaattcattagctatcccatgcttcgttttggcactgtctgatgacagccgcgggtttgatgctcgagtgtcacaacaattaccgctcacaactggcccaaggaactgcggcaaatttgaccggcacaatgccggctggcagtaa

SEQ ID NO: 81167 - DNA, 922 bp, Heterodera glycines
atgtccaatggaaacgatcaaaatgaccaagagaatgtgctgcaggtattcgtcattaattgtttcatttcattgggacaaaggcaaatttattttttgaaattgccaaattgaagtgatgcccattaattgggcaaaagggctacgaaatggcactgttcattacgctcaataaatcgtaatttgctcaattttctaattggctaatttcccatggcatcggattaatttattattatatttgagacctggatttatggatttacccaatttcaaaataaaacaattaaaaggaaaatatgcccaaagtgtttcagatacttttcgatgctgaccaaatattggccaccagcaaacgaagcggcgaaagtgcgcagagagtggccaatgccattggggccaaaatttttgccacgtcgcacagttttggcgagaattgtgccgttagaattgcgactttgcgaattttgtcgcatttgtgcgccgccggcgaaaaatgggcggtgaaaatgttgcagcagaacatcgaccttaatttgctgaggtacagaaaagaattgtctgcagcctatatgacgaaatttcggaattgtttccaaattttcgctttcattccgggaggggaaattaagcaattgaccgaagttttcaggccttgatttttacttattctttaaatcattggttctcttattttctaacaaaaaatatttccatatttttgcattatgtccatattttaggtccatattttgacattttccaaaaagtctctattagaacggcctccatcagataactttgcgctttaaccactaaaaacgtaaatttttcgaaaaatatttctcagcgaattttctagagagttttacttaaatttattattttctaaaaattgtgtcaaacctttttcctaaaaata

SEQ ID NO: 81168 - DNA, 78 bp, Heterodera glycines
aatgtttattattgaataaatacacaaaaaacaaaatatgcaaaatttgtcaagaataaatccgaggggcttaaaaga

SEQ ID NO: 81169 - DNA, 372 bp, Heterodera glycines
atgccttctccgatcgctgccgcaccgatcaaaaagtgcagcgcattgttggcaaacagccgaaagcgccaccagccgactaagatggaaacggaccgcgcggaaagtgccgaaaacattgcgccaatcaaatggagcgactcgtgccgttcgactggcgaaacttcccgcacgtggagagccctaaaagggaaagaggaccagagaaaggcgaatcactgctgaatgaggagtttggcactatttattagaatattgttattgttagggctcggaaatatgtggatataaaaacgcgaaaatttggacataatttttttttcaaattgaggggtaaccttcaaaaatttgaatttattaaattttaataaa

SEQ ID NO: 81170 - DNA, 239 bp, Heterodera glycines
atgcctttcagcagaaaatactttgccattgcatcgaccattttgttggagcttttggcccgtttcccccaaatgttcttcgtcttgggcatcggcctcggttggctcagtcggctaatgcacaaatgttttgagacgaacaatgtccaaattggcgcgcatcggagcgcaattattacccaatttgatggactgtccgggggtcataagggagggcgaattgcattttgttggcccag

SEQ ID NO: 81171 - DNA, 1161 bp, Heterodera glycines
atggcagtgcacagttactacggacagctgaaggagcgcgatttgatgtttgccattctgaacgcgatcaaattggtccgagagggcaccattccgccgattttcatcgaaaaactctctgccgttgtccatgacaaatttgtggcggtcgacgcttcgttggcgttccaacagagcgaagaatggagccgcgacgtgctgaacatttcgaatgccagcccatccccggaggggacaaaacgacttacactcagggaacacaaaacaccgcactgttcaggggaacagatcaacacgggccacaacaacagcagattcccacgggaagaaagggtcggttgtttgaggggggagaggcacctgttgctgagagagtggaaaataggcaaacaacattgttttgtggtttacatttggtttacaatcttatcaccgtttacttgggagcagttccttctaattttcgaggtttttcactgggaaaatattggaatttttcaaagaatttaatattttcttgttttatgcctaggaataccaacgttgtgagatggtgttcttcgtcaaccgaaattggtcaagggaacaccgacaacttttcgttgcttaccaattcgcccgttggttttcccgcggtttgatttggtcggtcctccttttcttcttcaatttattagcgttttctcttccagttttcccgacttggtgagaattgcggacgaacttgacgacattctcattgaccatatgctctgttcggtgccccggccgttctctccctacaaaacttcggctcggaccgccccgcccgactccgttgcgttcatctccggcttacgccggagtttgtacgaccccgactcggtcaaagacccacaaacccacaaattcaacaacatttacgtggaagttgtgctcagtaaaaagctcttacaaaagaagctggtgagttttcggagatggaaaatcatttttcgtttattttaaatatttaaacctttcctttaggacaaattcaaccagctcagagagggcgaccccgtagaacttccgcaaaatgttgatccgctgtgtgcctcggccactttctacgacttgaacctgcggcgactcgacgcgatggaagcggtgcttttgggagagcggagagtgcgcgattgg

SEQ ID NO: 81172 - DNA, 994 bp, Heterodera glycines
atggccggctttttctcttacttttgggtgatggccgataacggatggatgccaatgcgacgtaagcattattttattttaaaaaattcaaaagtggttttttagtgttctttctacgaaaagaatgggactccgttggcgtaaacaatttggaagacagttatggccaagaatgggtaagacatggccaagtgggtaattaatggccaaggatgggtaagtcatggccaagaatggataagacatggccaagaatggataagacatggccaagaatggataagacatggccaagaatggataagacatggccaagtgggtaattaatggccaaggatgggtaagtcatggccaagaatggataagacatggccaagaatggataagacatggccaagaatggataagacatggccaagtgggtaattaatggccaaggatgggtaagtcatggccaagaatggataagacatggccaagaatggataagacatggccaagaatggataagacatggccaagtgggtaattaatggccaaggatgggtaagtcatggccaagaatggataagacatggccaagaatggataagacatggccaagaatggataagacatggccaagaatggataagacatggccaagtgggtaattaatggccaaggatgcgtaagtcatggccaagaatggataagacatggccaagtacgggtaatcaatggccaagaggggtaattaatggccaagaatggatactttttaattcgcttctttgtcccatgccattttcagacttacgaccagcgcaaagtgctggaggcgacctgccagacagccttcttcatcgccattgtggtcactcagtgggccgaccttctggtcgtgaagacccgtcgcaactctttggtccagcagggcatggacaattggccgctgaacttcgcgctgctcattgagacggccatcgccgtgttcctcgcctatacgccgggc

SEQ ID NO: 81173 - DNA, 1520 bp, Heterodera glycines
cttaatgcatccaccgtggcaatgtttatccgaggcgcaccgcccgaaggcgaaaagggcggcggtaacgacatcaatcagctaaacgcaattcgcgaccggcgacaattgtggcgcaacgcgcgcattccgtacgcattgagcagccaatacagcagctacaggcaaaagcacaaatcaaaatgatggaacaattgagaaattatgcgatgaattttaagcaaaaagaaaacaaaataaaataattattaattaattacatatttttaatttagtcgttcagtgatcgcatcagcaatgcaggaatacggtaatagtgcaaattaatcggaaagctgcttttcctatgtatcgaacttaagcaatgaccccaaagagcacaaaaaaaagaaatttcattagtattattttttgttggttaattgaattcaatgtttgaaatgtgtaaaatttaaaaaaaattgtttcaaagtgatttagcaaaaaacacgtgcatccaatggacgccgaggacagcagtggacaacgattatgtgtacattgtgccggagaggggctgctattcgatggtgccaattgttaaaagtgtcacataatttgaaaaaaatttttgaaaaggtcggaaggaccggcggacggcaaattctttcactgggcaatggatgcattcaaaaaggtgaacggagtgtgccatggcatgctattcatttgctaaattcaaatgcccaatattaaaataatacggcattctttgcggatccattggagcaaaagccaacatcgatttgcttagcatacaccgaagaagggggaattgatttatcatcgatgcttaattaacttaaaccaatctttttaaattttttaattattaactaatgcaaaaagagaagagctgtcgctgacgcatagaaaattttattaaattattatgattttttcggaattgatcaaaaagtaaaaagcattttgtctcattgtcagggataatcatccacgagatgatgcacgccaccggctttttccatgaacagtcgcgcaccgaccgggacaatttcatcaccatcctttggcacaacattctgccgggcatgcaaggtgaattggggaaaagggaaaacaaacgggagctgaattcaaataggcaaaataaaaacgatgtttttttaaggaattcacttctttaaatgattttttaaaatttttaccgtaaagtattgccaatttctgtgaaaattccaaatgaattgaaggacagttcgagaagtacagcgcggccaccattcaaacgttgggcagtgactacgacttcggctcaatgttcggattggcattttaaaagcaaagacaaattgggcgaaaaactctccaattaaaattaattgcaattatttcttgccctcaaatccgtgctgttttttcagcatgcattatggccccaacgcgttcacgcgcaacggactgccgacgattggccacggagaagagcgacgattggccaacggagcggatttagcaaa

SEQ ID NO: 81174 - DNA, 292 bp, Heterodera glycines
atgaaaggattatctgttgaggtggtttcgaacggagttctgaatgggccacagcagcagccgttggcctcttcgatggcatcttttccttctcttagcagtcttcatcaccaccaattcgcagcccaccagctaaaaccctccgaatcggcgggcactgtcacagattttgctgcgcgattcatcgccaacggaacaacagggcctccattgcaatcgtatttatcaccaaatacaacagttgcatctggcggaatcggcaaaacgaagggattgggcaccggcggaaaca

SEQ ID NO: 81175 - DNA, 754 bp, Heterodera glycines
atgagtgcccctctcttcacattgttcacctgttttttgttcgtcctctgctatttggtcccattgtttttggtcacatttttctacaccaaactgctctcaaaactgtaccaacatgcgcgacaatttaaagtgaaaaaatttgggggagaattttttaatttttaatgaattaattaaaaaatattttattttgggcactatttaaaaattaaaaagcaatggggtgaccctattgatttgcaaaaaagccgaaaattaagaattttttattttatgattttttttgcccaaattaggttgggaaaaaatcagaattgattcaaatttatgccagatttgtgatcagggaccccaaaatccaccagtgaacagattttcatttctaaatctaatcaaaagagtgtcccccctttgttttttttaatataattaaaacattaatcactttataagtagcgcctttatttttttttaattggaaatatttaaaaataaattaaaaataatattcctttaatttatcagaccacaaaattccgttcccaaatcccactgatgaggatttcgttgtacaccttggcggtcgcctgtttctacttcatttgctggaccccgtaatagaaaaaaaatcgcttttaattttaatttcccaatttttagcttttgggtggccacggcatttgccgtttatctggaatatgccggtgaacacaatggtgccgtgccaccaatattcgtctattgcatgtga

SEQ ID NO: 81176 - DNA, 1523 bp, Heterodera glycines
atgaatgtgctgaactcgttgaactcctcaactgctgttgatctcgagggtggtggtggtggtggatcaattaaagctgcttatgacttgacacaagaagttctggaaaaagtatcagctgctgtagttgctgaaaaggagcaacaccaacaacagcagcaacaagttgaaggagtacaaagtgaacttaatgaacaacagcaaaaacaacaacaacaacaccaccaacagcagcagcatgaggacacgtcacaggtgttaaattaatttaattaagaggtgggattatccccgttttcagcgtcctcgacaattttcagtttcatattgagggtatatttttcaaaaaaattcataaatttaagctaaaaactaattactaaatttattaatttttaagaaaattgagtacagactttaaaatttccttttagacttaattttagaataaatttccacttttcagaaagctaaaaaattgcttttaaaatttatcggtccttagaagtcaaatgacctctttaatagaggggtccttttttagtggggtttcaaaaaagcaaaattagcgcgtaaaatatgcaaataaatttctttttttttaaatttcagctcccaaattgggccacatcatcgtcagctgaaacagaagccaataatgatcactttccgggtgatgccgatgaggacgaagctgcgattgtacatgagcaaacactgttgctgcacagctcggactcgatggacctgttgttgcgcatcgattgcgaatcgaccacatatctttgaacacattacaaaattgttgcttgtgcagttcgagaatctcatcattttcgagttatgatgatccaagaaaaaaattctgacatttgggagtctcgagcatcactaatttcaaatacatcagcaggcagcaaagggtggcgaaagacgaggcccgaaaaccgaccccccaaaaatatcggaattccgtgccaccatccccatccctggatggcaccttctgtacatatatagttgggaaaacaaaattttggaaagaattggcaaaatttcgacgaatttctttcttcgttttttttttgttgaaaattctaaaataggacagcctccaaaaatatgtcaatgcccatatgtgtaattattagggttataagttgtatgcttttgcatattttttctgcgcatatgctatgaagaaaggggctcaaaaatagcatttctgcattaaaattttttgatttggtgaaggtttttagtgcatataaaagcatattttgggggtttttgagaataagtgcatattttgccatttttacgtttttagagcatatttcggtcatttttgggaaattttcacaagaaaaatgcgaaaaaaacgaaaaatacacccctaaggatcgactttttggaatttaaaaaaaaatacacccttaaaaatcgaaaaaattttttattttgtaagactttggaaaaaaaaatttatgtatatgtaaaatgtaatgttgttttagcatata

SEQ ID NO: 81177 - DNA, 1164 bp, Heterodera glycines
  unsure (1)..(1164): unsure at all n locations
aaaaaaacgaagatacaaancgattgggatgtttgntcgctgaaatatggccatttttgcgacaacatttcgccattggctnttcncaatgtcgacnatttggacaatttgcgtcgactcatttcgccaacaattctatccgatcttgatcagttgaattcaatcctacctggtgatctgttgcccgatgtgcttgctgataatgattttggtggaccaaatgcgacttctgccggccaaacgttgtccaaatggttgcacaatccgagaaaagatggccaaccaaagtcattgcattgcttgaactttacgacatcagcacccacaaactttgaatggctcaccaatttcaaggaggtcggtttgtcgtcacatttcatatttgacattgtacatatatttttatttaggtttttgtccgtgcccgcacttctgtcagttacagcgtctgcttaacttttttcgtgacgacgatgccaattgaaccatttgaattggtgaacgaacagactaaagaaaagctgacattgaagaaagaatcggatattggctcttctcgttgttggctgttgaagcgatgtccaattactattgttggggagacggcggagacggttcagaaacaacagcagcagcagaagaaaaaagatggaaattctgcgaacaaattgaacaatgtctattttcatcttagtgaaggcaaaaattgcattgggtgagcaacaaaaccatagaaaatctaccaggctgggggttggaagggttcaattaaatagaaagattatcgtttttttatcccacaaaatataattttcgtaaaaattttacccaataacatttttgtttttcgtatcaaaaaaaaaattttttttttcaattttgttctaacccccctcctcttgtccatttattttaacagattttcctttttgttttgaaaataattaaatttcattgaatttttaggcctctttctccaccggcggaagcagcaaaagaagcgagtcaaagcagcgaaaatgacgtctaattatgtggaaatgaatttttagcatttggaaaatgtgagaattgtccgatcatttttgagttttatgcgatgaattgtgttgattagatatttgattgtttaaaaaatttaatttattcatatacaaaaataaa

SEQ ID NO: 81178 - DNA, 1870 bp, Heterodera glycines
atggaggagcagagaagtgatcagaactcatgcaagtcggctgagcacaaaagtgatcaaagcaaaagcaaggagcagagaagtgatcagaactcaaggaagtcggctgagcacaaaagtgatcaaagcaaaagcaaggagcagcgaagtgatcagaactcaagcatgtcggctgagcacaaaagtggtcaaagcaaaagcaaaatggaggagcagagaagtgatcaaaactcaagcaagtcggctgagcacaaaagtgatcaaagcaaaagcaaggagcagcgaagtgatcagaactcaagcatgtcggctgagcacaaaagtggtcaaagcaaaagcaaaatggaggagcagagaagtgatcaaaactcaagcaagtcggctgagcacaaaagtgatcaaagcaaaagcaaggagcagcgaagtgatcagaactcaagcatgtcggctgagcacaaaagtggtcaaagcaaaagcaaaatggaggagcagagaagtgatcagaactcaagcaagtcggctgagcacaaaagtgatcaaagcaaaagcaaggagcagcgaagtgatcagaactcaagcatgtcggctgagcacaaaagtggtcaaagcaaaagcaaaatggaggagcagagaagtgatcaaaactcaagcaagtcggctgagcacaaaagtgatcaaagcaaaagcaaggagcagagaagtgatcagaactcaaggaagtcggctgagcacaaaagtgatcaaagcaaaagcaaggagcagagaagtgatcagaacgcaagcaagtcggctgagcacaaaagtgatcaaagcaaaagcaaaatggaggagcagcgaagtgatcagaactcaagcatgtcagctgagcatcgaagtgatcaaagcaaaattgaagaaatgtggagtgatcaacgcaataatcaatttgaagataaacgaaaagatcaaagccatgaggaggagatctattatgagaatcatgactatcggcagtcctatgacgatgaatttgaagaagaaattgacgactacgcgcacaaatcaaatgattacaattttgagccatttgatcagcaggtatttcaatggctatttggtagagactgagccgggccctgtacagatttttaccggaacctgtaaatcggtccggtgattttcgggaaaattccccaatccagtccgactgatttgaaaatattggactcttttttatctggcttgaagcatgatcaatcagttttctacatcttcagaatgaacaaaccgattggtggagtaagcaatgggaaactgatcaaggaggatcggtggactttcaaaatgcatttttgggtcataaatcgcaaaatttcggccttttttggtgtgtctgtgatgccaattgtccatttgcttttgtgtgtacgccaaatggatgccgtaaatcaaaaaaaaatcttttccaattaattaattgaattttattccagaaaattcttcaactttactcaatgtggatggcaaaattggctttgtccactacaaatacggtggacaaaatggagaacattcatcgaattccatgtacctttagcggtttatagaacccatacttttgtaaaaatccggtaccggaattcaggattggcatcaggccagggtaggattaccgcgatttgaatcccgacaccgggactcaattccgattttgccgggacccagatccccggcccttttttcaaaaaagcctcgatcgggaccgagaaaattccggcgggatgccgatccctttcgggctttagcagtttatgtgccaaaaagacttaattttcaaaaataattttttaaattagttttaggtatatcctaaaatgggcaattaatttga

SEQ ID NO: 81179 - DNA, 488 bp, Heterodera glycines
atgcttcgttttgtcctattgtttctgctgttcgtcgtcggcttggcgttggccaaaaaggtttttttttgagaaattctcattaaattttccgttaaattttccaggccgatctcgaagaacttgagagcattttggatgagttggacgaaagtcgcaccgccggcaccggcgccggcggcgccgaaccgcgccaagagcgcgaccaacagcagttggatcagctacggggtaaattttcaaaaattatttcgaaaatttttaaattttcagcctccgagccaaacccgtgtgatcagcacgtgtgcggatggggcaaggagtgcgtggtggacaagaaggggcgcccggtgtgcgagtgcatcaccaagtgcccggagctggacaatgacccgcttgaccaggcacggcatttttgggggacggggagaaagaaattttatttacaaagcctagagggagagaaaatggcaaatttatgtatataa

SEQ ID NO: 81180 - DNA, 1128 bp, Heterodera glycines
atgaccaggtatgtaggtatcagcagatgtcaaaacaaacgccatattgatgatgatcagtgaccttgaaaagcccaaaaatattaatttttaaaatttttcgaggggggggggtagcaaaacaaggagtaccacactgggttaggttcaaggatatattttgtcatccctaaaatttcttgttatcacagtttaacacacttccagaactcaacattagccaagtgtcagaaataacccacaaataaccaccaaaacacgggggaggttaaaggttattctcatgatcgaaccaatttctaaaacaaattaatcggcctacgaatcagaaagttaactatgtattagactagtgtttttcaaatagattatgtatctatgtatataatttttaatattttttccctttaaaattctttattttatttcagtgacgaaacgttcggccaccaactcgtaaagctcttttttcaaaaaatcaacaaattttctcaaaaagcagcaaatcagcatctcatcaaataatcagttttgaccagggctcgcagatgaaaattttcaaaagcctcattcggcaagcaaaaaagcctcattttgggtcaaaaagcctcatttttacaaatttattcaaaacacgtttaaaatgttgtatttttgactgtccgtgactaatttgagcaatttttttatttgaaattagcattttgtgaaaatctgagtatgaaaaatcgaaattgatttttttttttcagcgcttttgccaaaaacttttagggaacaagggggtccggcggcgcctaactttcttttttgaaatgcaataaaattttcttgcattttaaaggctattgaatgataccaagaatgtttttaatttggtcgaccttaacaaaagttatgacatttttttttagtcgaaaaacagtacgagttggagcagtacgagttggagcagtacgagttggagcagtacgagttgaagctgtacgagttggagcagtacgagttggagcagtacgagttgaatttctcagggaatttcggcaaatttcaaacaatcgtattgaaaatagggcttatatttttagggttttgccctatttttttcatgagctcccagtgcaatga

SEQ ID NO: 81181 - DNA, 53 bp, Heterodera glycines; identical to SEQ ID NO: 80673

SEQ ID NO: 81182 - DNA, 739 bp, Heterodera glycines
atggacaaccaaagcgattgcattgcaaagacattcaagaacaaacgaacactgattggatcaacaatttcaaggaggtgtggtcagggggggggggcaaaatcaaaatttcggaaatccgaattctgtgccatccctgctggtgtggctccacatttttggcaaatgactgatttttgttttccaaattgtttagcattttctccgtgccaatgccatttcttccgtcagttaccaaattcatttttctgttcctgcgctgtcaatgcaaatggtgccatttgaatttcttaacgaatggacaaaggaaaagctgacattggccaaagcaaatgaatgggacatcgattggataatgaaacgatgcaaaattattggggagaaagaggagaagcagcagaaagatgataattgggacaatgtgttcatttggcttttcggtaccactaatagcattgggtgagcaattaaaaaaagcatttgatttttatccgaatttgaattttgcgcttaatttaggccattgtctccgccaccggaagaagttgaagaagacgaagcgggacaaagcatcacaaaagggacgtcttctgctgacaaatgagtgacggacaaaagaacaaaatcaatgagcagacgcagaagaaatgaatattaattgaaaatgaccggacgatcataattcatcagtgatcaagtgcattttatgaagaaaaacctctcaatttcggtaaataaa

SEQ ID NO: 81183 - DNA, 378 bp, Heterodera glycines
atggtttgtcattgtacattagcaaaaacaaaaaaaaggctagtaataatgcttaaagtctcggtttcatctaatgagaaacttggtttttttggagtcgcagtctcaagtttcagcaggagccaagtctcggttttggtctcgactttcgggggagggggttagtctcgagtagcttttgatttttcgggcgattaaactccccattttggtctcgagattatcaggtctggtctcatttaaatgaggggtcagtctcagtttaagtttttcaggtgtcaagtctcggtttaggtcgtctcaactctcgggggcacagggcaagccttgagcccaggggttaaaatctcggtgtattagggacattttgccaataaa

SEQ ID NO: 81184 - DNA, 215 bp, Heterodera glycines
attataatacgtattatgtgatattattatctcccggcagatcaatgggtgagaccaatgcgatgggaagaataacacaacattaaccccggcgggggtgagaataaatttaaaaagagaaaagaaaaaataattattgttaatttatgattttaaaaataattttatttttcaaaacatggcaggtaaaacggattttctgtaatagctctgtt

SEQ ID NO: 81185 - DNA, 62 bp, Heterodera glycines
cgaaacgggagcgccgaaacgcgagcgccgaaacgggagcgccgaaacgcgtgggtccctaa

SEQ ID NO: 81186 - DNA, 249 bp, Heterodera glycines
atggaggacaaatggccccaaatggaacaaatgagcacccgaagttgggcaacgggacacatgatcactccaaagtggtgtaattcatcacccaaacagtgcaaccgatcacccgcaagggataattgatcaatttttattgatcaagctcggagagttttattttcagttgaaggaactcatccagttcagcgctggctcgtcctcttcaacctctctgattgctgctggacgccattttggcactga

SEQ ID NO: 81187 - DNA, 273 bp, Heterodera glycines
atgctgttctgtggagctgtcgccggcaaaagtgatgattccgccgtcgcgcttggcgcgtacaaaggtcgccggaaaaaaaatccccaaaaattttaaaatttaccgaaaattttttcaggaaatgcccaatatcatggacattgatgacaacgaatacatttcttgaaggactttgaattaatttattttgttggagcaattttttaggcggatcgttcgcggatttattgaggctcaacggacggacaaacgaaaaatccgttttttaaa

SEQ ID NO: 81188 - DNA, 492 bp, Heterodera glycines
atgtatgccaattttccgggcacttgccgtgccgcttcatcatcattttcggcacaccgccttcgtctgctgctgattgtggtgatttttgttgtgctatcagtggtagctgatgttgcccatgcgatgggaagtatgttctcaaaaaatcaatccgacgtgatgatcggaagagatttatccgatgtggtgatcgggcacgctatgtggcaactttgtatgaaccaatgcggaaaacacaatgccaatttggctctgtgcgaagcgggcttcggctttattataaacaggaagatatgcagatgcaaaatactggaggaaaaatgcgttccattttcatttggtgaaccattgccggatgtaccagtggatgatgacgatgaatatatcaattgttttcgcaactcataaaaaggaattgtggttgttgcatttattattgctttatttagatagaaatatatatttgctatccgttcattaaaatgtaga

SEQ ID NO: 81189 - DNA, 1933 bp, Heterodera glycines
atggtacttacacgtaataaaactgaaaaattcaaggaaatgagaagttctagcaccgaagcaaatcgaaaacggaaggaatggcgcagggaaagtggaagaaaaggcggctcgacgccaaaaagtgacgaaaattgaccaaaattaattttattttaaaacactgcatttttcagcgctaaagcagaccgaagccgagacaacagcagacggagagggtacattgacccaagccgccgaaagtggaccatcaacgtcaactttggaccttcgtaagtcaataaaaaacaatattttagaagcaaaactttaattaaggcccgcgttcaagcccaaggccattgtcagcgactccggtcaggcaccatgtgcgtgtccgtccagaaactaccgacaaagcaacaaacatggactttacaactaccgacaatgcaacaaacatggatttgacaacgatggacaaggcaactgacgtggacttggcatatgaggacgccgcgacacaaaccgagcagttggacaaacagctggaggagcaggaacaaacgatcagctttctacgactgcaggtccgcaacagagacgcaatgatcgctgatctgcgccgtcaattggaggaaaagatggcaccaccgatggagacaccgaccaccagcaaaagtgagtgaaactaaaatcccctttttatctttttcaaataattttctcttttttaattttagcaactccaacaggacgaccaaagatgaatgtcgatcatttgcagcgcacctcacgtcgcaaattggctgatgaaatcgcggctgtaataaaacgggacagatcacgctcagccagccgggcgtccctcgaacggatcagtcgggaagttcggcacaaatttgctcattacacgccacagaagaagaaacaacaactgccaagataaaacaagtcagttgatccagaggatgctcttctgatcctcaggattgtcggtacacagaaggcttacagacgactaaaaaacactattcgcctgatcaatgccaaatttgatgtgttcccgccactcgaaaaagtaaaaacaaattttagcatttatatttatttaaaaattcaattgaatattgttagctgcttgacatcaaacgccgcatctgtgggtcattgcaatacgcaccaattgagactagtgcaggtgttggatttgtgtgcactgatgttgaggcagctctggaggcgcgtctttcatctgccaaggacaatctgatcagatttggcgacgaaatctacataaagctgagcggcgaccatggccagagttgtacgaagattaccgtctcattcagccaggctgctcggtcaaattctccatcaaacaatttcgtctgtgccgttttccctacaaaggatagccgcgaaaacttggagcgctatggaagcacactttgggaacaaattgacggaataggcacattggcgggcaaacgagtcaagtggtaaattttaaaatttgtttttttccatttttctgaattaaaaggtttatgggcggagacgtcagttttatttggtcaatgatcgggcattgtggttctgcagtgacaacatttccgtctccaatttgcagttgcagaagtgatcatttggtgcaggagggcgaaatttgtgaactccggacaattgatcaaactgttgttttatttaaaaatttatatataataattcagagacgaagtgatcagagggaagagcatgatgagttcgatcaaccggaagaagaaactgacgaaatttcgcttatcaatgtcattgattgatggtgatttagcaagaagaaattggtggtcgacgggagacggacgaagaaaacaatggagaagaagaacaattcgattttgaatagacacagttcgataaaaggtttttcttcgtttttacaggaaataaa

SEQ ID NO: 81190 - DNA, 1490 bp, Heterodera glycines
atggcttttggtgggcacattgcaaatattgctcgtgagggtatttgggcttctttgactggtggatggtattacgaacctgcgaattctttattttgcaacacacttcatctgtacatttggtcgcttttattcgtccttccgattctgttcggtctttctatcaacgggtccaacgaacagcacaattacggtcatgccatcatttatttgtctctcctcggcttcctttttgtgttcatcaaaatgtccgttgcttttctccatcacatatttgacacagttcagcccatcaaatataaatcaaaaaagaacaccgacggattgcaagacgaatcccaggtttgtatttattttctaataacttgtttgtttcttcataatttcattaaattttttacagaaatttgcccgtgggactcgcctttctggctcttcgatcagcgccactcgtccaattggaagtagtaacgcattggaagcaattgaaatggtcgacattcgcaggaacattaaccgtttgaggaacgaagctgacacagtgaataacgaacagagtgatgggtgtaaaacaaaaatggacgatgaaaacactgagagagaaagaaaagggtgtgaattgattgattcattagaaccgaaaagactaataaataaatgggtctaatgcactttatgagtccaatcgacttttatgagtccaatcaattgttagaaccaaatagactcacttgaaaacggattttgtttaggaatcgggaagcttattaccattcgttgccttccttcggtcattcaaatagaaactccccgtcaaaaaataaagttgacaacaatcaaaatgacgatgcttgctcctcgaggtcctcaacctcggcttccgaattatgttcagacaatttcctgcccaacccaacgaacagaagacgaaaaggcagacattcggttggagttgaattcgcaaacactgctgacagttttggtattttatcaaaggacagttttggtattttatcaaaggtactgattggtgaaaaaacattatgaaatacgcttttagaataatccaccatttccacaacaaaaacaacgcaaattttctgaaccaattgggacgaacagagctaacgccacacttaaaaaacactcgccaggcgaatggcacgaaacatttggacagaattggcaaagtgaaagacgaaaaaatattcagaaagcgaatgaaagatcgacacttctgaggaataattcgacgaagaacccaaaagaactgagaaggaatacgatcagggaagatgaggttggaaggactcaaaaaaaacaattcaaactttaattgtaagataaaacgccgtgcaaccaatttggccttgggagtttttgttgacggaatcgaaatggataacacaccgaaccaaagaagggaacgtgaatatttgttaagagatatctttatgagtggcgctgaaatgaatccgtcgtcgggtttt

SEQ ID NO: 81191 - DNA, 1191 bp, Heterodera glycines
atgcattttctaattctcgtgcaaatatttttaatttgctttacaaatacctcgttgaatttgacattgtcaaatctctttgaatcatgcggaaaatatacagtggactcgctgcaaatgaagctccgctacaactcacataatcggagcagtccattagaaatttggatcagcagtgaagatgattttcctggcccacttggaatggtacaattaaaattttaaaatttagtggtatatttttcgaaatttggaagataaatccgttgggataaactttaaatttatttttttacagaaaattaacattataaatccaaaaaatgcaataaactaaaatccaccctataaattccataattcacatattcagacatcgattggtttttttgtggacaatgatggcgtcgtaaaatgtgcggctgtcaacttttttaaaggctacgaagggagaagaattatgacaaaaacccgaaatgttatggaacaaattcaagcaagattgccaagattccaacggcaacacatcatcgaactttatgatacgtaagtattttcgaaatcgcataaaaattgatacaaaattcctaaattttaaaaaattcggagggcggaaagctctttcctaggtctcaaaaaaaatcggaatcagaatgattacacggtgactcattaaatgatcggaattaaaaactgaatatggatctcatctcaagggatacatttttagcacaaaaaatcgcgaaataggacctaaaaaggaagaaaaaaaacaaatatattttcggatcaattttcggtaaaatttttcaattagcgtgttttttctgtaaattttcgggtaatttcttaagggtgtattttcgttttttttgcatttcgggtaatttcttaagggtgtatttttcgttttttttttgcatttttgttaaggatttttccgaaaaccctgaaaataggcgccaaaaattgcgaaataagcacaaataggcgcctaatctctgatttagaggcaatgctttgcgttttaatgaagaaattttgatcatggagttgagcattgaaacttttcatgatcgactgtacaagcgcattgattcctataagaatgaccaagaaatgcagaaatatatccggcaattaacacaaccaatcatggaattgcatcagggcacatattatgctaattaa

SEQ ID NO: 81192 - DNA, 228 bp, Heterodera glycines
atgaaaatcactccatcaaattacatgtacgtttctgtgaatgacgaacaaatattgaaaattaaaaattttgaaagtgcaaaaataattgattcgggcgacaaaaatgaaagttatctgtttgaaattgacgcagtcgaatcattcacatcattcaactcagaatatatgggcccagagaattatgcacaaacgaaagaagttcgtttccattttagtatatcctga

SEQ ID NO: 81193 - DNA, 695 bp, Heterodera glycines
atgtttctgattgaccaaaatgctcttattaagatttcaacaaaatttgacatctggtctcttggaatgattattattgagattcacgtagaccaacttcggttcgcagaaggaaagaattcgttaaatgaggtcatttattttcatgtgattagagtttggcctggatctggatcctgccgggccttgattcttcctggatcaagatccagaccgtttttcggcaacctggattttccctggacctgttttcctggaattttagcaagaaacaggttcaagtccaacatggaatcaatgtcaaggatccaggtcaaggatcaaggtccaggattttccatgtcgaactcagcgtatgattaaaaaccttaaaattatttttaataggcaaatcgaagagtttaccttcgcgaaatcggttatttgtaccaaggatttgaacgaaacccaacattggactccattggcttaaataaaaatgaagaaattttcaataatagcgcttggataaagcaataccacaaagcaattagcattgtcttacaattatggcgcaattttcccaaaacggcacatcttgtcactgtttgttaaaataataatttaaaatgttttaatcgcctctttatttaaaaaaaattctgtcagttttaattaaggcttcaaatgaaaaataattaattaaatattaaaaa

SEQ ID NO: 81194 - DNA, 2110 bp, Heterodera glycines
  unsure (1)..(2110): unsure at all n locations
atgacgaagaaaattgtgagcccgttcaattcaaacgtggagaaacaatccggggagctctttgtctttggtatcaaggtgttaatagtttttttttttattatttctttatttccaggctttcgatttatcaaaaacagaaaagatggtagctggttcaggtgcgaacagcgcaattgtccagcgacagccaaattggacgacaacgatttgatgacaggcattctgggcgcaaaaggacatcaccatggttgcgcaccatcgcgttatgatgcagagacgaaacgaaatcagatgaagcgcctgatcaaggaggagccaaaaatgaaaccatgtcaaatccgcgctcaaattcggactgacatcgacgatgaagtcttcgaattgctcggcaccaatgaagcgctcgaccaaatggcgaacaggtagacaaacttcagagaaaataatgatgcaatatttagaacaaagaacaaattcgttggtggtgtcaactgtgccgacccactgaacatacaaattccgcctggtcttttgataaagaatgatgagtccgtcctcatttatgacagccgtgaagtgaggactggacaatctgatgttgtcctgattttcagtcatagcaaggcaagtcaacctatacttatgtcattttttaaattagtttaatttcagctgttgtcagtgctcaaacagaatcgtcggtggagcctcgacggcacattccgcagtgcgccaaagccgtggatgcaagtgttcgtcatcggttgttatgtcaacaaccgaatggtggttgcagcgcaagccttgctacctggtaaagcctcgaagtattacacagaagtccttcaacagttgaagcgtgccgttgaacccatccttcccataaaaggcaaaaaaacagcagattatcttcattaataattattttaagtgatgagcgacttcgagattggaatgctgaaagcgatgcgtcatgtcttcccgtcatgcgaacgctcgggctgcagcttccacatggcgcaagcggtgttccgaaaagccagaagcatgggcatttttaatttgttgaacgaagatgacgacgaagcaccggttcaaaggaaatccgttcacaaaacattcaggtgtctttcattagcttatgtgtatttatttgttttttcaaaatcagatctgttctctctttggcactcattccgccactttacgttcggcgcgctttttcaactattgtcagcgcggcaccgcttggagttcaaggatggctggcgtattttgccaaaacctacattggcaccactcaattcgagattgatcgcggggcggaggcatttgaaccgcatgctgatgtcggacactttcttctgcgtcgcactcgaagcacaactcgtaaatgcacctattctgtcatgaaatttatgaaatttttcaattttagcgttcagtatttcccaggcatccataatgacaggcagtggaccaatacaattcggactgcattcgccacaaccttcaactccaaccattccattgtcagaagaaagcagcttgcagcttattccacgctgggaacaagacatcgtctgtcctccacgcttcccatctcgttttggaatgtgtacaccagggctcaaatggcaattgagcgaacgaacaacggcatggaagccgcgcatggacaatttgcagtaaaaatttgtccgttggaagacacttttttgttaatttagcgtgaactcaatcatcatccgtcactgagtgatttcatcgctgcattcatcaaggacatcgacaaacaactggacattggacgagcagaacgtctccagaaaagcacaaaacgacgacaacggtacatcatcaaagaacaaaatgtggtgcgtatccttgacgaggctgactttgaatcgcaagaaggattgacaaacgccttgaatctgatcggacttgtaatgcaaggctttgttgagggacttcacatccgtggaaatgaagacagtgaggaagaaactgatgataccgatggaaattgaatttatgattttaacaatttttacttttatgatttttaacattttactttttttttcttcggangtttaataaa

SEQ ID NO: 81195 - DNA, 726 bp, Heterodera glycines
atggatacatcagcaatgcaaagtgcagagagaatacagaaaaatgagagagtggaagaaaaagggaaaagatgcaaaggagtagagagaatacagaaaaatgagagagtggaagaaaaagggaaaagatgcaaaggagtagagagaatacagaaaaatgagagagtggaagaaaaagggaaaagatgcaaaggagtagagagaatacagaaaaatgagagagtggaagaaaaagggaaaagatgcaaaggagtagagagaatacagaaaaatgagagagtggaagaaaaagggaaaagatgcaaaggagtagagagaatacagaaaaatgagagagtggaagaaaaagggaaaagatgcaaatggccgtcgcggaggggtgggaaaaggaatggacggacggattgggccaaggaaaatgttattgaaaaacctgcgttaatcggcaaaactcctaatttttcgtattaacaaaatttgaactttaaattttgaagttttttcgagaaaaatgaagcagggccctagcatgttttcgaactataacttttttctttgccaaccaaatccaacattgttggtatcattcgaaagcttaacgtgtttagaagcaatttttaggtaaaagctaaaaatccgagccctagtcaaaacaaatttttgtaaccgaatgaatggattttaggagagaattgcgaaattgacaaaaacagtcgtggtaataaa

SEQ ID NO: 81196 - DNA, 171 bp, Heterodera glycines
atggaccgaattcgccgtgtcgcctcgaatttgtcgctgactgcgaagggacaaagagaacggcgacaaaatttggcattactttggggaagaggagaagcgaagaaagcgaaaaatggagaacaaaaggaaaggacgaaggaggagggggcattgagcaaattgtgtaag

SEQ ID NO: 81197 - DNA, 711 bp, Heterodera glycines
atgtcagacaatccgaaggaagctgagagagaaatggaaaaagcgatgtaaacaattagctacttaattacctaatctaaatttgaacttccatgataatcaatctgtttttttcagcttcatctctgccgactgttggctggaagtgttcgatttgctgcccatttaccagcttggccatggaattgcactgatcagtcaccgatttgaccgccgcgttgatgaacacttcaaaacgcgcaaatggacgttggacaaattggaaattcgatgcaaaattggaacaaatgaaatggaaattatcaattcaaaaggaaaagcattgccaatccctcaaaatccgttgccgaacaaagtcatcggattcagaagcattgagattttgtaagaaaatgaaattttcaaatgatctgtgacctcaatcaatcatactttctgatttgcagcttcatcgactacaatgtgctcacttttctccaccattttcatcgttttttcgccgtcatttcgacgaaatggtacattaccactgaaaatgttcgcattttggagtttattgtgctcaccatttggccaatgttcaagcacccaattcacgaaatgattttgagccccgtcatttttcgccgaatgcgtcaatttgccccgtcccattctgtgcaattgtccgtgcctccaaactgtctctctcttttccgacattttgcttga

SEQ ID NO: 81198 - DNA, 1130 bp, Heterodera glycines
atgcaaattgtcaattccgatggaaatccattgccaatcccgcaaaatccgttgcccaacaaagtcatcggattcagacacattcagatcatgtaaaaattgattagatttttcatgccatcacattttctgcttttcagttacatcgatcaaaatgtcatcacttttctccgccgttttcaccgttttttcgccttttgttcaatttacttggacattcgcactgaaaatgttcgcattttggattttgttttgctcaacgttttgccaatgctccgcgactccattcgtcttatgcttttgaataccatcgcttttcgccgtttgcgccaattggccccgtcattgctcaacaattgtccattccttcgcgctgtcgtgtttgaagacgccattttccccgcttttccgcccgatgacagtgccaatgcgtcggatggccaagcggtgaccaaatggttgttcacgcctcgtccggatggtgtgccgaagtggctcacaatcagatcctttgtggattcaccggatcaatggtcgtcaacgatggaacagctcaaagcggtgattatccctatttaattggcttttctatgattttttgtccgctttttaggcattttccaatgcttcttctccggtttctttttgtattcactttctgatgtcttctccgcttgacttcattgttccatttgatctgatcaacgaagtgactggggagaaattgtttcttctacaatctgaaaatgatttttggctcatccgttttcaaattggatgggatgagcgaaaatgggacaatgtgaaggataaactgaaaaatcgaacgaacccaattgtcattcggatcaaagatggcggattcgacgacgggtgaacaatttaaaatgcttaatcattttatgagtccaatcgtcgacctttgcttaaactttttgctttcaaatcgtatccaaaaaggtacggtttgttttgaaatggacagaattatggtacaaaaaaatcaaggatagtcagttggttggactcataaaatgccaatgtcttttaatttgcaatggaataatcatcgttttttcagtcttctcgacgacgcttctcccgggccgaatgatcagcagcagaaatga

SEQ ID NO: 81199 - DNA, 1516 bp, Heterodera glycines
atgagaagaaccgcaaattgttggacttgttggatgctttggagttcaaccaggttttacccagtgtatttacacatattaatcggtacaaatgctaaggtcgtcatttttcttcgttcggtcagccgttgtcgtgcattgaatcagctgttgatcgagcagaacttcccctccatcgccattcatcgtgcaatggcacaggaagaacgtttggcgcgctaccagcaattcaaggacttccaaaaacgcattcttgtcgctaccaacttatttggtcgtggaatggacatagagcgcgtgaatatcgtgtttaattacgacatgccagaggatactgacacgtacctccacagagtaagcaacaagcaaaggaatggctaagtcgtccaaattaaattaggttgctcgagctggccgttttggcaccaagggattggccataactttcgtctctgatgaaacggatgctcaaacgttgaacagtgtgcaagatcgttttgacgttactatttctgaactccctgatcagattgacgtcggaagttacagtaagatctaccaaatagttaaattgtacacttcgagttaagtcgaaacacgaaccggcaacaatgctgcagccgaatgatgagaattaagatggatgatcagtttattttggatttatattgttttgtgctgtcaatctacatcattttcattttacaccgattttgtttaaccaatttaaatcggtcgagtaaatttggtatcattggcatatttttaatggttgcatattgttttcccgggccggtcccctaaaaatttctaagatttggatacaactgaccagacttgagtaaaaagaattgtttttgttctgttgcagatcggatttcggttcctaattttaacctttttttgtcctggactcaaaaacatgttagggtttttgaaggttcttactacgaatctgaacgcggacttgcccaattcagttctcgaagcccggggttcgaaatggatgccggacgtgtagaatccttatggatttttcgcccttggggcatgaaaatttgtttaaacactatagccagagaagcctatgacttgtccttttttaatgaattgtcctgactttagctatgttgcagaatagtggtccctaaaaattcgattgtgatgatcacgaatctgacaaaaattactttcagcacttttatagattatgtagggtcgacaaaaccaaagagtgtacccttttaaaactgcgatgctcaactatataatgagtagggccgcaacttttagtgaaaaaactttttttttgctcaattgttttgaagaaaggagcttaaaaaacgcatttctgcattaaaaattttcgattctgatgtcatcatcggtcactagaaatcactattttggcgacttcgtcactaaaatagtgaaaattcactattttggcgttttgtcactattttttcactatttcgacattttttggaaaattccttaacaaaaatgcaataaa

SEQ ID NO: 81200 - DNA, 1388 bp, Heterodera glycines
atggacgaggaacaacttttggattatgaggaagaacaagaagagactcaggaacaacaatcaaaaaatgatgcagcaacaaacggagatgcaacaaagaaaattaaagtaaaaagtaactgactcaaaaattcatcaaaccttttagggtaattatgcgagcattcacagcagcggattccgagatttgatgctccgtccggagttacttcgtgcgataattgattgtggatttgagcacccttctgaaggttgattacataagaaaaagctttttgtctggaacgggcccagagggaacacacgaaggagcattaataattgttaatcgaattccagtgcagcatgagtgtattccacaagctattcttggaatggacattgtctgtcaggcgaaatcgggaatgggtaaaactgcagtgtttgtgcttgccactttgcaacaactgacaccgactgatggcacgggtaggacatttcaatttaagctccttttaagcagcacattttagtctctgttctcgtcatgtgtcacactcgtgaactcgcctttcaaatttcgaaagaatatgagcggttcagcaagtacatgccaggagtgaaggtttttactaaattatgttacagccttcatgccccgggttaaggtttctgtgttttttggtggtatgccgattaagaaagatgaggaggtcctggccaaaaacactccgcacattgttgttgggacgccgggtcgccttttagcactgggacgcactggacatctgaagcttaaaggagtcaaattcttcgtgctggatgagtgtgacaaaatgattggggatgctggtacgacttttccaactttctttcctatcctgcaatttaagacatgcgtcacgacgtacaagaaatcttcaaaatgacgccgcaggagaagcaagttatgatgttcagtgcaactttgcctcgggagctgcgcgttgtctgcaagaagttcatgcaggaagtgagtagttcggttccttctttgctgcggttagcctcttcgaatcggcggtgttcggataggccttgtttttgcataaattcttctcaacaattgcccgttcgttgtctattcaatgagccatgaaaactgacgacacggggagggagctcaacgtcaatttgagtctctcgaaccatcagcataccaatctgtccggtttgaatggtgctgatgatagaagcggagtaattgttacgaggttttgttatttttctcttgtttcctttattgttatttctagaaatcgtgcgattgctcggcgaaatgggtgcctcaaatggctattctaactcaaagagagagagacggacgttgtgcttcacaattgagtgtggggagaaaaaggatcagatga

SEQ ID NO: 81201 - DNA, 2695 bp, Heterodera glycines
  unsure (1)..(2695): unsure at all n locations
atggaattggacgaaaaatcgaaaccgctctgcacaatcaacacccactgcggcctatttcagtgccaacgtctcccagttggcgttaaatcggcaccatccattttccagcacttgatggaccaaatctgcgcaggaattccaggggtcttctcttatttggatgattgcctaatcgcctcaaagaccctggaagaccacgtcaatgcgcttcacacgctttttcaacgcatcaaggactttggcctacgaattcaactcgaaaaatgcaaattcctccaaaaagaattactttttctcggccacatcgtttcctccaacggcatacgccccgacccagcgcgctcagaggcaatccagaaaatgcctgcgccgcatgacaaaacgaccatccgttcatttttgggagcgctcaattattacggacgttttgttaaaccaatgcgagaaattagggcgccattggaccaactcctccgaaaggatgaatcctggagttggggagatgaccaacagtccgcgttcgagcaagcaaaggcaattatggtttcagaacttctgctgacccactacgaccccacacttccgatcgtcgtagcggcagacgcgtcaaaagatggcatcggcgccacaatcagccacatttttccggacaaaaaggaaaaagtcatcgagcacgcctcaacagttctgaccaacgcgcagcagaactacagccaaattgagaaagaagctctggcgcttgtgttcgcagtccaaaaattccaccggatgcttttcggacggaaattcacactgctcacggaccacaagccattgctggccatcttcggctccaagaaaggcatccccatttatgccgccagccgactccaaagatgggccctaatcatggccaattacgattttgaaatacggtacatcaacaccgcatcatttggccaggctgacgtcctctcgcgcctcatcgccaattatccccgaccagaggaggatattttgatcgccaacatctgcaccgaaaccgagtgctacatcagcaccattctgcaaaccaaaaccgaacaacttcccgtcactgcagacgaaatcgcagaggcgacaccgaaagatgagattttaaagaaaattttggcattcaccaaatcgaattggccaaagaaaagcagcgacccggacatcgcaccgtattttccgaaaagggaaaacattttggaaattgaggactgtttgctcttccaaaaccgcgtcatcgtcccccaatcgcttcgcaaccgaatgctgaagtccctgcacatggcacatcccggaattgtgcgcatgaaagcactcgcccgccaacatgtgtattggcccggcatggactcggaaattgaacggattgtccgtcagtgtgaagaatgccaaaaggctcaaaaatcaccgatcaaggcaccgcttgccccttggactccaaccgacaaggtgttccaacgggtacacatcgattttgcgggaccatgccaagacggtcacgtctatttcattttggtggactcattctccaaatggccggaggtctaccaaatgaattcaatgacggccgcggcaaccgtcttcacactccgttcaatcatccaccgactcggtattcctgaagaaattgtttcggataacggaactcaatttcgttcgtcagaatttgcggcactctgtaaggagttcggaataaagcacacttttacgccgccattccatcctcaatccaacggacaagtcgaacgtttcgttgacactttcaaaagggcgatgatgaagtgcaaaggcgacaagaacagccttgaaaaagtgctgctctcctacagatcaacaccaaattctgccatcgacggatattcgccagatcaattgttccttggacggaaactgcgcaccaaattggcactcgtccacccaaaaggacaaattgatcagtcggagaaatttgaaaaaggtaagttcaaacagcaccaaaaggactattcaaccaaaatggcacagcaattcgatcggaacaatggcacaaaagctattgagttcctcccaacggattccgtcctgctcttgaattatcgccttggaaaaagccattggctacagggcacaattgtaaaaaggttcaacaattcgccaacataccgtgtccacgtcccaactctcggccgaattgtccatcggcatgccaaccagcttcggcgccgattggattttgaggacaattcaaattgggaaccccccattcaggaacaaatggccattgatccaaatcaaaggacaccgccacgccaacacgcagccatcgatcagcgaactccacctgttgttgatcaggctaggcaaaaggctaaaagcccaattggcgtccgacgttcccaacgcgtgccgaagccggtcaaacgcttcacgccaggttgaaacgaggatgtttcaatctcgagaagggaggtgttggagaaaaagcaaatgtactttgctcatgttcaattatcgattattgatctttacatttgtccattctctcgtccgttccttccccctcacattgtctatttaaaggctggactcttcccccatgttcacttcttctcctgccttcaatttattatttttattcattattctctccacaccgaccccattcgccatttttattatttattattatntctcttcntaa

SEQ ID NO: 81202 - DNA, 574 bp, Heterodera glycines
atttttacctcctcccctcaattgaaaaaagttttgatcacttataaccagatcgatactgatcacttcactgaaaactcagtgcttcgcctcagggaaaattgatcaatcactttgcccattcattcttcacattcggctgatcacaacggtgaaaagcgaacatttcccagcagattgtaatcattaaaaaacagctttataagcttcaaatgcctccccttcggaagcggcggaggaggaaaagccctggctttgatgctcttcggctttatccacctcttgtgccttacctttatcctccctctttgcggcttagttagccttatcccctgtgttgtggcttaggttttatccccacttgtggcttagctttatcccgtccccctcctttatggcttacaattagctgtatcctccccgccccttcccactcatctccgtgtctaatgtccattaaacgatcaccccccccccccgcccgcccctcggctgtgggctcggctcggcttttccaatccaatatttacccaccacttggggcttcttcgtcgcctcgggggaggggtggggg

SEQ ID NO: 81203 - DNA, 1060 bp, Heterodera glycines
atgagtcatccgcctccaattgatgctttgtccacctcaaccgccgcttcatcttcattggcatccacaggcgctgcgcggttagcgccggcgttgttccacgccggcagcgccaagacaaattggacggcgatggactgtgtgtggctggaggaagtgcacaacatacaggcaagaacggaagattacggtaatcgtataccataccgatagtttacggtagaattacgataatcgtataccaattgactacggtggaattacgatactcgcataccgatcaaactcctaaaaatgtctggttttttttttctatgccaaatggccatccctgttattactatttattttgaattatacaaaacgtgccctctctttaagtttctacagtatgcataaaatacagtataacttccccgttttactgttgcagaaccatttgtactggcgccagaacagtcccgtgttgttgctgagcttgtacgcggttgtgtgcacgttcggcacggtggtcaatttgtttgtgctgttgtcatttgctcgggtttcacaggtgggcaaaatgaccgattttttggattttttatttttaaaaatttaaaaaattattgcaaaattatttggcacaatttgtttttttatttaaaaatgtttttctccaaatttcaaataattaaattaattttttaataaataaattctaatattttattgaaattaaaaatgaaatattttaaaataattaaccaatttaaaataaaattttcttctaaaatataaaattattaatatttctcaataaattgtcattttataaatatctgattattcaaattaatctatttaaaatatttttatagtttcataatccgcaaaataacaaaattcatgcttttcttgtaaaaatttgcgaaatgaaaatattttaaatttttttttaatatttttaaaacaaaaatttacaaataaaaaaatatttttaatttttttagcttcgcaatttgcacaattatttcatcgcaaatttggccgtggcaggacctgcttctgtgcacagtga

SEQ ID NO: 81204 - DNA, 208 bp, Heterodera glycines
gtccaagccacgaaatgtccaaaagagtagaaacccacgaaatgtccaaaatttttcaaaatttataaaaacaaaatgagtctaatttaggatttttagggttttcggggtcgctgaatacgaatataccctttatattaccccttgcctaaccttaggcccatctgaataataaaaaactcaaattcgagacttggacattttgtgg

SEQ ID NO: 81205 - DNA, 757 bp, Heterodera glycines
atgtgccggtgtcgccaaggcttcctggacatttcgccaaacatcacgataaagccgggccggttgtgcaaatcgttggagaacgaatgcgtaaaggggtcgcacgactgtgcgcgagacggcggaatttgcgaggacacacccggtgagtgcctgtggacgacattagcatcttgctcgactgtaatcggcttcaaataacacaaaaattggagaattgaagcgctttgggaagggatgggatatattcaggaatgacgaagtgatcatagaaatccgagaatggcttaactgtcttacagattcgtacacgtgtcgctgtgcggccaacttccttgacgtgtcgctggaccgaaagaatcggccgggccgcaactgcaagcggctgatcgacgagtgtgcgtccggccagaacgactgttttccgggcgcactgtgcaccgacacggaggactcgtacacgtgcgcgtgtccgcccaaccatttggacgtgtcgccggactcggccaagcggccgggccggcgctgtctgttgcgcgtcaacgagtgtaacgtgcaggggctgagcgactgttcgccgaacgccaactgtcaggacacggacgaagtcggcatggggttaaaaaaatttcgagaaacatggcaattttttttttaaattcaacggcacacgcatgcaaaattacagggctacaactgcacatgcgcggatggctttgtggacgaaagtccagacaaaaggaaacggccgggccgc

SEQ ID NO: 81206 - DNA, 1594 bp, Heterodera glycines
atgcgactgcgttccattgtccaaaagctgacctgcccgcagccgccgcgtccgcccccttcgcccggcggttgttccgtgcagtcgcagatcggctgtgaccggacgcgtaacgagcactgcgagttggtcaacggcaagccgacctgccgctgtccgggcccattcgcacgccatccgcagaccggcgtctgcggcggcgacctgtgcaacccggaattgccaacctcatgcccgcatcccgaactgtgcgccaagacgccattcagtacgcgagcgtaacaatttgttactactgtattgggatgattaccgtatggcacacccaaaagggcaaatcaaaaaaattaattaatgatgaatgatcaaaaacaattcagaagggagaacaattgttttccctaatgaaatgaatatttattttttaagaaaatttgattaaaaaaatggagttgggagcagcttatcccccccccccctccccccgatttctttaaaattttcaaacagaagtttttccaaaaaatcttcgaaaatttttatatgaaaatttgaaaaaaatacattcctattctagtgatttttcaaatttttcatgaattattaaacaataagtatttcaaaaaaattttccaaaaaatagctgaaagtgttatctttttttttggaattttctttctggttgggcagaaacgatagaaacgataagggagaaagcataatgcactcccaaaattttaaccattaaaattgatattgtagatacattattaaatctgctaaaaatgcaattttctcccgctgcgtaaaatcttgaaaaataccagaaataaaaaataaaatctttcaggcaatttccgttgcgtgtgccccgcgcagcacagccgtgaccaccaactgggcatctgtttgagcagtgtccaacaacgacaaaaccaacaacatcaacaacagcagtcgaacttctcgaactcctcgaccaatgccaactttggcacaacttttgtcagcggtggcaccaatcagaaaccggcaccccaacagcaccacgtgtccactcaatcgaccgccggtggcggcaccaacaacagcgccggcaacggcggcaaattcccgccatgtgcggccggcactgtgccgaacccgcggaccggcaaatgcgcggtgcccggctcgtgcgacccagcggaggagcagccgtgcgatgtgcgcaagcgtgagaagtgtttgctgcactcgaccggccagttccacgcgtgccaatgcttgcatggcgagaagcggcacccagcgacggaaatatgccgtaagttttcaatgttttgtacgacgcgtggcgtgccttttggatttgattttttggcaatcacaacattgcaaatttgagctaaactaagctcatatgtataagatatgcacttcatttacccagcgacttttccctttaaatttttttttaatttttaaattagaaatttttcaaaaaaaaaagaatttttttctaaaaaacatatttcttagtgcgcaacgaatgcttggacaaacgagaaaacgattgtgaccgatcagcaaaatgcattgacacagatgaatc

SEQ ID NO: 81207 - DNA, 1276 bp, Heterodera glycines
atgccatttgcgtcaacgtgttcgactcgttccggtgccaatgcaaacccggctattgggacatgtcgcccgacccggagacaaagcctggccgagcgtgcaaagaatgtgcgtttttaatgatcgttgaaattcttgatgaattattacatattttactaaaatttgcagtgatcaacgaatgcgcaaccgattcgcacgactgttcgccatttgccgaatgtgttgatgcaacggtaagcgatcaaacagacagacattggcattcgcattttggcaagtgattggacaaattggcaaaatctgattacgggcaattacatccggtatgtattttccacaggatggctacgcgtgtgtttgtcgtgatggctttgtcgattcgtcgtcgcagtacgaattgctgccgggcagaaaatgttcaaacggtaatttaaaaaaaagtttaattgacgcttttggtaatggaaagccataacttccaatcaccaccgccataaataaaaaaatggcattcggatgggtgtggccaaaatgggcttaaccatataattaaatgggctgggatggccgtctcggagttggcacgtgtccacatccccccaatcagcgagcaacgaatgcactgatcggtcgctgaatacgtgcgatgagaatgccgactgtgtggacacgccggccggctacagctgcaaatgcatccccggctacgtggacgtgtcctccagcgccaatttgccgccgggccgagtgtgtacggttgtgaccacgtgccccaaacagaagactgacctgatgttcctcatcgacggatccggctccattgggtcggccgtgttccgcaacgaggtccgtttcatgggattcatttgatcagctatatttataactgatcggagcaatttgtctgatcattttttacccataattttgtcacaaagtggataaaagaatgaaacgtcgaacataatttatgtgaaaatttattggcattgatcgaataatgactaattaattactactgatcagaaaaactaaacttaggtgccactggtcaaatataatgcgagaatagagcaaataccgagcaaaaataggtccttcgatttgtgcgcgactttgtggaactgttcgatatcggtctggagaacacccgcgttgggctgatccaatactcggaccaaatccggcacgaatttgacctcaaccagtacgtggacaaaccgtcactgctgcaggccatcgcgcaaacacagtacttgaccggattgaccag

SEQ ID NO: 81208 - DNA, 3794 bp, Heterodera glycines
ttgattatggtcaaaatgccccagaaaaatttgttttatcgaaaaatccgctatttatttttttcatttccgtttaacccctgtgcccaaatcaaatttggaaaaattcataattttcatatataaaatccgttttgcccacgcaaaaatgccataaaaatgtatggctatagcttccctagattagcgctgggttactacgtcatagccttgttcgacctgcacttagctatttagcgcctagcccaactgtcgccccaattttgtgaaattaattgcctctaatgaatgctgcacacttacggggccgctgcgggggggggtgatcgaaatgatcaaaagaaattaatgattgaaaatcgggaacaccaaattcagttatacagtaaatttaaggttctgtagcacaaatatcatttattagtgatgggatttttaggcacaaaaaattgcaaaataggcattaaaacctacgaatagacactaaaataagcaaataagatttttttaatttaaatttttaggtagcaaaaaatataaaactttactttcgttataatttaatttgaacatcaaattattaaatatttaaagtttttttcaaataaggacaatttttaaaacaaaaatttttatcagtaaaaaaaaaatttattttaggaatgaatttttggttggaatttttcaattcttaagggtgtattttctgaaactttcgggtcatttcttaggggtgtatttttcgttatttaatgcatttttaaaggattttataggcaattaggcattgtaaaattgatcctaaagcctcaaattaagtgtgttatttttttatgcttttctcaccgttacatttgcacacaaaaatttaggcatttgcctaaaaatccaatccctagtcattatggtccaaaaggacaaaattaaacaaaatttgattttttttttacaattttttaattcaatcttttgaaaaattgaaaaattttatgggattttcaacaattattcaatttctaaacaaagattgtaattggattgatgaaagcttgtttccataccgatccatgctttgctgcttatcacatcatcaccgtctcaactccactaaggtgagcagtgccgaaatgcgaactgtgcgccggaggcggaatgcaacgaagggccgcagggcccagtgtgtcggtgtttggccggtttcttggatgtttcggcacaacacgggaagggcccgggcaaagtgtgccgattaattcaaaacgaatgcaatgccggaaaacagtcagtttatcccatttaagattttgatcgaagtaactgatcgacccaggaccgtatccaaggggcgcggggagagcatatcccccaccgaaagaaaaaataataatccgcctgtcggcatggcacaattgattaaattatttaattcgaaaattagtccaaatttacgttatttttctattcggttgataattatgtatttgaatttagcgattgttcacgggacgccaattgcattgacaccgctgacgcattcacatgtcgctgcaaagagtaaaatttaagcttttcgagaatttgaggccaataatttgaattgcttatgtttaaaatcgcccaattaacaaatgatcaggttttatccccactattttctgttcagaggctttcgcgacgacagtccaagccgggagaagccgggaagggtgtgcactcgaagtaattaggcgctaattaaacagcggcaagattatggagaaatttagtttcataatttaattcagcggaagtgcccgactcgccggaatgcgacgtgaacgacccgatgagttgtgacaagggaaaacacgaggtgataaacagtgtgcagaaatggcatgaatgataaataatggaaaagtgatgaaatgattagcatgactttaaatgggaaagaatgattgattgatcaacaattactagtggatgatttaaaatgatcaggatggtaaaacccagagtttggacacttagatgaccaaaagcataaaaaaggattaaagtgtattcagcagattataaaaaagattttcaatgatcggatgatttagtaagcgtgacttcagttaggggattttgattgtttggtttgccaaaaatgctttatcaaatcaaggcgtgtttgttcatcagcggctcttatcactgctcatgtcccatgggctacgggcgcctgccggacggacgctgcttggccatcaacgaatgtgaagacgcacgactcaacgagtgttcagaggacgcggaatgcattgatcaggtgatcagcaacggcacacacactgaaaatgctcacccattggggggggggggctaatcggaaaattcaatcattaattgactgatgagcaaattggcaataaatcataggaaatgactcaatgatctgtactagaaccatcaaaatttgattaaaaatgaactaataaaataactgctgatctgttcagatttcggtccatttaaaattgatttggctatgtatataaaattcgatttttcaaattatcaactgctgatcatggattggtcttagcttaggacactaattacttttgatcactttacaactatttttgtccaattaaggccgaagcatacacatgcaagtgcaaaagcggcttcgccgacatctcgccgcagggcaaaccgggcacattgtgccgacaacgcatcaacgaatgtgctcaacctcaggcttttgacgtggactgtgacgcgaatgcggtaagtgttcaaaaattattttgaacatgaaatttgattatcttttgagggtaaaattttggaaatccaattgtttggccaatattatcaatttgttgatttaatctgtcggattttggacttgatcggagtttttaaaaatggcattgataaattagtttctcgaactgatctgtttaatgattcccaagatttgcattgacacggaggagtccttctcgtgccgttgtcggcccggctttgccgacatttccgagcagttcaacaaattgccgggccgtcgctgtgtggaggcggtcaatgagtgtctggaccggaagttgaatgactgttccgataatgcgcagtgcgaggactccaaggaggggtatacgtgtaaatgccgggccggcttcttggatgcttcggaaaatgccggaaaagtgagtaatcgactaagattttttatgagaatgaagccaaaaattagaaatgaaaagcaacaatgtcgagctcgtttttttgagactccgacatttacccattatgaggagccgagaaattggggtcatcccgaaaccgaaacctcgtaagtcgaagattcttagtccggaactcgaggattgacgttttgccatcgagaacagtcagagagtcgaagttcgaacccgaaccaaaattaaatatatacaacccaaaatatgaccattctctcggtttccaaattgactgcaaaagcaagcacaaaatttggcattttgccaaaaaccatcatagactcaaaacttggggttggcattttcagtacccaggccgcgtgtgcatcaaatccgatcgcaatttgtcgggcggcagcgcgtcgtccgccttcgagttcgcgcacgacacgtgcgaccccaaactgaaagcgtcggcgtgcaaaggcggcttacagtgcaccgaccgaatgcaaccgggcactttcgtgtgcgcatgtcccgagggccaattcctgtacacggacggcacctgtcgcctggcgacggcatgcgtcagcgcgaatgcgacaa

SEQ ID NO: 81209 - DNA, 917 bp, Heterodera glycines
atggccaaagcattggcggtgcccaaaacggtgttggacatgtggatgaacaaagacttgccgagtttgagggaattggtgcccgcattggttcaattgttgcgcgacaatttcaaacacgagtccatcatgtgccaaattcgtaagtggtaaacttgataatgaaataacgaaattcggttttgaaatttcaaaaaatgtgccgtgaaaatagaacatggaaaagtgccgaaaatggcgggacagtgccggcaggcgacgtcgcgagaaaatttttaaaattttgtgctaaattttaaaactttagcaaccatataaacaaaaatgaatttttttagttcattttagcctaggaatatataaattaattttttaaaattgcattttgaaaatataatttttttttactatttgtcggtattttttttattaggccttttggtggcggcaaaaatgccaaaaaaaaaaaaaaaattttttttttgatggtttacatttaaaacagttattttatcatattgttaggcatgcttttttaaaagtttattacatatttttacacgttgattttttatatttattaataagggtagtagaataaaaaattaattttttttttaaatcgattaatttcaatttatttctactctttttaatttatttaatattattattttttttaaagattacaacgggtgtatcgtcattctcaacaaatgtgatgctcttttgaatattttgatcgcctccttccccaagtgatcggcctttgttttgttttttcaatgaaacgcatttcaaatattttcaccttgccaaacattcaatttgtttttgattttttggatcagtaaattttttgaaaaaaagactcgtctttaatccaacaaaatgaaacccctaaagccatgaataaa

SEQ ID NO: 81210 - DNA, 247 bp, Heterodera glycines
aggcacccccacaaagtgtccaagccacgaaatgtccaaaagagtaaaaacacacgaaatgtccaaaatttttcaaaatttataaaaacaaaatgagtctaatttaggatttttagggttttcggggtcgctgaatacgaatataccctttatattaccccttgcctaaccttaggcccatctgaataataaaaaactcaaattcgagacttggacatttcgtgggctggacattttgtgggtcagc

SEQ ID NO: 81211 - DNA, 1618 bp, Heterodera glycines
gcacgcctcgcacaattcgctgtcccccgcttcctccaccgcagcaatggccaacggaggcggcgctggcagtcaacaccaaattcacgagttactcgccgcattggacgccaaggcaatcacaaatggcacagcacaacagcagacaggccaacggccgagcttcaatctgtcagacgacgacgcggaggcgcaccagcaccaacagcagcacaacaataaccacggtgggggcagttaaaatactgactcaaaaaacagtggatttgccattcctcactaaactttatgacggaataaatacgaaaacgactcacattttacatctaacaatccgtgttaattaattgttggttcctccttcgttagatgttcgtcgaggcagtgacaagcgcatgtccatcagtgcggtgtccaccacttcggacgcgcaacattcgaccggcactgacggcacagagctgtgcggtgggctagtgaacacgcagcacttccagcagcgtgtgatcaacgtgtccaacgcgccgccggtggcgctcaaacagtcggagtcgggcgagtgggaaatcaagcaaggctcgggcggactcgtctcgtgcgtggacccggtgatgtcggtgagtgatttgtgtaattggccaaaactgcgctgaaatggcatttattgctcaaattattacccaggtgaacccggaaaacatgtggctggccaaccttggcatgaacatcgacaagttcaaaatcacctccactgaatacctcgagaaaatgggccgagacccgaacattggcgaacggatggacccggcacacatcgcagcgccagcgacaaacactttgggtcttcctctgatgaaacaggtgggcaaatcgggtcggaaactttgaaaaccatggtttttttgtccaggcattggcagacgttctgttccatgtcattgcgaacgacgagcaaaaggaggacgacgaatcggcggtcaaaaagcaaatcagagaggaaatgtcactgctcggcgtgctgaacaactacaaccgtggcaactacaagctgaacccggtgagcggcgaggaagtgcaattggtccacatggaaaggactgggcataataaacggcaatgattgtttagacgatcatacagctctccccaataaaatgtattcatctatgtaatcttttggcctttccaggttatcgtccaggagcaggactacaacgtttactacggggggatcagcaacggacttttgtggcccgcactgcacaatctcccggaatacattctgcccgaatacagtgactcgaaggtgctcaacgaacattggttctcttatgttcgcgtcaattaccaggtgaatgggggaggcactcacaaattagtcattttattttaatttttcagtttgccatcgatgcggtgcgaaattcacgtccccaagacttcatttggatccacgactaccacctgatgttgaccggcatgatcatgcagtcactggagcgcaacttggagatcggcttcttcctgcacatcccattccaagtaattttggaatgccaaagattattaattataggagtcaccggggagaaaaggaattagtaacaaattgtttaag

SEQ ID NO: 81212 - DNA, 701 bp, Heterodera glycines
atgcaaagcatttgcagcatttttgagcttaagcttacctttcccctctcttctcttttatggtcatcggtagagctcgaagcgggacgggatcccgagggatccaagttgcattttttgaaaatttcaaaaacagcatgccaaccaaatatttttaataaatttataacaaattcaattaggtatgtaagttcactatgggtacgccccatgtcagacaaaattgctcataacgccaaatagcgcatttggcgtaaatttttgcccgctatttcaaaatttacactgaaaaatgccttttttgtattttttattttgatctgccataactcgcttcattcccaagtaaactgaacaaatttggtatctaaaaaaagattttgaaaaggggaatctttttctaagcgaatgctaagcaatttgacatcccagaaaaaagttgtgatactttcaaatttttatcacgttataactcaagtcctaaactgctgttttcagcaaaaatgctaaaactattaatttctttattgattctaaatgtccaaagtgattttgtacccttataaccaaaattattagaattttcgaatttgatgttttttgtgtgctagagatgtgaaaatagtacgccaaaaggagaggaaaagaaattattaattttgtttgagttaaaattttggatcggagcgtaaaaaaataaa

SEQ ID NO: 81213 - DNA, 477 bp, Heterodera glycines
atgagagtgcctattaaggtgcccgattactacgattacattcccttccccgtcgacttgggctcaattgccgagcgcctgaagttgggctattacactcatgtaacttatcatatattaaatgggcaatccaagcgaactctgagatattactgtgctcataattcttatcaggagcgaatgtttgtcgccgacattcgccggatgttcgacaattgttacaaatttaactcacccgagagccaatattattaccacggctacaaactgaatgaactttttgatcggctcacccgccaacattttgctcattgcaaattgcaggcgccgctgcccgcggtgaagccggagtatgtgccaaacgccggcggaggagggagaaaatgaaagggatttttgtggcattttgtaaatttgtgacggaatttacatcgatctcttgtattttttgttattcttaagtgcctatttacccca

SEQ ID NO: 81214 - DNA, 960 bp, Heterodera glycines
tcagaatttcattcgttcgtttcgtgaacaccacgttgacccgacagcgatcactcggcatgattttgtggaagtgaatggggacaattttatgctgtgcatccccaaattgggacacatcgcttggcaacactggacgagtgagccgagggagttggagcaacacttgccgatccattggttttggtttttatgcggcttttacgtggcattgaccaatcaggtgccattctttggctgtgccattctttggctgtgccattctttggctgtgccattctttggctgtgccattctttctttggctatgccattctttgtccattgccattgcttttcagattcacaaatggtctcacacttacttcaatcttcccggatgggttattttacttcaacaatgtcacctcatcctccctcgccaacaccataaactccatcacatttcgcctcacgcgtgtcgctattggtcagtcagaagccattccctcctcttcacattcaaaccttacaaattagcttaagtcgaattgggccgaactctttaaaattttctttgaaacaaaagattaaacattcttacaattaattagtatctttcgatagcccaagcaaaatttcaaaaaatggccaaaataatatgaaaacagaaattttttttttcgcaggttaatagagaaaatttgggctatcgaatgataccaagtgtgtttaatacgattgtttccaagaaagtttaaagcgttaaactgctccgcactaaaacgagccccgcccagcttaagcgttacctctcgcctattatttttattattaattaccattttcagcatcacaactggatggttaaatccggcattggatgccattggattctggcggaaaatggaatttttggtcagtgtaattactggctggaagccaagagacgacgacttgaaatgggctacaaaattggag

SEQ ID NO: 81215 - DNA, 270 bp, Heterodera glycines
atgggtttttttaaggtgcctgaggaaagtccgaatggaaatgccaacgtttgcatgggcgaggcaaagccccgctgggggccgacccatgccggggccaaacagttggcatcgatgtacggcaaaggcaagcctggcatggggcttaagctgtcatccacccaatctcagggaaacgactccaagaagtcacttgcatttgcgttgcgtcagccctttttctgtcggtcggctgctccctcctttaccactttcggcttgtccccgtcg

SEQ ID NO: 81216 - DNA, 716 bp, Heterodera glycines
atgcagtacaatgcttttaagccccgccgtgaggcgggacagttccaaaattttgtaccacattttactgtggaaagtccaagtaccttattggacaactacgtgtcaatgagcacagtcgcctttggccagttgtggaacggaaaaatgggaatatcagatggggtgcgctcttttctaaaaattcctcttttcgtctaaccatccctcccttttgtgcactatttcgtttcaaaattgaatcattttttttggttttttgaaataaattgtgaaaaatatacgaaaattattttcggttttaattatgctgtacaatgcttttaagccccgccgtgcggcggctccccttttgtgcactattttagtttttaaaattggttccggactttttggctttttgaaataaattgtgaaaaatatacgaaaattattttagcttttaattatgcagtacaatgcttttaagccccgccgtgaggcgggacagttccaaaattttgtaccacattttactgtggaaagtccaagtaccttattggacaactacgtgtcaatgagcacagtcgcctttggccagttgtggaacggaaaaatgggaatatcagatggggtgcgctcttttctaaaaattcctcttttcgtctaaccatccctcccttttgtgcactatttcgtttcaaaattgaatcattttttttggcttttgaaataaa

SEQ ID NO: 81217 - DNA, 391 bp, Heterodera glycines
gcttaaaagcattgtacagcataattaaaaccgaaaataattttcgtatatttttcacaatttatttcaaaaaaccaaaaaaaatgattcaattttgaaacgaaatagtgcacaaaagggagggatggttagacgaaaagaggaatttttagaaaagagcgcaccccatctgatattcccatttttccgttccacaactggccaaaggcgactgtgctcattgacacgtagttgtccaataaggtacttggactttccacagtaaaatgtggtacaaaattttggaactgtcccgcctcacggcggggcttaaaagcattgtactgcataattaaaaccgaaaataattttcgtatatttttcacaatttatttcaaaaagacaaaaaaaa

SEQ ID NO: 81218 - DNA, 229 bp, Heterodera glycines
cagataagccgagctgatccacagctttcgaatgtgaaagatgaagacgatcagccggactatgatgagccacaaaatgatgagccagaaaatgaagaaaattcattttgaaatagattgataaattggatctttttggtaagcaaaaatggctttatttaagtgctgggtcgtttcataaatttcgccaaggggtaggaaaacaaaaaatgtaagactataaattaaa

SEQ ID NO: 81219 - DNA, 1057 bp, Heterodera glycines
atggcaaaaaggaaaattgtgtgcaagcttaatgcaattaaatcggcacaaaaacgggtgcaaaatcgagaggagcgacaagagaagttggagagggcgagacaagccaaatccgcaaagaaaagtgagtttttcaccaatttttaactcaaaaatatatattttttttaaattttagccgctctacagccgaatcccaatgccgaaacgccacagcaagacgaagcaggaccgtcaacatctgctgcatccgccgaagaagcgatggaaccgccgccaccaactccaggaccagtgccgacgcccgaaatggacgaggaaattttggaattcgacgacccgccgccgtcgacacctgccacaccaattggcgatttggtgccgtttccgtcaacaccaactgcgccaatggacaccggagagacgaccccgccaccgctggccattgacgagcgatcagagcgcatcgaacaactggagaagcagctcaaggaccgggacgacaccatcaaatttctgcgcgagcaggtgctcaatcgagaagcgctgatcagtgatctgcgtcggcagctggacgagcacatggtaccaccgatggcaccaccaacgaccagcaaaagtgagtgaaaattttccttttttaatttcataaaatctgatcatttttcaattttagcgccaccaaacagaggaagaccgaagaaaagactggatgaactgcagcgcagcgccaggcgcgacatcgtcgacaaaattgtgggcgtcatcgatcgtaatcgctcgcgttccgcgagccgcgcatctctggaccggatccaccgagaaatccgccacaaattctcgcactacacgccaaagaagggccaaagctgcaggagggaatggaagcggaggatggacttctgctgcttgcccagctcgggacgcagatggcttacaaacggatgaaggcgactctaaggctgatcgacaggcgctttgacacttttccaccactgagaaaggtgcagtttttcattgatttttttgttttaccaactttttttgggtcgtcgaa

SEQ ID NO: 81220 - DNA, 118 bp, Heterodera glycines
atgaaatgggtggaagaaataaataatggtgaataaaatgaatggaagtgaaaggaaaatggtaaattaaataaattcttcagatgtaacggaagtgaaaggaatttaaaaatgttga

SEQ ID NO: 81221 - DNA, 157 bp, Heterodera glycines
taggctaatagagcctgtgaagagctttcgaatgatatcaagattgtttgattcggtcaataacttcaagaattatattgactcaaatttggctcagacggagttggccagacggagttggcccgttccgccggtagctgcttctgcacgaagataa

SEQ ID NO: 81222 - DNA, 354 bp, Heterodera glycines
atgagtgttaaagtaaaagaacagatgaaagtgtccggcaataaagcattttttgtgcttttggttcaaatgattggagtcgttttgggtgggtaaaaataaaaatcatttagcatttgatgaattgaaaaacatttttttcattttcttccatttttttaggcgtgctcattgctgccgcgaccggatttttcaatgaataatgttttgctgtgttgtttttttaattcaattttattcactcattttaaatttatgatcaaattttaccattctatgaatttcatttatttattcatttattttcctatttttcaaaaggttatttgtaatcaattatcaaatctcattaaa

SEQ ID NO: 81223 - DNA, 590 bp, Heterodera glycines
atggacagcgatgtctttaattgtgattgagacttattattttcgtgggaaaattatatgtaaataaaaagcacttattgttagtaaaaaatctgatttttttattcatttcgttgttgtcagaattaactaaaattttcaaggaaaatcgttagcataagctaatctcctgcaaaattgtaaaagagactctttctttttaattattcattgttaaaaattttgaatattaaattcttagattgttagcccttatacatattaaatgctttcctgcaaagtttcaagtcatctgaaaaaatcagcttttcaacttcatgatttttttacatataattcctattcttacttattatttagtataattgggttttgtcaaaacaaaaacataagtacccttagctctatccttatttattcttaatattttaactttacagatttgatatacaaaacgtcatatcgtgccaagagagacgaggaagacaacaacggtgacggcgattgattggttttggaagcgatcgattttttcttttgttaaaatattgaagagtttatgattatgaatttaccgttttcccattaaa

SEQ ID NO: 81224 - DNA, 771 bp, Heterodera glycines
gcaccacaaccaacaacatcaacaaaaacagccggtaatgggttaaaacgacaaaaaaaatttcaaaataggtaaaaaaaacgcaaaaaaaaaaaaaaaaattttacccacatttttcatgctctaaataagaggaaagacaattaatttttgttaaaagacttgagttaaaaattttttaattttacagcgcctgagtggaatgtcgctccgagtgccgccaaaatggacgattgttttgaagatgaagaagaaaagcgaaaatcttcttcatcaacgactggaaatgccgttaaaattttggcaattgctgcaggagcagcttgggccttcgcactggcagtttggcgcatgcctgaggtcagtctaataacatgcttacattgagtaaattaaaaatatgaggggcattaattctggcaaatataatcgaccaattcctttttggacgtccccgtttctggataacaaattccatattttcttaaaatgcattaaagaccaccactaagttgttatttctgtttttttttgcattttggaatatttaaaaataaaacaatttttaaattttaatattttctttgttttttttaattcagtcagtaaaacgacataatttttttttccacgctatcaaaaaatgatagacttttggaccctagtcaaatgtgctgtgattttaaggttgatgacgaaaacgaagaacctgaaccgcctgcacagcgctttgaaaatgttgaagaagaaaagccagcagcagatgaagag

SEQ ID NO: 81225 - DNA, 1464 bp, Heterodera glycines
atgtacgaatttcgcattgttgccgcaaacgatgagggcacaagtgtgccagttattgttctgcaggagacaacggacaattgggtgccaccaattccgttcggccaatatgtcattgcgctgacaagcactggtgagttgtcattgttttttaaaattgcttctcagtgattaatttttgatataaaaaatgtgattctaagcctattttgatcatttttatggcattttgtgcctatttaacactaccaagaatttttttccaaaaaataatcattaaaaaaattttatttacatattatagtacatatttggggatttttgtacatatttttagaattttttatacattttatttacatatttcgcgatttttcttacataaaaatggaatccctattcatgcatatttgtcattttttataatatttaaaatttttttgcatattttgccatttttcattaaatattttccgatttggaaatcccttagcaaaaaaaattagcttatgccaaaaactaaattcaaatttgaatgggtgcgcgagtgggtcaacagcgagctttactgccgaaaaccttgagaattttaaacttgcattgcaaaaacagcatataaaatttatagggataatttttttttttattaatttgcacccctaatttcacgctttctgcatatttggtgcatatttcacgactttatttgcatatttatatgcatattttggccatttttcgtgcatatttttgactgccccgatcattagtctttctatgtattctaaacattttcagtgctcgcactgcttatttccgctctgaagaagtgtttgcgccatcggttctccgacttcatgttcagttttgcacttggttctttgtctggctccgccaccttccatctgctgccaaaagtgtggcatcattttcctaccctttgtggagggaggggtggggtggtaatttaaaaaaatctaaaaatttcctaacgaattttgcctttttggatgtgcttcttaccaacagagggaattcataaatgaaaaaagcttagaaaaaactactgtaaattgtactaattttataaatggagagaataattaattaagtggttaatgctaagtcgggaattggaagtcaagaaaagagatgagcgaggaaggtatgagtcacatcaatcgagtccctgagagaatcatcccgagtggggaaatttcctttaaattatggctctaaattttgaaataatttggctttttatgtacgtaaatggattaatgcatttgccttcctttttaggcattttccatttgcaatcccaattttggtctgtcgcttttcgtcatcgccaccatttacgtgtcctttttttctgccaatgccatcaaaattgcgctcaaaatgcgcaaaaacgacgaagaaacagcaggcaatgagatggacgaacaacaggaggaagct

SEQ ID NO: 81226 - DNA, 668 bp, Heterodera glycines
atgaggtacattttctttcaatatttcttagcaaaattgagcaagaaaagtcaagaatagtggcgaaacgccaaaatattggcaaaaaactaatttagtcgccaacttccaaaatttttttagctaattcaaaagatatttattggtcaaagttgaaaatattcaataatttacagtaaaatagttagtattttatttaataaaattttatcaattaaagtggtcgtaaaatatgcaaatgtctgtgtttacatataaaattaatcgttaagttcgagctttgttaagagtgctaatttgtctggaatgggctcttcattccgtaattcaaatttcgcgccattcaaaatgagcatcatactgtactgctgctgtgcaagtgcagagaaaggcgcataaataccgacaaattccctcacaaaagcacttccccccattcattctgtttctgtttccaccacctgccttcgttcaagtagaaatgcgcgaaaatcttcgtcttatcgccccttttaaatcttcgaatccctattttcgcatttttatatatttcttaccaaaatgcaattaaaaatgcacccataaataccgacctcttgaaagcttttcgaaaatttggaaaaaagtatcaaaatttctttaaaatttttggagaaaaaacaaataaa

SEQ ID NO: 81227 - DNA, 858 bp, Heterodera glycines
atgagtgttaaagtaaaagaacagatgaaagtgtccggcaataaagcattttttgtgcttttggttcaaatgattggagtcgttttgggtgggtaaaaataaaaatcatttagcatttgatgaattgaaaaacatttttttcattttcttccatttttttaggcgtgctcattgctgccgcgaccggatttttcaatgaataatgttttgctgtgttgtttttttaattcaattttattcactcattttaaattttgatcaaattttaccattgtatgaatttcatttattatttattcatttattttcctatttttcaaaaggttatttgtaatcaattatcaaatctcattaaaacaagtattttctcaaacctcgcctgttttaactgctgaaccatcttccacagaatcttaaaaaattgatattctttattttaagaaaatttatgcgtatttaactaaaatagtgagtaaaaatgccaaaataatgacaaaatagtggcaaaaagtgtccaaaaattgatcaaaaataattttcattccataattgaagttgggtgtttttttcgtttttactgcatttttattgagaaattttttccaaaaaaaaaaattgaaatagtgtaaaaatagtgacaaaatgtcaaagtgaattttcactattttagtgaagaagcgccaaaataatgatttctagtgacgaaaaatgtcatcagaatcgaaaatttttaatgcagaaatgcgttttttgaactcctttctttaatcaattgagcaaaaaaatatattttttcactaaaatcacggccccagtaataacttttttatttgaagatatgtagaaaattctaataaa

SEQ ID NO: 81228 - DNA, 1943 bp, Heterodera glycines
atgaatagagctttgagcataaaagtgagttttgaaaatattgggttttcgaatttttgttccaattcagatccggtgattcgaaataagccgaaataaatcacatattcgtgatcagcgaccccaaaaacctttagaagcatgttttcaatgctttgtaaaaatttctgccaaaagggggagggcatcatcggtagtattgccaaaattgtatgtgttttcccctgaatacaaccgcacccaaaaaaataaaaaattgtattttaattcagtcatttagcaattattctaacggaaatgggccattggaattatgaaaaataattgatttaattttatgcgatttatgttttattatgactaatttttttgcgcatttaaaaatggtgcccacaatttagcacggcgcgcccaccatccctttgccagccgaaaataatttgagcataatccgtcgaatttggaacagtaagtttttgagaaataatttatttcattataaaataaaataaattttgcaaactcaaaaagatgattttcttttgtttaacacatacacatacaatttttgagaaatctaataatttcaatttcctttcatttttttacaactattttggaaaagaacaaaaataacaatggcaaaaattaaaattttaaaaatattaataatttttcaaataaaagaattatcatttttatttttattccacaacttttgacagatgttttgacgtggcttggtggtttggtcagcaacacgcaacacccgcagcagcaggtgttacgcaacagaaaagaaaatgccattttttttgttaattatttattgcttgtttagcgtcctgagtttgatgagcgcgaccgtaccggacaaactgagcacaattcgacgatcaaaacgactgtaaaaacacaaacatataaatttttggccacttcattttgatttctaatattatctttgttcaatttcagcttttgaccattttccacaacgtgtttgatggattcctgatcggctcatcggcgagggcaccgctttcctgcctgagcatttcggtggcgttgctgtgcaagcgatccaaaaaatgtgagtagcgaaaatactaatttatagtgccaataaacataaaataatgctcaaaaatacatttccaaaaacgctaaaaattgtaagcaaaaaaatacccaattaaagttaagaattttgataaattgccaaaaaaatgatgaaaaaaactgttaattgcaacattttattccatgtgatttttgaaaaatgataaaaaataatttgatcaccttcttatgcaaggtttttctgaatgaaaaattcaatgtttttttaaaatattaaataacggggcaaagaaggaatgtgatgagtaattcataaataacgattaatttgtcactcttttccttatagtgcgccctggaaagtcaatgaagatgaacttggtgcttcatttggttagtgccctgacgtgtgccattgggttttcaagcgggctgctcattgacctgctgctttatgacacggtggtcaagtacggctatgcgttgggaagcggaatgtgagttctgaaataataattttgaacaattccaccccaaatgctggcacccataaaaaacgtttttttactatttttactttcccactttctttttcaggttcatttacatctccgcggtatgtttgtttttttaaattatttcttaagactttgggctgctgggtgaaattcttaaaattaattttaaaactaaaagttcaccattccgcaatttaagcgggaattttattgtgctatttcttgaagtttaaatgattttttgcttatatagacaaaaaaaagcgcaaattccaagggatttttgaggccggaattcatgattataaaaatgttttagtctcttgttcattaaacaataaa

SEQ ID NO: 81229 - DNA, 82 bp, Heterodera glycines
atggccgtgctcaaattctctatccctgtcattttgttggatgaaattctcaaatttgtcgcccgacggatggaagcacatg

SEQ ID NO: 81230 - DNA, 245 bp, Heterodera glycines
  unsure (1)..(245): unsure at all n locations
atgtcatttgagtacaatctcgaaatgtttttggaaaaaagtgaaaacgaattaagtttggaagaacactggttggggatggttttacgaaatgaggaggaaattaattatggaataattaaagaggaagaaaacggggaaaatgcgcagagcaaaggcaaaaagcaaagcacaaaaattttttatggancaacggacactgaaaatgttcttcggatagattttgacggaaaaatagcacaaat

SEQ ID NO: 81231 - DNA, 430 bp, Heterodera glycines
atgctattgcttgtgaagacgcataaaaaaattatgttgcctaaaagaaaaaatttgaaagcgctggcagagaaagcattttccgattcacattttattaaccgggacaattgcataaaggtaaaataatttattaaaatggtaataatcataattattttttaatgtattttagtgtaaattcctttttatatttaattatttattggtattatttagagactggtattttggaaaaagcctgaacctgaacctggatttccaaattgacctggacctagatttcctggacaaaaaatccaggcctggatccaggccgatctctaatattgttgtttttactcagcgaaatttaaaaggactcattaaaatcacattttattttatattttgtcacaaaaagcaacaataaatcgcaaaatggaataaa

SEQ ID NO: 81232 - DNA, 149 bp, Heterodera glycines
atgacgccggaggagcagcagcaattaatggggtcacgtcggccatttcttgaaccaatcacaaaaagcacaaagcaacaaaacggaaagccacgccttaataaagcggacattccgttgaattttgatgcccgacaacacttttacaa

SEQ ID NO: 81233 - DNA, 223 bp, Heterodera glycines
ttaagcattatttatcaatttttatttaaaaaataatcggcaataaaacagtggcccgacagtttggcacaaaatttattctttcattcattccttcgtttgtgccattattctctttgctctcaaaacgtgattccctagcgatgcccatcgacgctgctgctttgtgcttttccattgcgcggcattaatccttcccttttgacagttggcacaaatcgaa

SEQ ID NO: 81234 - DNA, 143 bp, Heterodera glycines
caatgtccaatcgcctgtgacgactccgtccagaggtcaacaaacgctgtctttgtcggctgctttggttcaacagcagcaacaatcgggcacgtacacaccgaacgtaccgcagggggatggagcagcaactgcaacagacc

SEQ ID NO: 81235 - DNA, 488 bp, Heterodera glycines
atgggcattgtggcgcggcgtctgctcaaaaaccgggccattcaaaagcagttggaccgtcgacaaaaaagtcggttgaattatgtggaaaaatttaaaaagataatatttttttttaaagatatgaaaacgcttcgccgtcaacaggcggcagctggtcggtcgcccattgttgtgcattcggcgggcattggtttgccaaggaccgagccggttcatcaagtaaaaagttttacacattcttttttgtttattgaaaacactttttttttttagcgccaggaaatctgcacagtgcccgcccatgaagtcatctacgacgtgccttttgatgggcaaagagaggaagaagacgaggactcattctgatggccttttgaatttaatcccataatcatttaactcatttttcatttgccttttaaatttaactcaataatcatttaactttttttcatttggcttttaattacatacttatatggaaa

SEQ ID NO: 81236 - DNA, 442 bp, Heterodera glycines
atgtctacatcggaatcaaaaaatggtaaaaatctcaattcctcccttaacattaacaatctttcacctacagcaccggacgaaggcgactgcgaaatgcccgatgaacgtgttctacacctcgagtgctttgagagcggtgattatgatgtaaataattgttgaaaattccatttgtttccctcaattttaatcatttcagatgatggaattgtacggactggaccgtgctaaagaaatgctgatcgacttgcgcgactatgcagaggcgcacggaatggcatgtaaacatgtgaagatgctgttgtacaaactggacaaaggactgatcaaatggaagggaaccaagccatgaaatggatgatgagtgatcagatattttggtgacaggacgaaggggggatgattgaactcattggtgatggatgtgatttaaaaaaaa

SEQ ID NO: 81237 - DNA, 726 bp, Heterodera glycines
atggcgatcaacatctccgacaaaaaatcgttgtgcaaccaaatcctcggccaaacggacctcaccgtgacctcgagtggtataaccatcagcggtccccgcctctcgacaccccgtttcattccttttgatgaagcgggtcgttgtaggtgttgtaagggaacggagtccgaaattgacactgtgatcacgaaagaaggcatcacgctttggtgcacccgcatagagaagacccaattcattccattcgatgttgtgtatgatttgccagggcattgttttttccgtctgaaaaataagtctcgtgtgttcaacataccctatggcgacataccctcttctgacacgcacaccactaaacgacggacacacaccaatgaccatcagcatgaactgaagcgcaaagcaaaggtagctcttgacttagtggaggccggactaatggcagatgccatgcaggacggcgcacgttggaagaaggcgaaaacagcaatcaatgtgctcggcaacctccttttggcggaatcgctggacaacacttccgctaatgacactccgctgaaaaatgataccgtagacatcaaaaaagaagaagcaaatgtggaggaagaaaaggtgcaggaagagcccaaagaaaaagaggaaaacaaggaggaccttggagacattgacaaaacgctcgatgagttcttcaacagtattaaagcatccacttcaaacatgtag

SEQ ID NO: 81238 - DNA, 2096 bp, Heterodera glycines
atggacactgctcagcagaggattgccatcagaagaaaattaaaaaaggacgaagcatatgatgatgattcggaacacaaaaaatacagggttcattacccaccttcacctccccggcttccgctcccgcctcgtgcgaaagcaaaaattgaaccaccaccatcgcgtcctaccgccaagagagagcctaaacaacaaaagccaacaaagtttgaactaaaaccatcaaaatttgactccgatttacgaccaaaagtcgcaccgccgcctcggccgaaaaaagaacctgaattcccgcttgaccctcggccatccacatccaggcaggctggacacttgcctcccccagcacccaaaattataccaaaacctgaaccgacaaagaggcctgtaccataccgtatcccgaaaagagagccaaaaatagttgaacaacagccacagccgctgcaacaaccccttcctgcttctgccgtcgaagaagaaatgcccaccgttcctccgcctaggcgggggaccaaacgccactaccccgtaaatggtgagaatgatggtgaggtgcgcattagaaaacgcgtgaggcaagcgcgaagggtgagagtacagtactcgcccgaactgggcccatcaacttctgcacaaagtgatgaacaacagcaacaacaacaacgtgaactgtttgccattccatcaaatcagctgaccatgactcagcgggtggaacgactgtacatcaaatgcaaccgttacgctgatcgtatgggcgttcgaggaaatacaattaacacagcaaacggcaaaccgttggcgcatagcaatttgcgaatggccctcaagtatataatagaccggagagcgggccgccccaccattaagccacctggagcggccatattggaagagaggcttaggcaagacccaattttgtattcatggacggctccgtcaaagaggccatcccaaagcaaaacaacccggacgccgcagacaatcaagaaggaatttcgcccgaaaaagtggagttgatcaacaccacacttgacaaactgtacaatgacccatcctccccagcagcattcgccggtgttaccgcactgtggaaagaggcgcgaaaaaagttgaaaaatttacggaaaagggatgtgcagcactatttggagggacaccgcacgtacactctgatgcgcccccgcagggtgcactttccaagggcccgaaccgttgcggcggggttcatgaccgatgttcaagtggatttggctgactttcaggcgctttcgcgccacaatcggggtcaccgatacctgctcgttgcggttgacgtgctctcaaaacgcttgtttgttgttccgctgaaaaacaagagagccgaggagatgttggaggcattcaagcaactcatcgaccaaatgcccatggtcccgcatcgcattttttcagacaagggcaccgaattcaagaacagattgctgaaggaattcttcgatgagcaggaaattaagaaacatgagccagtgcattcatctgtcaaggcatccgttgctgagcgggccatccgcaatattaagcagagattgtaccgctattttgcggaaaaggagacgctgaattgggtggatgcagtacagaaaattgtggatggaattaacagcgctccgtctcgtgttcacggaatgcgccccaacgatgtcaacttttcaaatgcgcaaaaggtgtggaagcgactgtacggacaccctgctcttcaaaagcggacgccacgcttccgtaacgaccagtttgtacgcatgagcagagagaaggggcaatttgagaagggatatttgccaaattacggggacgaaatcctggagattgacgaggtgttgaaagcggtgcgcccgattcggtacaaactgagggatgaacacggggagaaattcaagggcagcttctatgagcaggagctggcgcgcgtcagaaaggatgcagagacgagctaccgcatcgagaaggtttacagaaagagaaaactgtcggatgggtccaccgagatgcttgtgaaatttataggatatcccaatcgggaatggattaatgagtctcagcttgtataa

SEQ ID NO: 81239 - DNA, 307 bp, Heterodera glycines
ggtgcgacttttggtcgtaaatcggagtcaaattttgatggttttagttcaaactttgttggcttttgttgtttaggctctctcttggcggtaggacgcgatggtggtggttcaatttttgctttcgcacgaggcgggagcggaagccggggaggtgaaggtgggtaatgaaccctgtattttttgtgttccgaatcatcatcatatgcttcgtccttttttaattttcttctgatggcaatcctctgctgagcagtgtccatctgctcaatttcacgttgagcattgtagggcagctataggcaag

SEQ ID NO: 81240 - DNA, 961 bp, Heterodera glycines
atgaacgtcatgttgaaaaccgaaggctacaaaaatcgtgaaaacccgcttgcggccagtcctagggaacgtgcagcaacaaagaaacagctcaggtgcaaattatatctcgtaataccacaatttcaccccacccctttggttacttctgaaatttattttatatagttctttttaccggtaaaccggcttccagacgtcttgtactattctatacttctttgcctagtctttcattaaatttatatacagaattaagctaaatcaaattataggacacatttacatttgaatttaaaatttcattgcctaaggtgttactcaggaattgtgagacacatttatgatatttaacattaacggagacacaatatcctatttccccaatactgcacctatttgctggaaggatagtgttcacagatcatctttatattaaaatgggacacatatgtatatataggttaataattagtcaactttttgtgctgccaggcaaacgcatcactcataccactctcgcagacggaacagatgtccagcttgctgaacctatttttcagcattcaaacacttctcctgtctcttacacgtaattacttaattgcctgttatttttttaagtgtataaaaataattattttttgtcagtttggcctttggggcgttggcaacgtttctcaagtgcgatggcctgaacacttctgccgattccgcggctccactttctctctactacacgttcaaccgaacgaagaagaatatcctgaatgcagctggacaatttaaagacaagatcaccaagagagatgtcactcctccgttaaaattctacagcgacttgtgctttgcattgacaaccgggttcaacacaaacatacgtgaacttaacaacctggcacatctgccacttacatcggctaaaatggctttctacttcgagcagttactcgacagttag

SEQ ID NO: 81241 - DNA, 489 bp, Heterodera glycines
atggacaaggaattctaccctcctctggcacaacttgttgactacaagttaccagtgtacggagacccttccaaactcaaacatatcggccatgcacttgcttccaaaagagatggaccggagaaggtaattaatgtccatgtgtaaaaaagtgatttcgcctatacttttataattttgttgttgtttcagcagcaattgttatttttcttgtccgttctgatcgcggtcactggcattgatatttctgccgttatggcttctttgggtgatgacgatttaaacctttctggcggtacagctatggacatctctagtgcggacattacgcttggcgcctccaacgttagaaagaaaactcgtcttgacatccttgtgaagcaactcttcaagacgatcagttgcccctggcttatttcatcatggagcagatcgagatggaagaagtcaaccagctattcaaaaataactatctcattaagcttgtga

SEQ ID NO: 81242 - DNA, 2412 bp, Heterodera glycines
ttgctatttaaccaataactttttttcactgctgcgtatcaacaacaccatgtgtcttttccgtctctcctccttttacttttaaaaactactttcagaattcgacgagaggctgcccactgtcttgtccaaatttacaacagtctccccgaaagccgtcttggcgagtctcccccactcatcgattactttcgccagaattttgggagtaaaacttcgcctgacattccattaccaaataattacgcggccacttcctccaaccttcagaacaatttgcttggacaagttcactcattaacttagttcacgccgaaaacacttcatcttaggctttgcccgctgctattggcttaattcgaggccaagacggaagagagtgtccggaatacgtgttggaattcatcatcaacctgattaggctcaatgacaacagcactaaccggtcatttttcgctttctaaaattcatccgtttttgctttagttattctgacgattactacagaggagcactgatccacgcacttggtaaaagaagggttagggttttttaatttgagaacaaaaggcaaaactttgacaatgtctgaacggactgttgaacaacccgattgtttgtcggttcatgcgcgtggtgtgctgagggaagttacgcatgcgcttaacatggacacgatgaggccaagcttcggccgaattatcagcattcactgcatccaagtgctttacgaagtaaataattgaatcgttgccaaaaagaaattcgattaatcattatttttttaatcaagttgcaaaaacttcgccatctcccaatcgacacggatattttctggaagtttggccagtgcaaaggcatttatgcaccggtgagcaataattatttagtctttttgtatgttgttggtttgttaagttgcggctcactgcgttggcgtgccttgtggcaatgatcagacgaagtcgaaatcaatcattcatcggcacgattcttcggtgagtcgatcgttgggtgcgattacccaaattagcatttagcctcgtcgaattggttgcaaatgatcccgatccctttgttcgtaattctgtggctcaacggctttgtgttaacccgccttttgaatggaccgaaaagtgataacaccttccttaataattattttaatttggctgtatagcactttatatccattgaatacaaaacgtttggccgaccttttgtgggggataatctcggatgttcggactgtgagttgcataataattaattcttcgtgcatttttgtttttcatctgataggaaacacgaattcgaacttctcttaccgatctctactttactctttacgggtctggaataccgagcaatttttcttctttttaaatttatttttgttattgtacatttttttgaataaatattttcttgcatatgaaccgatgatggttggaatcttgtatgtagcaccaaacccaaattaaaattttttgaaactaagtaaattaccaatgaaaggcagtggtaaagaattgtggtccctaatttaactttattattttcggctcaaaatcagtttcccggggttttcgagggtgttgattacgcatttgaacttggatttgcccaattccgaaccccggacccgaattcgaacaaaaagttggaaatttttttttcaaaatataagttaaaactggtcaaattttaaatcttgataaaatttaacgctttaatttattttcattagggaccaaattctttaccattgcccaatgaaaaaatcgcaacaatgcactgcaaattataattatatataattagtgcagtcttaaattttacgataattaatgaaattcactgaaataaaaaataacaattttttttataaaaaagcaaattttgaaaattgcactcatttttcttaattcataaatccacaaattctcgatggcatcgtcaataatctttgcaccactggccctcaaaatttcactaaaatttgcaaaaatagacaattttggtaaagtaggtacctatattaaaaaatattgcaaaaatttacattttttcaccgtcagacatttatagataccgccagaccaaaaactttttcttaaaaattggctgaaaccgggattcccggaaaaacgggagcctcgtcccgggttccatcccgatccattttcaaagtccccttcatttcaaaatttcggtctctagatcaaatagtatcctgtctcacaattggaacgtttcataaatttttaaatgatctttaatttatatttattattaaagcaaaagatttgcccgattttattaatggatgatcacgaatttatggaggggatggagcaggaagatgaggatgagtttatcgaagagccaatgtctgctgatttcgactta

SEQ ID NO: 81243 - DNA, 3243 bp, Heterodera glycines; identical to SEQ ID NO: 16828

SEQ ID NO: 81244 - DNA, 179 bp, Heterodera glycines
aggaagaaatgcgtttgtattacgtgtgcactaactcacagtgtactcatcggtggaccgactgaacgaacggaaaagaaaaaagggacagcggacggtctgagtcctttttctgtttcgatctcagcgaattgcgacggcggaacatttctattcaccaaataaacttaaagccgaca

SEQ ID NO: 81245 - DNA, 146 bp, Heterodera glycines; identical to SEQ ID NO: 56264

SEQ ID NO: 81246 - DNA, 146 bp, Heterodera glycines; identical to SEQ ID NO: 56264

SEQ ID NO: 81247 - DNA, 146 bp, Heterodera glycines; identical to SEQ ID NO: 56264

SEQ ID NO: 81248 - DNA, 146 bp, Heterodera glycines; identical to SEQ ID NO: 56264

SEQ ID NO: 81249 - DNA, 1258 bp, Heterodera glycines
gattttgctcttcgctgcttggattatattgatcaaaatgccgaaactttattcgaatcagaagaatttttgcaaattgatcaaaatttgttgtgcgaaattttcgaacgtgaccaattgaaaatcgacgacgaactcaccatttggaaagctgtactaattaattaattattcgattaaaaataactaatttcatttgttttttcaggccattcgttgggcagacgaaaagtgccgtcaaaatgccgtcgaatgttccgctgaaaatcgtcgttctgcgcttggtccggcacttttcaaaatacgtttcccactgatcacaaagaggaaattttcgctaaatattggtagttttttgtgttaatcctgtttattgttggttgggatcgagactcccgacgcggacatgtcccctgaagatcggtttttggattccgacttttttaaagcacgccaaatttgttatgtataaatgccgaccgccttaacaccctttgttttaaattcataacgtgcccatccatattaaagggatagattaataaatgaataaaaaaatagaaattttttcttaacaaattcagtaaaaagtccgcaaaactgtttaaaagttttaattctcgagtcgaggaatttcgcgtttttatcacagtatcttcctgcgttctgacagtggaagaactgctcgccgtcttacagtaccattgccacccgaatctccgcggtgcgcccggacaatacccaatggcatttccgtgccatggacgcatttctgatcagaaagaaggcacactttcgatggaaattgagaaattgtcggaatttgtgcgagaggaagtgaacagcaggcgattaagcaaatgcatttacacaaaaggattgccgtggaaaatttgggcacaaataagaaccaaagaaaatagtactgagaaatggctgggcttttaccttttctgcaccgctccaaaagaaagtaaattataaaatgctaaatcaaataatttttatttaattaagatggagattggagctgcaaatgttctgccacttttcgaattgtttcacaaaagaaaggaacggaggattttactaaaaaatttgaccattcttttaacaacaaatcgacttgctggggacttataatgattacttttacagtgagtggcagtcaaaatagctttttgtgcttaataaaattgcaaaaattaaggaattgatggatccgaccaaaggattttatgacagtgaagtggacata

SEQ ID NO: 81250 - DNA, 492 bp, Heterodera glycines
atggtgagttcgtcgtcgattttcaattggtcacgttcgaaaatttcgcacaacaaattttgatcaatttgcaaaaattcttctgattcgaataaagtttcggcattttgatcaatataatccaagcagcgaagagcaaaatccttaaaataaaataaatccaaaatttttattgacgagataaacttgttttaggggtttttattgtctggaaaaccgattctggcatctattttggcccaattcgaacataacccggattcgaacaaaaaaaaatcgaaaattcaatttttttttaacgtaaattcacatttattgcacaaaatcacggctcttatgcagtttaagtcccatatttttttcatttccaagaaaaaaacatacaaaatatagggtttttcgggagcgctgatcacgctctgtcatctaattcgaccaatttcgaatctcggacccgaattagaacaaatgtggataattcgaaatttttaa

SEQ ID NO: 81251 - DNA, 1228 bp, Heterodera glycines
atgtccagcaagttgcaggaccgtttcaagctgatgttgagcactggcgaaggggcggacgttcactttttggttgggaaggaaaaggaggtgagttgaacccacaaatgttgattaggtaatacatagttctcaacaggtcaataaccagaaaaaattccgaattgggtagtcagaatttgccagtgttttttttttaattttcaacggctgagaaaaagcagggatttgtagccgttttttgtccccggtcaccctccctgaatttttgtttttaacaattttttagggtaattttatgcgctgaacacgaacctaacaccagttttgacgaatttttaaacccgaattcgaataaaaagtcgaaatttatatttttaatattattatctgattaattttatttgttttaatcattttttttgcaaaagataaatttttttttttgataagtttgagtttttgattttttgttcgattcgcgttcagggttcggaattcatagaaatggatgtcagattcgtgcatacatatacaagggttgtctcgacacccccccccccccccccctcgtcgtaaggggggccggtgtaaaaacgcataagagctaaaaacaaacatcatattcgtgttagggcataaatttgcccttgaaaaaaatattacaaaattttgcaggatagggttaaggacaccggataatttttagcatttttggcccgataaaaccccatccttccatttctattccgagtttatttagcttttgaaagcacacaaatgcgtgatgatgttcgcttctgatgtgtttgggtcgatgttccgttttgatgacaaaaactcaaagactaaaagtaaaaaaaaataccgaaaatatttctaaaaataatttttcatcattttttttgccgactgtcctcacgtaattgaggtgaccgatgttgaagcataagcgttcagagtgatgttgagcttcttttacgcggaagatttgagcgaattgaacggacaaaatgccatggcagtgctttacgcgggtgaaaaatttaaaaaataaataaataattatatttaaacatttttagccaataaatataacgtttctttgctggtcaaagccttgttggattttccgattaatgagttgccaaatgtttttcttgcctttgtcgaagctcgtcttctcaaccaaaatgtgcaaatcgaaatttatacaaaatatttttaa

SEQ ID NO: 81252 - DNA, 74 bp, Heterodera glycines
atggccaaatatggaccaaaatatggactaaaaactgccaaaagccagggccggcacttggaaaatgggcccgg

SEQ ID NO: 81253 - DNA, 518 bp, Heterodera glycines
atggtaacggaattccgacatttctgactttttgcagataaatgtgtcattatttctatcgctcgtttatggtccttaactgtatgtgacaagagatggcattttgtcaggacagagatttttatccgttggacctaatccgagaaatttcaaaaaaataatttgggatctccgagaatcagcggcagcggcatctctccacttataaaatggcattgcactgtttatgttcagatcactcgcgagtcgttgcgcgtcagtctgccgaactgcgacttggaaaaggcattggaacaaccgcagcagcaggagaaacaaagcggagctaatattgataatgataatgaagctgttcaaaaacgtcctcagaaatcgatcaatcactttgaagggatcgactaatggaacaaaagccaaaaattgaatttacaaaattataaaaagtgtgatcagagacagcgattgtttggtgggtgctgttttggttgaaacggttactgatcagctgctgcgcaaaa

SEQ ID NO: 81254 - DNA, 526 bp, Heterodera glycines
atgatcacctcgtccccagccgcctccccatcgaccgccccacgggccgccccatccgccgccccagcggtttccgccccagcgaccgccgccccacgggccccactgcgcggatgcgtgctcgaccaaagcgcaagcgcagaacagcgcaaccaaaagaagcagcaaaatgagacgagacattgcaaaatcaaatttagaaaattgttttttgatgctgaaatccatcgcgagaatgagcaaacttttatggtgattattgaattaaattaataattttgtctaacgattactttacgcctgtttttgtctgttttcgacttttttgtgtctaattcaagcgcataatctatgcctatttcgcacatgttttaaggatgttcaaaaaattgataatgcaatgataacgaaaaatgcacacttaagaaacgaaccgaaaattttagaaaccccaattttaaattgaatttttactcaaaattatccctaaaatttaattttttttttcctttaaattttaaataaa

SEQ ID NO: 81255 - DNA, 831 bp, Heterodera glycines
atgtggggagagattttctcaaaagaaataccttcacaatgtgcaacagatagagaattttgtacacaatcaaatgtcaagggttcaagatgaaaaattgaaaattatttaaagaaatttagagaatactttaatttaaaaattttttgattaaaattaaattttaaaagataagattcataaaactttttaaaatattccataatattaaaatatcaaaagaaaaattatcaaaaaagaataaatatggaagagttcaatgaataaaatgaaacttgcgacaattcatctgaacatattttattatttttttaaaataaatttttggtcatttaaaaaacaaatcttaaaatagctaatacggctacgccatgtgacacttcttaatcacatttttacgaaaaacttgcgcaaaaaatagcatgtcagaagaaaacgaaggtgccaatgccacaactaataaatgaaaaattgtagggagagtttcattattctaaaaagaatatttatcatcggttttgaattttgtaaaaatattaaagttgtgaagtaatttttagcaaatcccgtcaaaaaatgatttatcttgaaaaaagcttcaaaataattttttaagtgtaagtcaaatgaaaagcaataaacaattattgcagggctcggattcgtacttcgatgccaagtacatacttagatttcggcttttgtgcttggaaaattttaactgtacttatttccaagattgtacttggaatcgggatttttgcatatgaatgtaaaaaatatacattttatgaaaaaaatttcaaatttttggcattttgtcaaaataaa

SEQ ID NO: 81256 - DNA, 305 bp, Heterodera glycines
atgaaagtcaacaaatgcgaattacagaaatggaacggatgcaaaaaatgtctttacatggcggatacggtagaaaattctttgcttgtacatttggagattatattagaattttcaaattattattatttatttttttcatattaatttgttcaaatttttcgctgtagacagtggacacaaaatgggcatggcaaagccggacaccttggcggatcgaatgaaattgttgctgagcacggccaaaggtgtcgatgcgcattttttagttgggcaaagtgacaaaaaagaggcaagtgaaatta

SEQ ID NO: 81257 - DNA, 927 bp, Heterodera glycines
atgaatcgaaaatttacacaaaatttgttggtgctctcatttgcattagcattggcaaattttttcagcatttttggccatcccgtggaacacgacaatgaagaagacaatgaaccaaactcacaaaacggtaaccaattaaataaacatttcgggcagcattttttaaatttaaaattttaaaataaataaatttattttacaaatttttaagtggacaaagtgacaaggaattacgttcacaaattggtgaaggatgagaatcatttgagttcaatgcgggaatttgctgttgaatgggcacataataatgcgctgattttcagaaataaagaaagccctaaacggtaattgggtaattaataccaataataaaaataaattaatatataaataaaattaaatgctttctttttttgcagtagcgatgtgtcagtgtttgcgcccgtttcacttttcccgtcgccgtttccacgacatccttttgagcatgcactttccatacaaaaggtgaaaattggccaaaaaacaattaaataatttaattgaaaaattaaaaggaattaattgggcaatttctagcaattaaattattgcaatagcttatttcaacgacctttacaaggccaattaatagccctcattatctttttgacgcctcgaaaaaattatattttacttggaaatgtggagaaaatatgggcttatgatggtgttgctaaaagacatgggagaaatttgttgttaaaatttgctttgccaccaaaagccctccgcccagctccacttgcattggcactttggctgggtcagagggaatcgccacgggccaggcccgaaatcttagtaaaaatcaatgatttttcaaaagttttactttccaaattaaaaggcgctgaacgagctgtactttcgcgttggcactga

SEQ ID NO: 81258 - DNA, 774 bp, Heterodera glycines
atgaaaatttcgaaaaagccattgggtatttttgaccttttgttcttatccacctcttttctaagaaatgttagcctaaaaaatcataatcaaaatttttatttgcatattttgatatatttcaaagatatttgtacatatttccgtatttgttttttaatattttatgtgcaaactgtctgtatgatgattttcattgcttttaacagtttcgtggttttactttatcctccagtccatcagtgcacgagttattttcaatcaaaatgcaatttttatgaattttcagtctaaaaccattttgtatttaaggaaacgtagacccactttccttatgggaattatttcgtcatttttcattaaattaagcatgggataataatgatgagaagaagacgaatttcttcaatattttgacatatttaaggatttccacagcataaccaggggtgccattttacctggaaaacccggcatttgccgggttttgggggtccttgccgggtttttgaagttgccgggtttttgccgggtttttggtgggtttttgaaaatttttgccgggtttttgccgggtttttcaactggtttgccgggtttttgagttttggcgatggcacccctgagcataactaattagcaataatctgttaaacatttattttgaattgataattgggaaaaaaacaaaacaataatctggaagttataatgaaacttattaattgaatagataaatgataaaaaagttaattatttcacagttgaaataaa

SEQ ID NO: 81259 - DNA, 466 bp, Heterodera glycines
atggccaataaaattatttttggtgctaagttgaacctaaaaagtatcaatgtggcgaacctaaaaatgttcatcaaagtaatagttaaattcatttattatttttattttattttcagattaataaatcataatttagctcaaactttattataattaagcaatcttgaaatctttagcgatagctcctctctatgtgtcctctactatcttattgttttaaaaaatttagcaaaaattttaccaaaacttttaaaaccaaaaattctaaaaatccgactaaataatttgtcccgaatttgttagaaaacttaataataatttttttaattaaaaatcttttgtctatataaacatataaagggtatttgttatttaatttgaagttttggcaattctaaatttaaaaattaaattcaaatattattttcattgatatttcttgttattattcactgggaataaa

SEQ ID NO: 81260 - DNA, 1657 bp, Heterodera glycines
atggattctaatagtgaggaaggctcacggaaaatacgccagtgaaaattttaatgtcataaaaacaagttcattgggttttcgaggtcactctgattacggatccggtatacatttcacccaattccgatttcccagacctgaattcgttcaaaaagtcgaaagtccaaattttcgaatttgcaattttggtttaaaagcggcataaatgatcttttattgatgggttgatgctttcagtttatttccgtgtatttaaattgatttttaaccaaaaaggctaatttcgaaaattggaatttcgattttctgttcgaattcgggtgcgggggggggggggggggttcgctattcaaaatgattttcatttggaattttacttttatacttgcacagtgcttttttttaaatatttgtatcactgacgcattttccactcacgcatttcccggtaacggtgagaaagaatatcacttttcaatcccttttttaaaatcaaacaaagtcgttatttttgagaaaaatttcaacaaaattttaattatcaatttttgtatgttaatttaaaaagaaaaaaaataatataaaaagactcgagaccgagattctactccgagaccaaaaacccgtattagaagataattttacatacagtcatggtcatatgtttaacaacactcaaaattttctaccaaatttgatttaaattgattataaaatctcaatatgactatattgtgtatatatgttttatatttcttgtagcattttttgtgggctttataatgataccattcactatcccctgtcaaatgttattattagttacaaaccattttaccaactgcactcccttttggggtggtcataaaggtagcaacaccaagttgatcagatcactccttcatggtgatctgatcagcccattttggctgggaacgagggtaatttcaaaaaaaattaattaaatattatatatttgacattttgttttttaaataattaattttttaagaatatcatggtccaaccagacaaagtgtcgaaaattgacacaatggccagcgagttgggcgtgtacggagttttgatgggcaacatgcgcaccggagaggtgattatttgggttgggatagggtgactaaatggatagaattcaaatttcaaataatttttttttttgtacctgagggtttttcattgccaaagattttttggacattgaaaattttaaaaaaattcataattcgaattcaaagtattgctttgggctaccaatttccaattttcactgtaaacctacgcaaatgaagctttagcgaaactactaaaattcaattttaaaaaaattagaatttttaaatttaaaattccgttttcttcaggtgagccacaatgtgcagcagggccatttgctgaagaccaaattggccacttcggacgagggcggcatttcggcgggatttgcggtgcacgactcgccaattcttttctgataattaacaattggatgatgaaacagtggcatttttagaaaaaataattgatgtaaattttcaatttgctttttattttatggctttcgcttctttaaagcagtgataattcgattttatgcatttttatgtgtttttatgatttaacctttcaaaataaa

SEQ ID NO: 81261 - DNA, 1212 bp, Heterodera glycines
atgtgtaatttcgtaacaggtgaacgctggtggctttccaaagcttgtccctgtctctgtgggaatgaaaaatgcaaatatgacggagattggtgggctaatttggtgcaaaatggcaaaaatttggcacggggtcatggcaaacaaatggcgtgcaaaacagcagcaccattgccattacaacgccaacgacacacggcacggaagtcagttgtcactttgccaatggcactgtcacgcatcgaagtgggcccatcacttggcaatttgccgtgcgtggacatgaagctgaccggggaccagctggcacaactgctcaaaatgaagtaatggcaccaacaaattaacatccaatgaatactaaaaaattaagtgaaaattttattttttgccctagtgataacaaaagaattcagaacaccaaatttgtgaaacttattgaaaatattatgagtaataatgttttttattttgaagcttttttaaaacaaaagattgaaattttgaaatgaacgagaccttgagggacttgaagcggcattgggactaaaatccgttttgggactcacggtgtcggtcaaattttagggtcgagagtcccgtacaagaccgagattttttcaaaaattatcaaaattggaaaggaaggacccgccgccggaagtggcacctttttgcaaatatttgtctgtttacaactcaaaacttttctttctttttttttgctttgcttttcaaagatacttatgcttagcactttatccagaaaaatagttgaaattttttacagaatttatcaaaaatgatcaatttttaggattttggggttcagttttgctctcatagtgagacttggctaaaagatttcgtacaaaaaatgtcctttttgtgcattttttaaaaatttggattctgttatttattagcccgtctgctcggtccggtattctggcaaaaaccctgacgaggccccggtcccgtccgtctctagtgaaaacaaatatcctatattttcatagagtgaagctccgaggaattttttaacctcaatggggggagattttagaaaattatttaaaaaatggaaacccaaaatttatttggcatattcaaatcgatcatagaatagttttattcatttccgtttgcgcaataattttcaataacaatatatgataaaaacaagtgccacaccatttctaaatgaataaa

SEQ ID NO: 81262 - DNA, 482 bp, Heterodera glycines
atgtcgtttagctttgttttgctaattttctgcttgttttatggaggtttgtcatagggatttttaaattaattagtgtttttgttcaattatttgcgcattcatttcttcccagtcgaagtttttgggagtcgaaatggtgggaaatgatctaatgactccttttttaaagattaattaacttggcgaatataaattaaatattttcagttggagaaatgactgatttagcaaaggaaggccaaacgcccaattttgacttttcacaaccgcagccaatggcacaaatggcacaaattgccaatgcaatggcagcgaatggaaacggaaattacggaatgggcaataaattcaacagcgaaggcgaagaaaacatctgtaaaaccagttaattacatagtaaaaatagttgttacttttttagatgaagaaaataatggccaagagaggtaaattaaaacaaaattatactaaaatattaa

SEQ ID NO: 81263 - DNA, 520 bp, Heterodera glycines
atggcggatctggcaaacaaggtatcggaatttaaattcgaaaaaaattttttgtttttttattggccaaaagatggaatttctccatccgttacagacctaaacaaaaaggcaataattgcttcttctttttttgcagaatggccaacaatatcagttggatgcgcttcgaaaagttaatttggcccgctttgtcaaccattcgtgccagccaaactgttgcgctgttttgatcaccactgccgtccgaatcgctagcactgctactgctggtgatcaataccatcagcgtggacagcaagtgccgtccgtgttgatttttgccctccggcgtatttttgctggcgaagaaataacggtggattacggtaatggcttaacactattactgtctgggaccgttggagcgccataatttgggcggagaaacttttctatggtgacttctagaggatggaggactattatcaattattattattttgcatcttggaattcattttaattatttaaaaataaa

SEQ ID NO: 81264 - DNA, 336 bp, Heterodera glycines
tgaaattcccactactgccgactttgtcgtggacaatgacttgagtaaaggcaaagaattgaacaaattgcgagtgatcaacacggagaacaaagacaaaataagcccatataaaatggcgaaaatgtggtgagaattatgagttcagctaacgattttcgaagttaaattataaaattaaaaaaatatatatatagaaacggaatttcccactaattatttctttaattatttttcattaaagataacatattattttaattttaattttaatgttccaggatataccatgcaaagttgttccgattgtgcgtcccgctgcgcgatttcaagtaa

SEQ ID NO: 81265 - DNA, 884 bp, Heterodera glycines
agcgccttgcctccaactggtgccgcctcaacaacagctacagtatcatcacccattggtacagtaatcgcctcaccacatcaccgtacccctttggctggcagtgaaaattgccttctcatcgcttccacttcattacatcaaccaagcggtgggacacctgcagaatcaacaacaataccagcaacagccaaaatgcatcgtcaatacagtaaggctgtctgttttattaggtctaggtactgtaacacagttgtcaatcaatttgcaagactttttttttaagtttcgtgcttaagtatagcagggaggtgtcggaatgccgttttctgtttgccgatttctgacattctttggctcggaattccgattgccgaaattttttcagcagtgggaatgccgatttccgaaactttttgtgggtgtcggcacacatccctgatgttctagttaccttaacaattatttgaattttttttcaaaaatttagggtgatcaaattttcaaggacgtgcttgattctaaggacgaatatttttccattataatgcattattgtcaatgttttaatgaaatttggcaattttttagctggctcctctgctggcgacgatgacctgacagttgaggcatggaaatatatttttttaattttttaaatcaaaattttcaaggaaatccaagagttcgcaacggcattccgaatgttcgacaaggacgggaatgggacaatgagcatcaaagaattgggtgtcgcaatgcgaacattgggactcaatccaacagaggacgaactgttgaacatggtcaacgaagtgcgttttaataataataatttatttttatttatttaatttaaaattataatttatttaattaataaa

SEQ ID NO: 81266 - DNA, 1991 bp, Heterodera glycines
atgtctaatttgttttacgttcttctcccaagtgatacccctggctataggaataagccaaataaatttagggttcatctccctcgtagtttaactttttccgggcaatggttgtgtgggcttcatagtataatatatacaaattcatggcccgctgttggaactactgaaaatcaatgggtaaaggtgcattttcgaaacgggaaaacaataaaaattgatattcccactggttcctaccaaaatgaagaagaattggaaaatgctataaatgatgtgataattactggaacggaaaaatcgtttgtggcggctcgatttaagaggcaacaaaatttggcggaagatggtgtcgatttgtttttccattataatcctgatgattactgggaaagaattgaggaagaaagacaaaaatataatgaaatgatgaaatctatagagaaaaaatcatccgagcgtgctaatgaaatggacaacgatagaaaaagaaaaatagaggaggaggaaattgaccctcttcaaaaacaatctttgattaagagggctcggttggacgcgctagaggcagaagccagacaaagggacgaaggaaaagaggagaaagagaatagaacaggacaagaatttctcaaaatgtatcctgataactataaggagaaattaaatgaagttcgactagaattaataagagatttattcaagatccaagaccatatgaaaaaatatcagggcattgccgacggtagaaaaattcaagaacttaataaagaggcattacgaatgagaacagcaatgaaacatagaaggaaaaatttaaatgcttttagcaaggctgtctttaataaagacttacaaatatcagccgaagaattcgaaagaacaaattatgaacagaacaaagactatgttgaatcgttttttgatagttacccaactgattactgggagcatattcataaaaaatatcaagggcttcaagaagattatagaaaaattcgcgaatatcgggagcagcaacaatttacaaccgaagaacagaagataaagtcaatacagagtgagattgaccaactccggcgtcttatcgactatagaagaaagagattcgcagcgttagagtatgaagctaaaaagagagattcgcaacaacaaccggtagcactagcactaacacacggcgaagtgctgaaggagcgaataagtcaagtgatcggaaacagaccgcatgatgatcgtggtgatgatcaaacgacaaaaactaatggtcaatcattagtcagtttaatagaacaattgcagaaagaaagagatgagagcaatgctgtaagtgaaaaggaaacccaaggggacaaattaaccgttaaatcgaagagtgacgtcaaaggggaaggaaagacgcatggagatgtattaaaaaataagctagaagagattggggataatgaagatggtggtgatgatgatgatgatgatgttgatactgaaaataaaaagacgagaggagaaattttagctgataaaatacgaaaccgttctgaaaacgaagaaaaaacagaaggaaagatatatggagatgtattaaaaaataagcttgaagagattgggtataatgatgatgatgatgatgatgataataataaaaagacgagaggagaaattttagctgataaaatacgaaaccatagtgaaaacgaagaaaaaattgaaggaaagacgcatggagaaattctaaaagaaaagctttatgcggctaatgatgatgatgtacaattagttgcgccaaagggtgaaatatttaaagaaagaattgaaagtatcaaaacaaccgataaaactgaaaataaaacccatggcgatttattacaaaatataattgcatcaaggcacgttgagcgaataagatttaaatatataaaagaacgacgaaaattttctgtgtattttaacgaacaaattattgcttatatcgaactgtcagcccagcttgg

SEQ ID NO: 81267 - DNA, 120 bp, Heterodera glycines
ttggacattttgtgggagccgaaattcattccaaccgttccaactatcgaccaacaacaccgatctttctccaggtcgcaacactggacacaagacggtgttgaccaattcgaccattaa

SEQ ID NO: 81268 - DNA, 732 bp, Heterodera glycines
atgacacatattcaacttgaagaaatcacagctcaaattgtggcatttatgtacgcccgcaatataattttaagcctagtctttgcaattctgtgcgacctatgatatttatttttaaattaaaatctaggccccaaaaccgaaaagtacccgatttttttgctcaaaaataaaaaacgctacataatttttaagtttattcgaatttgggatttgtgatatccctaataatgcataatttttcattcacctttcgtgacttaaactgaacattactaaattttgaatttcattgggggacggcgtcacaatatgccagaggattaacaaactttcttaattcatttgcagaaaagtgatcgtatggagggaagtgaacggaaaatggcagaaatcggtgctcaattttgccacactttgaattgctttttgtttattcattgagtgattccatttcagtacgaatacaaccaacacgaggccagcatcaacagcatcagttgggctgcccccgagtacggactgatcttcgcctgttgctccaccgactgctcaatttccataatccaattcatgggcgatgtgtggtccccggtgaaaattgccaacgcccacgacgaggttgtgccattcaattcgaatctggcacatgactcggaaatgtttttagggatgcaacgcggtgagttgggcacccgccaaacgactgcagtcggccttggatgtcagtga

SEQ ID NO: 81269 - DNA, 217 bp, Heterodera glycines
atgcgcgaattcgtaaccagaaatgctagtcttatgaagcgaaaagtacagttatatttttctgatagtgttagtgagaattgcaattgaaacattatttatcatatattcaagcattttttaggaattaaaatatttaggaattcttgtagcatcctattcctacatgttgaaattgagtcgaatacattgtgacatttatgcattattgtaaaaa

SEQ ID NO: 81270 - DNA, 217 bp, Heterodera glycines; identical to SEQ ID NO: 81269

SEQ ID NO: 81271 - DNA, 387 bp, Heterodera glycines
atggaaaaaattcccagacattcgtccgaagttttaagtgcttttataaaaagtaaaaaaataaaaaataaatattaacgaaaatataattaatttgaaaaattagtaataaaatagcaaaaaaaaaataaataaaaaaaaataaaatagtaaaaaataatttaaattaatttaaataataattgaaaaataataataaatggcattttagccgatttcacaccatttttcgactacacctctgacatttggatggatggcatagggtccgaaggagaggagaaggaaaaggaggaggaggagggggacaaagaaaatgcccaattggagattgtgccaaattggcacaaccaaagtgcgcgaaagagcgaaggcggaaatatatga

SEQ ID NO: 81272 - DNA, 1204 bp, Heterodera glycines
atgggtgtatttattggcacaattgtgtgcctgctggttgtcgcattggtacggtgtgccgttgcgcaatttccccaaaatccggtgcccattggcacggtgattgttgctgaacaacattttgccaccacaacacaaatgccgataaatcctgctagtgaactggttgatcaggtggttcttctaatccacaatcaatcaacgatttaaaattctttgaagtcttattttaaattaaataaaaaatatattttttaatttactatttaatttataaaaaagaaatgatgaaatttaaattaataaggtggaaagcattgatgtgtcctcaacccaaatgattatcaccaccacacggcaggggccaccggacactgcgcgagtggcggtaagacgcaaaaataaatttgtaaatttaaaatatttttaaattaaatatatttttttaagatttcgattgttgacactgtgacaggcgaagagcttccaccgatgaatttgaccggtgttttgttggttttgactaggggtgaggaaaatttcagaaaatcattttgatttttttgataattattttcaggccgatacactgtgaattggcttcagcccaatcggtggtatggtgtcaatttccgcgctgaacagcagtaattaaaaaaatatatataatattttaaaaaatttaaaagaattcgctttaattaaatttaaaaattgtttggaaaaaattgtatttaaaatttattagttatgccggtgggtcggcaatttatacaaatgaggaggcccatttggtgaaaacacgtcgtgtcgacggctcacacgacgagggcaattcggtggttagcgtaaggtgaaaatttttaaaattcaaaaaattttaattttaaaaattcagaaaaataaaaacttttttttttttggtgattagagcagaaagatatggtgaacatggaagatcattggaaaatttggttctcacaatgcgatgggaacagcacccggacgaaaggcaagcggaaaaaatataaaaaatttattatatttttttcaaaaaaaaaattacaattttttagttttcctaaaattttccaatgattaagaaaaaattctcatttaaattgtaaaattttttgaatttttttcttaggccaaatttggatgcattggccaacatcacattgttttgcgatgatcaaataaa

SEQ ID NO: 81273 - DNA, 1376 bp, Heterodera glycines
atgccaattgcaaaatgtgtaaacattgtaatatccgatggaatttgtgctgttggctggcaagacacacattcattccgctcggttggccaaattgtggcccctggcgatttgtcgagcaccgtttggcctttaaaaagcattcttggccaagagacataattgtgggccaatttttggttggtcgcagaagtgtgtgccatggaaacgaagttgggaaaaacgaaaaatgctagaagaatttttttttttttttgcggtggggacacggcgtagaaaatatttttgagaatgcgagtgtgaaggatgggaattttacgaaattttatgggattttttttttaaatcactgcaggggcacagctaggggggagggctgaagtggctggctatatatagcccacccttgtcgaaattgaaatgaaaatttttatgaaaaatgaaaaataaagtgaaaaaatagaaaggtcgtcgctcggaggggcttatagtcccccccccccatccctcgaaacctaagggtctggttttcgtataattcgaaatatccccaattccgaatacttttcagattggctcctggtcctatcaatctgaatatcttcggcttgttgttgatgagcgtgacgtgttccttggtgatttctacgataaccaggaatggctgctggtaaaacatttttatccaagaaaattgtaggcatactttgtaaaaaaaaaaattttaaatttttcatagaaaatttcaaataaaaaaattgtcgtataaaaatttcaaagataaattttctctcatttttttttgtatattaacatcataaaatgtagagagcttcgaattctatgctaacattcggctttgaaaaatcttaatctaagttttgatcggacacttagaatggaagaggccttaaaattttcaaaaattgaccccctcgcccattccctccgttcaaaggtcgatgcaatgatttccaacgggtccatgctgtacttgcgcaacgaatccttctccactgtgcaaattcagctgctgcttcggcgtcaatcattctactacgtgttcaacttggttttccccaccactttggtcagtttttaaaaattttgaaatttaatttatgcaaattgtcaaatttaaatttgcaaaaaaaaaatagggtgcctttaggcatcattgaacagggttttttaaaataagtttttacaggtttcattggttgctgtgatcggtttccatgcgccgatcaatgcgactgggaggcgtgaaagcaaatttcgacttggcgttatgacattggtaaaattgaaaatcacacacgaatggtgtcattaaatctgattttttttttggattttttaagaaaaattcagga

SEQ ID NO: 81274 - DNA, 2155 bp, Heterodera glycines
atgtttatacccatatcttgcgattttctatcccgtatatttgtaattccatttgctattaataagtttttgtttatccatccaattcaaattgcccctagtttaggcgtcgatgtgcaagaagtgtcctcgagttccgccgggcccaccagtgataagtgaaagaagaagaagtgatcatttgaggaaggaaatgaaatgattattttaggcaatgctttatccgctaattatttgctctttgagctttatccttttgttttggctatttattgtttgcttttttaggttgatttttgcttccgaatatgcttggatacataaatattttctgcttataaatttatataaatttctgtttttgattagtcaaatcttttttaacatccgaattcgtgctctgcaccttaaaatagccctagaaaattttttccaagattttcaaaaaaaaaacgggaccagtaaactccatgattgccgttattgccacccaaaaagttataaagcattgaacatgctatggctttgttgtacaagcctttgctcggctccattaatccttaacacaccgagtcaaaaacgagacatgtgtcaataaagagagagtgcagagaaactttttttctctaacttttctctccttttggcatactatctaatattttcattattaggaaaaataacattcacttcatcctgtttaacttttttcctgcttgttaaatccacaccaaattttgcaaatcgatagagaaaagaaaaatgagcaaactttcagtgttttgagtaaaaattttggcctagaaagttattcaattcgcatttatctgaaatgtttttaattttttaggatttatggctaaaaaaattattgcttacgcttcaaggcagaagaggtgctgaacaactgaaaaaaaggcgagaagctcagacggagaaggcgaggcaagcctatttggccaagagaagtaagttttttcagcattttttactcaaaaaaatcaattttttaaatttcagccactcaacagccgaaccccaatgccgaaatgccacagcaggacgaaccagggccgtcaacatctgctgcatccgtcgaagaagcgatggagccaccaccaccaactccagcaccagtgccaacgccggagatgtacgaggaaattttggaatttggcttttcgctgccatcgacatctgtcacaccaatcggcgatttggtgccgttttcgacaacaccaactgcgtcaatggacaccggagagacgacctcgccaccgctggccattgacgagcgatcagagcgcatcgaacagctggaaaagcaactgaaggaccgcgacgacaccatcaaatttctgcgcgagcaggtgcgaaaccgagaagcgctgatcagtgatctgcgtcgtcagctggagcaatgtgcggcaccaccaacggcgaaaaaatgttgatcatttgcaacgcacctcacgccgcaaattggctgaagaaatcgccactgtaataaaccgggacagatcatgttcggccagccgggcgtccctcgaacgaatcaatcgggaagttcggcacaaatttgcccattacaccccccagaaaagccaacgacaacaaagcgaagcaattgatgcagcagacggcctactgattctctgcctcgttggcacactgaaatcatacgaaagactgaagcgcacatttcgtctgatcaactcggaaattgatgttcttccaccgcttaaaaaagttagaaaaattagggaaattttgttcatttttttaggttttggttatcaagcaaaaaatttgtgcgccattacattatcaaaaaattgaaacaacagctggtgttggatttgtgtgtctcgatgtcaaggccgctttggaatttcggctcagttcggccaaggacaattcgatcagcttcgacgacgaattgttgatcaaactgagcggggaccacggccaaggctttaccaaattgaccatcagtttcggccaagcacttcgaaacaactctgcttccaacgatttcattgctgcagttttcccggccaaagacaccagggaaaatttggaacagtatggtgctcttctctggccccaaattgatcaaatgaatgcattgatcaacagaccgattaagtggtaa

SEQ ID NO: 81275 - DNA, 804 bp, Heterodera glycines
atgtcaatttcttatcgtccgcttctgttcattgctgcttttctcttcatcggttgtcatgctggcgttgagcacgtgcgtctggcgagcctcagttgtgccacggcgaaagacggtgaaatcaatggcttcagagcggttgacgatggtctgctgtgagttgtgcaaaacccgtttatttgtgaaacaatcaatcatcccaatatcccatttcagaattggttccgacgccactaatgccactggtgctatgatcctctttggtttccagacgaacaaaaaggaggatttgagcttcaaagtatttgcgccaacatcagcatcatgcctctcatcagtgaacaacttcgtcgtcagcggtcgattttgtgaactcggagcgttggagacagaggtgagtgaaaacactcaatttgtcacataaacaatcagttttttgtggtttcagactgaatcggctaactgtccggatggagggggcgctggctccggttgcaactcccgcagtgtcacctgccaaatcaaaaccgtcaaggaagtagcggaattgcctgacggtcgagtgttcaaagtcaacttgggaaatctcacacaagtgacggcactgtgcacgaagtggaaggcgtacttcgtgagtttgacgtttttacaggtgaatcatctatttctgctttgttgtttcagaccaatgttcgtcaagtgatggaatcagtcggaggcggagaaccgtgtgtgattggtgattcggcgagcggttttccagtttggctcatcgttctgatcgtcgttgtcgtgatttggtga

SEQ ID NO: 81276 - DNA, 1749 bp, Heterodera glycines
atgcgcggactgcagttggatttgcaaaccggcaacgcagtgcaatggcgagatcccgcaggcggttatgaatacgcaaatcaaactcagctaaattggcaaccgaccgatttgaagttaatgaaacaaaacggaatgccagacggcacgctaatgtacccgacgaacttcgtgctgagacgtaatgaccgaccttttaaaaaatatatataaaataattaatttttttgcttttaaagccgttggtcaatcggaatttgtgatggacttgtttaaacatatttaccttcacaaaaaccctgaaatatacacttctacaacggaggatacggtagttgcgccccaattggccgcgattggcttggcaattgcctacaatggcgcacgagggaatacgaaagctcaaattggcaaagtgttgttggatgagggtaatatattttttgattgggatcgaatttttgggaaaaaaaccagtcccggttaatgggaaccgcccactttggcgccagccattttggcgacaaatgatgcaacttttttacttgtcattcatattaaataagcttagaggatttaaaagcgcttgaaagtccctaatagcctgcaaatgttcaaaaaatttagttgagacactaaaaagcgattaaatcccggccactgtgtacccaaaaatttattaattttggtgcatttagtaacattaaattaaataatttagattcgtctgaacaattaatgcacaataacaaccgtcaatttctccaagaaattcaattgcttccttctaatgatgtttttaaactgaaaatggaaagtaaaatgtttttgtcggattcattcgatgttttggaccaattcaacacgaaaacaaacacattttatgggaacaattttgagaagatcaactttcgtcaaggaaccgaggcggcaaatgtaaaataatattttgcatacaattaaaatatttcaaatttttattcttatatttataatcatggcggggacctttaaaattagagccaattaaaaaagcttaaattaatatatatgtgggcgtttggcaccttaaagcattttcggacttttgacacttttgttgggtaatttgcggaaaatttgttaagaaaattaacaatatatctcaagatttattcactatggcactgatccgaaccatcggagtccaaaaaatacctaattattcgaaattttaaaatttaactctggacctgatcaaaatttactacttaaagtagcaaaatctttgttttattacaaaaattaaataaataattttggtacataatttaaaatattttcaagaaaataaatgaatttgcgcgcaaaataacggcggaagggaatgtcagtgatgtgattcaaccgggagacattgtgccacatcagactaagttgaaaaaatcattaaaaattaattgacacaattttctaggattattattgttaatgtggcacatttccatacaaattgggggccgctaattggtcaattcatttacaagaatgaggaaaaagtaaaaaaaagaatcaaaattaatttaagtaaaaatttttttaaattttcagttccgatttatcggtgtgccaattggaagtgataatgatcaattgcatttggcaattgttgtgccaaataatcagattgatttatcagtggtaataaaggaatttaaaagctttaagctgtttgatttgctcacgaaatcaccaacgacagaagcaaaa

SEQ ID NO: 81277 - DNA, 532 bp, Heterodera glycines
atgaaaattggcatttttagtgtcgaaataaaggaatggccaggcgatgatggaaatggtgaaaattggcattatttttaaaataaaattgtgatttttgttatttaacaaaattttctcaattttttgccactattttggcagaattgggaatttttgttttgtttattttgcccaaagaatttttttcaaaatttcttttatttaaaaaaaaattttgggtcactatcattttttatctctttttcagtaaaaaaatacctctattttttcaataaaaaaaattagttaaataaattattttagatggaggaggaattccgttcacttttcccattgaatttcgcaacagactctgctggaatttatttagttcacaaatacccgatgtgttcgttggcataacactcactttgagtggcaagtgcgtttttttggcatcaatttttattcatattggcagaaaaggagaattttattaattaaaaatatgtcagtaaagttttgggatcgagattttcattaaaataaa

SEQ ID NO: 81278 - DNA, 1238 bp, Heterodera glycines
atggttagtgtgttaacactaacacaacttttgtcgtgagttcgatcctggttgacttcttcttttttaattatttttttttgtaattaatagggttttttaaaataaaaatacccataaaaattggtcatcattggcataatttattgacaaattaaacccaattttcctttcgttgaaattaaaaaaatttaattttccttgactaaatcatgaaaagtaaatattttacaaaatataaagagaaattcataattttttggtgaaaactgttagaaaaaagagcttaaaatttaaaattcgcccggcgttgcctatcggcatcgccgaccccccaaaaacctgaaaattttgctcaaaatcaaaaaaatttataattttttggacaaaatctgttacagatccatccaaatttcaaaattttttccggcgctgcctatcggcaccgccggacccctttctcctaaaagtctttagaaacgcgccgcaaaaaaaatgattttaaaaacaaaaaacttttcgggaacaagggtccggcagtgtctataagcgcggccgcgaaaaatttttgaaaattagagaattagaatgcaatttattaactgatttcaccaaaaataaccaattttttcgactttgagccaaatttttttagaaaaaatttgtttttggggcctggcgccggaggaaaaatttgaaattttgactatttttacagattttcactaaaaattgttcattttaaatgccttatcgtttttaataattctatacaaaaataattatgaataaaaagaaataaaaaaatacacaaaattattattatgaataataaaactttaaagcaaaaataatataaaatttttttgactatatggcataaggcaaaaattgaaaaaccccgaccccgaaccatttggtcaaccctgaccccgaccccgacacttccaaccccgacgaccccgaaccccgacttttccaaccccgacggtcgggggcccaaccctaccttaaatttaaggatgaaatattggaaatttgttcaaaaataaacttccaaatttagcatttagattttttagaaaattctattttaatccaaaggtatttttcagttataataaaggaatcggcctaaccgaaaaccaagggtaccagttttctggttttaaaaccttaatcttctcaaaaaattaatttaaatcgcaaaatttggtcgtaaactcattaaaactata

SEQ ID NO: 81279 - DNA, 398 bp, Heterodera glycines
atgcgaatggaatttgttggtcaaaataagtcttcatcggcaactaaaagtttcttcccaatggtattacatatttaaaattagtaaatttcattaaatattttgtattttttattgttaggtgccaccctttcctttacgaatgaaccgagtccaaaacagtgacattttgccacagaaagcaaatgaaaatttcaaaaatctgcatgaaaataaaaacgactgctgcttattcggagatggtactcaaattgatgatttattcgcctaatttttagtgtttgtgatcaaaattcaaggacaaacaaaggacatttgttaccggaataatcatataaaaatagtgattttttgagaaaagctcgtgaaaaatttatttttattcatttctaattaaa

SEQ ID NO: 81280 - DNA, 187 bp, Heterodera glycines
tataagctatttctcagtgattaatcagctctcaaaaaagttgtcagttgaaaaccgcaaaaaaggcagaacttttgaagttttttatttctatctttttttatagttcgaaattttctgtaatttttagtaggctaatagagcctgtgaagagctttcgaatgatatcaagattgtttgattcgga

SEQ ID NO: 81281 - DNA, 806 bp, Heterodera glycines
atggaaatctttgacgaatttattgttgttgacgaagaagcgatcggtcaattctctggccaattcactggaaagacttcatttcgggaaatgatccgatttgctgaactgtaatttcattttttttgaaattttaaaataataaaaaaatttaaaaaacaaaaaaaaatttgggtataaattaatcacttatatattttagtgaatttatgagaagcgattttcacgcattgcaaatcacggacgttggcaatgcttcttcttccaatccgtcgaattttgagccattggcacaaattgtccgttgggattgggacacaaatggggcacaacaaatcattagtgtaggtttaaagaaatgatcaaacttaaaaaatgcataaattaatcaattaaatcatttagacccatacactgaacaagggcagtgaagttaattacaacaacattgctaatgattcatcaattgttatccgaattctcaaaaagcgggagacaaaaaagaaaatgtgattgattaataataagatcgaaataactgatttttttaatttgagtcaattagaatttcatatgtatatttttgaaaaactaaatgcgactgacgcgctttttactaaggcatttttgggatggattcttccgatcactaattgatttcattttccattttttcttatttttcccccattttttaagtcagttcccggcgccttccagcagcttacccgacgacgatttgacgatgaaaattggtgaaaaacaggtgaagcatcaccatcaaacagcaacattaagcatcaccg

SEQ ID NO: 81282 - DNA, 331 bp, Heterodera glycines
gtatccaattacgcagcccccgtccgctgccaacaacacttgcctcagcggttcgatccaactcactaattgccataattagacaaatgttcaggagagattgacggacaacacggcgttacgattgcaagaacgaacagagggtcatcagcacttcccgttgtttcgttaattaaaaatgaaagtgttcagcatttctcgtcggagtgaccgaagggacggacacggacgtcggccgagtggaaacggtttcattggcccagcaattggccactcagtacggctggtgaacaacgcattgatgcggatgaatacaattgttctacactga

SEQ ID NO: 81283 - DNA, 320 bp, Heterodera glycines
ttttgggccccggggtcgtttgggccccaacccaaaaatagaaaaatgtgctttttaaaaaattaagattctaaaaactaagcctgagggatccctcgccacttggcataagttaagtttaattaacattcgctcattttttacaattttacttattccaaatcctattattttttaatagttaaccaatttgatgtacattctgatttggacatttttcaaaaatggctaacccaattgcaaccaaaaaacaaaaagtaaaattgtcttacgaacgccacctttacaccttcgctaaaatgagttctgatgggatgaca

SEQ ID NO: 81284 - DNA, 2480 bp, Heterodera glycines
atgctcgatgaggcgctagccaggtaaaggggttttttttaaaatgtacaaattaaatttttctgtttcagttattgcacgaatgatgtcgagattctgatggctgcccttgtcgcattccgtcgggaattctttgagatttcgcgtcgccaggagtacgtggacgggatcgacgacagagagaaccatgatggcatcgacgtacttcgtgagtgcatgaccatcgccggcgcgtgcatgcgacactttcgcaccaaccacctgcctgacgaccatctggccatcgtcccagagcgcggttacgacaacgctcaaaatcaaagccttctcgccctacggttcttccactggtactcggaggagtacggtgtggaagtgcagaccgcccactctgccggaggagagaaacggatcggcccctactcgctggacgggtggattgaggcagaggggcgtgcaattgaagtgcacggtattgattattattgttattccataaaaaattaatattttaaggctgtacttggcacggatgcaagaaatgttatccaatcgataacatgttgttgcccaacggaaagacagcggggcaggtacgggagcgcgacgcaaagcggatggaatacatccgggcccgagtgaatcgtgtggacgtgtattgggagtgcaaaatcacgtccatgctagagcggagcaaagccatgaggaaatccttcgcgaactacgtggatgacgggccactggtgatcagggacgcatttacgggaggacggaccgggccactgaaattgctgcgcaaggcggggcccggagagaagatctcctattacgacttcacgtcgttatacccttacataaagtcagttctttttctccatttgacaaataaattttaaatcttaagcttcaccactcgctatcctgttggacacccgaaagtgcacgtgctgaaccaacaagtgcagtggacaagcgcagcggacaatcctttcccgctggcgctgctcaaagtctgggttgtgccgccccgtaaaattgacgttgcggtgttaccggtcaaagtggacgaccgactgtgctttcctctgtgcatcgcctgtgccaaagaatatccaactggaggcgtggacaacgactaccactgtcagcacactgatcaacaacgcggatgggtcagcacctgcacatcgattgagctcaacgcagcgctcgacgagggttaccgcgtcacgaaggtgttccgcgtgctagaatacgagcaaagcgacgacaagctattccgcccctacattgcggaattcatggctcaaaaaatccaggcaagcggatttgacagcagcataagaggggacgctgagaaggaagaacaatttgtacgagagtgtgctgagcagtttggcatcaacattgatcctgcaaaaatggtggtcaacaagggaaaacggtccctggcaaagctctgcctgaacaatttatgtgagctttgacatatgatttggacagaaaatgtaatttttaggggggcgtttttcgcttcgcaactttggcctgtgccagacactcatcactgacgacccggtgacgctggccgagtacttggacaacaaatcgatcgaagtcacatcgatcgatcagctggacgagacgcacatcctcatcacctacctccacaaaaaggactgggtcgatgagcacgcttgctcaaacatcggtgagaataaacttataaaattgtgctaaattgataaatttagtcatctctctgtggaccacttccgctgcgcggcttgttctgctcaaagccatgcagaaggtggttaggtcgccaggctctgagctactctacaccggtacatatgctctaaaaaattgcatgaaataaattgcaaatattttttagatacagacagtctcatcctcgtccacccggaggagcgatgtccgctcaaaattggtccacatctgggccagttcactgacgagtacccggaccacgacattgtggagttttgcagtgggggtgcaaaacaggtaaattttaagttaaattcatcaatctgtattgattatttcacattttagtatggtctgtgtttgcgacgaaagggagctggggcggatgccgaaaaggaatacgtgctcaaggtgcgcggattgacgctgaactacgacgtgatcaacaaccaaggcatgcgttacgagacgttcaaagaagaagtggtgcggtacgcaacaacgggtgattatgagccaatcattgtcacttatcctaacttcctccgaccgaacattcgggagggagggagggtcgtatccatgcccctacagaaatgttaccgaccatatgttgggaagggaattataggcagcgatttcaatgtgaagaattttggccacactttgtaatgtttttgttttctgatgtatctgtctttctcatcaatacaccataaattgtatttaactcatttttcaataaa

SEQ ID NO: 81285 - DNA, 1748 bp, Heterodera glycines
atgtcatcgtgtcgggggattgtaatgggcggcacgaaaaattatttcgacaaaatttgtgtgccgcatcatggcttggagctgagttttgtggatttgacgcgattggaaaacttggagaatgaatttaagcccaacacaaaagtacaaaaccataaaaaaccatttgaattaatttaattaaatgggcagatggttttgtttgaaacaccctcaaatccgcttctaaaaatcgtcgacattgaagcggtgtgccgtatggttcgagcacgctcaaaagattgtgtcgtcgttgttgataatacggtaatgatacgagaggcattactatacgtgagggatactgtagccaattacagttcatgacaccgtactttcaacgcccgttggaacttggcgccgatgttacggttcaatcgctcaccaaatacatcaacggacacaccgatgtgctgatgggcaccgtagttaccaacaaggagcagcttgatcagcacatatacgcccagcaaatttgtagagtgattttgattgaaagatggctttcctagcgtatgtatttttgccagcccaaaaaaatcgacaaaattttgaaaaaaaatgataaaagggagtttttaaatatttttcagatgctggcgccgttccgtccgcctttgatgcctttttggtgcttcgtggcatcaaaacgctcccattgcgaatgcgccagcacatggaaaatgcgctggcaattggacgatggcttgagaaggacccgcgtgtggaaaaggtgaaaaattagaaaataaattaaaaagtatttaaaattacctaaaatatttaaaataatttgtcaattaaattgttgttaggtgctttatcccgagctcgagtcgcatccgcaacaccaaatccacaagaaacagagcagcggaatgtccggcatgctctccttttacattcgcacagattttgacggggcactgaaattcctggccaatttaaaggtgttgcttaaattctaagcattttttaatcataaatttttcatttaaatattttattaatttgttatttttaaatattttttatacatatttatattttttaggtgtttttggtcgcccgatcactcggcggtttcgaatcattggcctcactgccggcggccatgtcgcgtgattccgtgccagcgaaggttcgcgctcagaccggcatcagtgataatctgatcagactgtcaattggctgtgaggacaaagctgatctgatcaacgacttggatatggcaatgcgagtggcgacggaatagcaaattccttttttttggtttttcgaaatttaagaaatgttgattgatgatttacaccttttatgatgttactaataatgagatatattcacatttgccttgtcttttattccgattttttataaaatgtttttaccaaggataaagccaaacttaatgcttaaaagacttggggacatgacaatgcgaatggcgacggaatagaaaattcccttttttggttttcgaaatttaaaaatgctttgatgttaattatgccttttgtgttgtaaatgctgttacacaaaaaacaacaaaatgataaatttgttcataactttgtcaaaagatttttggtatcattaataattataagtgtttttatgagcctccaaaatttcgtttaatcttaaaaaagaccagctttttttgtacttctgcccatatttttcttttcgtcaaaaatcatgaaaaa

SEQ ID NO: 81286 - DNA, 738 bp, Heterodera glycines
atgccggaaatgggggtgaaaaacgaattcgtaaccacaagctggacggctggattcaatcacaaaataagtgtattgaagtgctcggatggtacgttaaataagggtgctgctataataataataacaataaatgttccaagctattggcacggttgcgagcggtgttttgaccctcaggataagctggtcgatggcaaaacatgtcgagagcttaatgaggccacccaagatcgactacaccagctccgagaatcggattgcacgggagagtgcatgacggttgaagagatttgggtatgttgtgatggttgatgacccaacaatatcaattctaataatgattcatttcaccgtgtgcaaaccaaaaaaaaagtgaattaaggagtgtgaaattaacgccttgctgtctgatgcagccttggaggtaggtgtggtacacatttgctgaggtgctctcatgtcgatcggtcggtcagtgggtcggtcgtttgatgttcacaaaacaattcaggtcggacaggaccgttgaagctgtttgccgaaccaaaagaggatgaaaagatatcggtatacgatattgtcagtctttatccgtgggtaggttgtcatccgaatcagcattatgatatgctttttctgaatgttctgttttaggtaaactacgataccgagtatccaatcggagtacctaaaattatatacccgtctgctgtacagatgttggttaattggtaa

SEQ ID NO: 81287 - DNA, 1268 bp, Heterodera glycines
atgaagttggatgaacgtctattgttcagctgctgtcatcgttgtgcgtctcagttccgtacgctgaacacgcgatgccagcacgtgtgcgcacattcggatgctcagcgagcatacaccggcaattacactcacattgagctggcaatggcccttcggtacggctaccgtgtggaccgtttctggagagcgtggcactatgagcagtggtctaccttaatgagcaattcttctcaaattggaaacaaaaactgtgcttttcaggagcgaccaaatcttcaaggaatacgtacgtctcttactcaagcttaaggttggttggttggttggttggttggctgcaggtttcttgttctttcgcgttttcacccgtttcccgaaccattatccaaacaagcacattgcacatacatatatgttacgcagattgaggctagcggcttcccagatgggattacaactgaggcacaaaggcaccaatttattgatgcatatgccaccgtgtatgccgtcactctggacgtggaccgtgtgcataagaatccagggcttcgcttcatcgctaaactaatgttgaacagtctttggtaagcaaaaaaaaaattatgcaaacagtcgcctcattctttttttggccgctatgatcgcatccatctcccatcaatcaatcaatcaatctgttttcaggggcaaatttagcatgagaaatgaactaggaacaaacaaggtcatcacaagaccgcaggaattctactcattggtgctcgaccataaagtcgaaatttctgccatcattccgctatccgacacagccattcgagtgatgtaccggcacaaaaaaagtttcgtggaggagcattcgtcaagcaacatagtgctcagcttatggacaacaagtaaattgtcaattcattcagcaaccaggattctgtataacaaacaaaaaaaaatgtttgtttgtttttttctactccaggtcgtgctcgattgaagctgtttgagtacatgatgcaagtgcagaatacggatggagccgagcttctttatacagtcagttatcgtaggcgaacatatgcatttgtcacagtggttggcataagagttaccttttcccgttgtgtctccaggataccgacagcgtgattgttttgcacaaacgtgatcgggtgccaatcctcacgggcgaatatcttggacaaatgtccgaagagtacgcgggatttgaaatacaaaccttcatatgcggaggtatgcgctatgccaattag

SEQ ID NO: 81288 - DNA, 744 bp, Heterodera glycines
acataattcggttgccattgagaaagtgaaggaccagcgatttgacgcattggcacaatgccatgtcattaatgggacggacgaagccacaaagaagccttgcggaattgaatttcgccttccacatggaggaggaaattgcgatgacgggttgaaataaaattagaaacatttgaaaataaaattaaaataatatttataacaaatagaaatgccatttaaaattgcttttttagtttttggatctgctaccagcctgttcttcaacgtggtcgcactttggatacaagcaccaattacaaagcgaaaagaacattcgcaattgatactgaaaaggtaaatagtatttaattaataatgtaattagttaattgcttgcttaaatgattgtttgtggtccaggaccattcaattacaaaagaatgtgctcaaagaatgccgaaggatagtggtaaaagtggcacaatgctttggcgtggcattaaactgcgcacagtgccagtgccatcggacaaaaacaaaggcaaacactcatcatcatcgactgataatgatgatgaagtcaccattttggagacaacatttaacgattcactgaaaatgtttgtttttaaaataaattcgaacgtggtcgcgactgcaccatggaggccagggttagcaaatcagtgccaaattgagaatgataattttgaattgcatcattttgatcacttcctaataattttatattctttttgttaa

SEQ ID NO: 81289 - DNA, 172 bp, Heterodera glycines
atgttgctttttgctgatccgcttgtgaagcaaattgatgacaaaacatttgtgccaaatgaggtgcgactttaagcaatgccaacatgaataattcgcatattttcaggaaaattcaaaattttcatcgggaattattaacactgaaacagatgaatgtgttggagaaaat

SEQ ID NO: 81290 - DNA, 687 bp, Heterodera glycines
atggaaccgaaattcccttttatttgccagagacccatcactgttgtggaggaagatgagagagcacaggtgacagactcggaatatgaagacggaaagggagtggaagaagaaggggaggaggaggacggagaagaaaaagtgaaggaggaagtggaagaggagggggaggaggaggacatggacgacccgagcggagagagggccattttacgagcaattttggagaaaaataaaccgaaacaaagcgaagaaggggaaatagtggacaaaaaggaggaagagcgggacgagacgaaggaagacaaaggcaaagagagggaagaggagggggaagaagacgaggaagacggcacatccagtgtggtgacggactttgaatttcaggcatattgaaaccgaaaaattcggaaatacgttgctcaattacagttcagcacaacggatgatgacgcggaaatggagagcattggttccgatttggagggaaatgggatcggaaaggaggaaacgcggcggaaaacgattgggggcaaaagggcgagggggaaacggggtggcacaaaaaatgccaacaaaaaacaaccgcaaaacagcggacggaccgggagagcggcagcgattttgggggcaacgaatgccgaaaaagtaggagaaagcatcgaatggcatggcaaattgagatga

SEQ ID NO: 81291 - DNA, 1279 bp, Heterodera glycines
atgtgcaatttgtccacttttttgtcaatatttttgctaccatctaccgtatacagcaccggtgatgacagagtattccaccataaccgtatgaatgttgtcagacgacaattgcttcaactaccacattttttgaatggttgcgctgtgggtggtggcggtggttcatcaggcaaaaaacaaaaacaatacaaccaacaattacagcaacagggccaaaatggcatatgggacagcaacgaggtagagcaataccgtaatgactaccaactgaacagcatacggtatgtcttacaaatttattctgtatttggtatggtttaacttacaaattatactgtatttgttatgtcgtaccaatttattctgtattttctggtcaattcatatgttacagtattttgaaagcgattaagaaacaaactttaaaaacacttactaatcgcaagtcttgaatccacctgggaatttccataaattttatgaatttaactgaaatttatgatggataattaaacgtttgagggcctttcaaatgttaacaaatttgtcaaaaaattgaaaattatatagccgtcctaagaatcggattattcaaaaaataataaaagaatggcccacatattttttgaatttcctaaaatttagtccctaaaaaatgaccagaaaacttagcccaattcgaaaaaataaattaaaaaattttctgcaggccctgctatttctctcccgttcaatgccttttggtcacaccaggccaacatcgggcattcgttaaccacccaaagttcaaccagcaacagaagcagcagcagcagcacaattttgagcaacaaattaaagtagcaggcgaaaaaggcactgcagtcaaggccatcaaaggaagcagcaaaatttggcatcgacaaagtccaaaggaaagtgccaaagatggagcgcaacccagacatgaacaatatgatgccggcgatgtacaagttgttcatcaagacgaagctgttcagcaccaacagcacctcaaccatcacaaccgtagacggcatagattattgaccagcggccaaacattgtgccaacacaggcatggcggcattggtggtgatgccaatgccaatacgacagatggtggacgaataaagcagtggaggaggaagtatggcgaacgcaaactaagacggcatccaatttttggcaatccattccgaattggactatgaccatagcctaattagcatcataaagatatttttgtataaaaatttatcattttttctttaaa

SEQ ID NO: 81292 - DNA, 77 bp, Heterodera glycines
atggccttaaatctgatctatcttttaaccaggagcttgtctgctccagctccatgcatgaagcgcgagaaggacag

SEQ ID NO: 81293 - DNA, 3393 bp, Heterodera glycines
tttttgaggcggtcccaatacttcaaaagaatggcacaaccgccgacaaacattggcacagcgatgagactaaaaaaaatgagatggaaaagagtaaatgttgagaagaaatgcgaaaaacgtacagaatcatttttgaagacattgtcagggagaaaaagtcagagagagagagagacgaaaataatggcgaatgaataataatggaaggtagaggaagagcagcaaccacttttatacgaatttattggttcatttgtacggtttcccattttctaaatttttattaatttataaagctctctcccctcccccattttcttccattcactcacttttccttaaaaaacatgaaattttactacgcaaatggtgtggcgggggttgggacagcaaaatgggaaaaagtatttgcaaagtttttaatcacgaatctgacatgtattttgactaatttctaatccctaacccgaactcgaataaaaatcgaaatttttaatttttcaaattatgattttttgttcaaatttagattaggaaatcggaattgatcaaaataattgaaagattcgtgatcggggtctccaaaaaccccagagaatacatttttatgactatcacaaaaaaattttgcaaaacaaaagggtccccccttttgaaaaaattttcaaaatatgtcacttttcatatagcgccaaaatttcttttctcagaaaagttactcattctaaaaacgaaattacaattgtgtatttgtgatgaaaaataggtattggagtaggattctccgaccccaaaaaccctaacgatttaaacgtaaaaataatctgaattccagatggaaacttcggttgaaaatgaaggggctattgatccttcaaattcatcaaaacgttcaatcctatggaaattgaacacgacaattgatcttgtgacttcctcttctgctgattttgtggacaatcggattccggggttctttttgaatcaaattaagcattgggctaattgtaagtttccagtgaactgacacaagcattgtgcactgtcatcgaagctgttttcatacatggactcagagacgctttttttctcaagggttcacggcactcgaatcggccatccccagtaagaaaatggagaattggaattgtgtctcaaagataatttattgggtaaatcgagggataaattgaaatttatgcccactttggggaaatgacttttaacaaaaaaataaatgttaagaatttctggccctttgtctccaaatacacgcagcgaagcatcaaaacgcaaatttcaacgctcaaccaaattcacactgaaatcggccgagcaagggttataacatttggcattttccttttgatttttgtgggatttttgattcaggcatggattcgcattgttctcaacgaatattccctggatcattacataagcatgtttgtgaaggacacccgacagatgaagtaagtgctttcatttggctaatttatttctaaatattatgcaaaaattaaagacaattttatgccgacgatgcctttctccgtgactccgaatgcgttaactctttgggtgttcatttaaagcgaattaatgggctcaaaataacagctccgaccaactcgaggtcagcatttatcgtctttttgttggtgtgggctaatcgcaaccattttctaccctcctttgcccttttatccatttttagcttgttgaatacgtggactccgtctccgttgtctcttgctggtctcattaaaaccgctccgtcaattggaggtgcatttaaattttaaaaaatcgtataaaatatgatacgctacttgcaaaaagtgtttagacagtaaccagggtgggaacagttgccccctctacccaaatcaaaaaaagattttcttagaaaaaaatatctaatttgtttaaaatttacctaattttcttaacaaatttgccaaaatttctccgacgacccaatattcttgtatttttcccaaaaattttgtctcaaaacccccaaaatttggcgaaaatggctaaaaatattccatttttcccacagagccaaaaaattaggaaactacactaaaaaagagcaacaaaaaagctatccgattggttgcaaattttttgtgagacttagtagtcgtgaatgcccatcataagcacccatacccattaaacagattttatttgacctttttatgggtttttcatttgacagccttcgcctttcaatccgccgctgtgcctctccccgtgcctttctcttcgccctcttttaacggagtgttgcccaccggcaaaggctttaaggttgcgacaaatgtgaagccctcacaattaaaccgatgtcaatacgcactaagattggctcttcctcgccctccgcttcgtcctctgtcctccttgccgacgacgaagtggcaatcgcctcgggcgaacaacaaatggtggccgagttcggcatgaacgcggaccaactgctgttggacgaaggcgaacagtgcggggaagacgagagggcgagtcaaacagtttctgcggatgatcaaaggcaacaggcacacataatttcttacactcccttaattaaccattttcttgggagtcattttgtatacaattttaggtcaattcgtccgcttcaatggtaatggcggacgacttggagtccgtttactcccaccccatcgatgctggaggaacaccagcatccgcctctgttggcaaatgccggattgtttggtggcacttttgaccagccccatcattaccaacggcgtcaaaacatgcacaacagtttgttttcggccacgtatcagcacgccaacaacaaatggatgatggcagcgatgccggccgaggaactctccaccgaagtgtgttagaaacggaattctaactttttcaacatttaatcccaacattttattgaaataccacgccgattaggcattttaaatgcctaaaactctccggcatttaaccgaatccttttcctactcaattttggcaatgcaatctagtagatgttcaggtaattgtgcaccgtaaggctgcgcaaaggcatcgacgacggacggtgtcgaaaagcagcggcggggacagtgacaacggctcgtcctcccggtgccattccaacgccaatttgcacgcctttgaggagtcatcgctggagggcaaagaggtgagggagggagagaatgcgcaactgtttcaatagcgtagcaagagattcgtggtttaattaggcttttactccccctcaccaagcggacactatgtcaaaaaatattgaccaattccggcaatacaaaaaaaaattttaattgaaaattttgacttttttttgggttcgggattagaaattcgtcaaaaaag

SEQ ID NO: 81294 - DNA, 1016 bp, Heterodera glycines
atgtcttcaaaaatgattctgtacgtttttcgcatttcttctcaacatttactcttttccatctcattttttttagtctcatcgctgtgccaatgtttgtcggcggttgtgccattcttttgaagtattgggaccgcctcaaaaaaccagcaaaaccacgagaaaatcacaaaaagaaaatgtaaaattaaaatgccaaattcaattttaaatttgttttcaatttaattttaaatttttttcctttttttcagtttcatctccgccgattgttggctttgtgtgttcgatttgctgccgccttcccaacttggcctcggaattgcaatgatcagtcaccgatttggcatttacgtggacgaacacttcaaaacacgcaaatgggcgctgaaatttattcaaattcacagcaaaatcagggagaatggcaccaaggaaatggaaattgtcaagaactatggaaaagaattgccaattccgcaaattcaattgccacgcaaagtcatcggattcgaatgcatcgagattttgtaaaattggcgattatataatagccaacacttcccatcttttttagtttcatcaaccaaaatgtcatcgcttttcttcaccgttttcgccaactcttcgccaaatgtccaattaatttgtccatccacacgaacaatgaccgcattttggacttcattttccacaacatttggccaatgttcggaaaaaacattaatcgcttggaattatccgccgcaactttccaccgtttgcgacatttcgtcccgtcaattctcaatgactgtccatcacttcgcattgtcaaattctgtgacgccgacaatttcttccccgaatttccggccgatgacagtgccatggcgtcgaatggacaaacgatggccaaatggcttttcactgcccttcctgacaatgtgccgaagatgttgaaatgctcgttggacaaagatgctgggaatttggtgcagaaatttgaagccttcaaaacggtgcttacgaattga

SEQ ID NO: 81295 - DNA, 722 bp, Heterodera glycines
atgaatcatatgcacatgcttttcatctctttaaatgggtaaaaatgatttataggcagacatttttattttatttatgaatgtttttaatagaagatttaatttaaattgcttttaaaatatattttaatgttttaatatttatgtttttttgaatttaaaatagccatattaaattatttttcgatggtgaattttactcttttaaaagaagtaaaaaatgtatattccctcaatcagatttttaaatataaaaaaattgtattcatcacatttttcttactcttttgtgcgctatagataataggttatatcaaaattattaatctttaaaaataaatatttaaaattatttttctattgattcgtactacttttagaagaattattgattattttaaattcccttgcaatagatacgttcattcctatattttgtctacgacctccaatatgttttttatcctattgtaaaataattttaaaatatagcaaaataccaaatattgatttacaaatccataaaattaacaatatatgttatattcaaaattataagcagattaaaattggttgtttctgaaaaagaattactagcaaataagtaattaaagtgtcacatttttatggtcatttaaaaaatgtaaggtcgatgaaatacatgaaaattgtttaaatttcaattaattcataccacccctcatgttggactatccaataaa

SEQ ID NO: 81296 - DNA, 1364 bp, Heterodera glycines
atgtcagacaatggaaatgaagcggaggacgaaatggcacaagcaatgtaaaattaaattaaaatgccaattttcaatttcaaattttgttttccttttcttcagtttcatcgccgccgactgttggctttcggtgttcgattggctctctccgcgtcaacttggcctcgaaattgcactgatcaaccaccaatttaacatctacgtagacgaacacttcaaaacgcggcgctgggcgctgaaatccatagaaattttgcgaaaaattggagaaaatggcacaaaggagatgaaaatagtcaattacgctggagaagaagtgccaattccgcaaaagccgttgccaaagagagtcgtcggattcaaagccatttcaatagggtaaaatggatgaattaattgttttcaaatgtaaacgatttcgatcatttcattttcacagatacatcgaccaaaatgtcatcgtgtttctccgccgttttcgtccgcttttcgccaaatgtcaaatcaatttgtccatcgatacgacgaattatcgcattttggacttaatttggtgcaacatttggccaatgttcggaaaaaacattcatggcattgaattgtccgccacatttttccgccatttgcgatattttgcgccgtcaattctcaacgaatgtccatctcttggcattgtctctttctatgctgaggatatgttccccgaatttccgcccgccgatgaaaatgccgcggcatcggatggacaagcggtggccaaatggcttttcacaccgcttcaaaacaatgtgccaaaggtgttgaaatgccagttgacgatggatggtgggaattggtcatcgagaattgcagcatttaaagtggtacttactaataatttgtttatttggcacttggcggtctttgggatttgttgataaattttttaacattttaggcatttgccaatgcttcatcgcccgtcaatttcatcgtttccatttggtttcgttcgtcttttgcttcatccgttgtgccatttgtgctgaccaacgaattgactcgtgaacaattggcattggaaaggattaacaatagccatcgttttctgctgatccgttgtccaattgtacgaaatgcgagccaatggacaaaatgggagaaggaagcatttaattggcgaatttatgatcagcggaacagaattaacattgaaatttttaatgaggatgacatcggcgattggtcagcgaagaatttttcaaatttattttttgcattttcaatttttaggcttatcgacgaaactcccgacccgagtgatctgcagtagaagtggatgaatgtattgttgagaagtgatcgatcaaattatggaatta

SEQ ID NO: 81297 - DNA, 1683 bp, Heterodera glycines
  unsure (1)..(1683): unsure at all n locations
atggacgcgatggaaggcgatgaagtaaacaaaaccatttacaaattaattttagggatatcaaattaaatacaaaataaaatttctgatttaaaaaaaaatattattttcaaggctcaacaacaaaacttttcggccgatcagttggacaaattggaaagcggatttcagaagagcaaatattttagtgcttctgaacgtgaaattttagccaaggaaattggccttacggaaacgcaagtgaaagtgagaaattgcagtaattaattaaatttaaaaaaataaaacctaatcattaattaattaattatctaattaaggaatggttcgaatggcggcacaatcaatggagagaaagaattccttagtaattaaaaattataatgaacgatgactcaccaaaatttcgaaaattactataaaaaaaaattaaaaataaaattcagtgtccgacacgaaaaacagcaatcaccacaaaatgttaccaaaacggaggcgattgaacaaaaaactgtggtataaatgattcaatttttcaaaaatttaattgaataactccctaaaaaatgtttttcaatttactaaagccactgaaacaaaacttttcggccgatcaattggaaaaaatggatgacgaatttgcgaagacaaaattcccgagtttcgctgttattgaaaaatgtgccgagaagacgggcctaacgcataagcaagtcgatgtatgggtcttcaattntaagaanaataatttttaatacaatttttttaaattaggaatggtttgaagaacaacgcaaagaatggcaccgaaagttgatggaaagagtgatgaaaaatgtcattgaaatatatactatattaatatatatcaattttaatttttaggcacaaaaacaaaaatttccgattgaacaattgatcaaattggaatgcgaatttgagacgatacgatacccggacatttttatgcgaaaagaaatggccaaggaaacgggcccaacggagaagcaaatcaatgtaattagggacagttaaatttttaaatttaatttaattgcttaaaattaatttagaaatggttccattttcgacgtgtacagggtagtgaggaaaagcaacttgaagcaaaagccaaacagcagaacaatgtttggccaattaccaaagcaaaaataatgataattagttgcaattattaatttaataaaatacgaattcaaaaaattaaaaattattagtttaaaatatcaataaatattatttatttaaaaataattagaaattataatttaataaaatgcaaattctaaaaaatataattttaagatacaaccacaaatcatttcggctgatcaattggaaagattggagcgcagatttagcgaaacacgttatccatatccagttcaaatgggaaactgggccaagcaactgggccttgagatgcatcaagtcaatgtaattagggaaatgaatatttaaatgaatcaaatatttgaatatatattttaattatttaaaaataattaattagttctggttcctaaatcgacaagcacaacacagacaagaagaaaaaaaagccaaggaaaaatggttggaaggtcgacgagaccaatggaaactgcaaataccaacagaaggaacatattagttaattagtttatacaaaaaaaaattaaa

SEQ ID NO: 81298 - DNA, 867 bp, Heterodera glycines
atgtgttctgctgacccctcactctctctgtttgtgcttggaatgggcgttggttagtcagcaaaattattggtttgacctcaatcgagtcagaggcatttgggccccgtgcatttttggctaaaatgaacgcaaaaataatatagtccaactttttttattttttagatataatttcctcacgaacaccctctggcaaatcaatgaaatttccagagaatatgtattcgcaagttttaatgaatggcgaaaaacggagagacgggaaaacaaacaaaaattttttggcattttgaacaacaaacgaaaatcgcaaaaaataattttcaaattaatttactctcatcagtgtccatgcatatatataatatatatatatatgttattgtatttgccagttccaaattctttggcatctattttttgtttgaatggcgtcccttcagaaaatgtctttttttaggtcaaaccaatacattttttgctgagattaacacccattccagcaaagtcccaattgaggagactcagcacacattttgtggggttaataatggaagaaaatgagtggaggattagaaggagaagagaaagaatttgtgccacaaaaatacgcccaattttgccttaggaatttcggctccactttaaattaggctcttgagccccccgataccgggctccccaaccttactcgcctttgaggaacgagcaatttttacactgttaaggattggcttcccaaaaacttgagaaaacttttttttcgggtttaaagttatttttttggaaagaagcattgtcaggtttttaactaaaaattacactgaattttgttaaaaaatgttagtttttatagaaaataaa

SEQ ID NO: 81299 - DNA, 284 bp, Heterodera glycines
atgacaacttgtacgagttctaaaaataaacttttctttatttagctttatagtaaagagtcaatcataatgcatttatagtgattccctgctcagtcacaagaaatactacaatgaaaaatgtgatgtagaataccccatgggaaagccaaaaatatatgaatgtttaagcacaaatgcaaggctaattaagtgaaaaaaataattatatttttcctagcgcattagtggaaaaactaaaacagaaaatattattacttaggcaggcattttttaagaataaa

SEQ ID NO: 81300 - DNA, 338 bp, Heterodera glycines
  unsure (1)..(338): unsure at all n locations
atgtttgnaagtgcaaatttgcaaagtttggcaccgctttcttcgacagcgacgatggcgaataataatgatgatgataatgatgggtttgccatggcaatgatgcgccgtcgtccgccatttgctggtgcgccgttttgtcatgttgcatcagcaacgagtacagttcctcctcacaaagggcaggcattttttaagaataaaaatattcatgaattcactcaagaacctattgttgctcaatgcaatttagtcaattatatagcgacctttatgcgataaatgaaataattaaaatcgattttcagatgacaacttgtacgagttctaaaaataaa

SEQ ID NO: 81301 - DNA, 250 bp, Heterodera glycines
  unsure (1)..(250): unsure at all n locations
atgcctgccctttgtgaggaggaactgtactcgttgctgatgcaacatgacaaaacggcgcaccagcaaatggcggacgacggcgcatcattgccatggcaaacccatcattatcatcatcattattattcgccatcgtcgctgtcgaagaaagcggtgccaaactttgcaaatttgcacttncaaacattccttgaactgatcgccacactttatgagcgtgaaacggaccaaattgttcgatgctcgc

SEQ ID NO: 81302 - DNA, 435 bp, Heterodera glycines
atggatccaatcaataatccgatcaaatccattcatttggcagccaaaaatgatggccggcgtgccgacggagcgcgtcaaccgaaaccaggagatcaccttccaaatgtgcaagtggatggtgatcctgtccgtgttcttcactgcgcacaactttgccatgatgttgtacgggaccaaggagaagccgttgtggccctacacgctgttcatgaagaagagtgacggagcataaagaagctctctcgacgacacatattgtttttgtgtgtattaggtgtaaacaaaattttcatgttttatggacggaaaatgttagtttggatgtttatgttccatggataaagaaagctgggctaactgtttgttgaattaaagcgctttgaatttttttcaattaggtatagactttctaaaatttcaaatcttaaatta

SEQ ID NO: 81303 - DNA, 1468 bp, Heterodera glycines
atggcccttaagaaatgggccgcaaatgtccgaaccgcaaatgtccgggccgcaaatgtccgatttggctggggccgcaaatgtccgagccgcaaatgtccgggccgcaaatgtccgggacgcaaaagtggggtaacccttcaaaaaatcaaaaagattggaattgaaggaaaaatttataattttttaactaactttttaaaaaatcggagttttaaggttaaaatcggcgatgaattgtcagaaagtttcaaaatattttcgggagtgccccagggaagtgtcttagggccattactctttttaatttttataaatgatctgccgtcttttatttcaaataaagcatcatcagttggcatataaatgtatgctgacgatgttaaattatattatgcccatgaaaacgatgaccattcaaatcagttggataaagcgattgaggctttggaaaaatggtcaaaaataaatgggttagaaatttcaactgaaaaatgttttgttctttatttagggaaaaataacaagaaaaaagaatattttattaactcaaaaaagatttcagaatcggaaagtgtacgtgacttgggaattataattgactcgaaacttaatttttcagaacatattagcaaaattatacgaaacgcatatcttagaattttccaaattttgagagtgttgaaaagcagggaaataaaaactctaacagcagcctataaaacttttgtacgacctcaattagaatacgctaccgaagtttggaacccaaatttaaaaaaagacattgacaaaattgaacgggttcaaaaattttcacaagaaaagcacttagaaaatgtggttttgtgtacaaaaaatatggggaaagactaaaaatcactgatttacacaaattagaagaaagaagaaaaatcaatgatttaacaacagcttttaaaataatcaaagggttcaccagcctcgacgctgggaaaagtttctttttctcagaaaggtccaggaggcctttacttttacgggtaaagcgccacacggccaaaactcaaaataattttttcaatagaatagtaaaaaactggaataatcttccactggtagcggtgcaaattaataaggcaaaggaattcagggatttactaaaagcaatgagttctgagtaggattttccatgttgccatatttacactatatttttatcacctgtgaatttttaacatttgattgatttatttttattcattttttattacggtattcactttgtattttttatttgaccaactttatttgttgttttctttttggcaccatataagagcactcacgtgcctttggtttgctcgataaattaaattaaattaaaaaaaacaattttcaagaattttggggtttttgtcaattgccaacaatttttttggcatgtgaattttttaaaaactatttttcaactatttttggcttgtca

SEQ ID NO: 81304 - DNA, 142 bp, Heterodera glycines
aatgaataaaaataaatcaatcaaatgttaaaaattcacaggtgataaaaatatagtgtaaatatggcaacatggaaaatcctactcagaactcattgcttttagtaaatccctgaattcctttgccttattaatttgcacc

SEQ ID NO: 81305 - DNA, 1369 bp, Heterodera glycines
  unsure (1)..(1369): unsure at all n locations
aaagattcgtacccaataccgacatggaccnaaattttgatgtatttgggaaacaaacactattttactattttggattaatgccggggtattggcaggttcgagttaaggaagaagacatcgaaaaaacggcgtttacagtacctggtggtctgtatgaatttttagtccttccttttggtctaagtaacgccccagccacatttcaaagactcatgaacaaaattttgttcgaatatattaacgaatttgttttcgtttatctggatgacattttaattgcctctgaaacatttgaagatcatatggtccatctcagaaaggttttcggaaaactgaatgaaaacggaatgaaagtcaaggcagaaaaatgtggttttgctttagaccaaaccccatatttaggacatattcttacacgagaaggactcgcaaaagacccggaaaaatacaaacccatcaaagaatttccgatgccaaaaacaatcaaagaattacaaagatttttgggaatggtcaattggcaccgaaaatgtatcatgaattttgcaaaaattgcggcaccattaacaaaaatgttgaaaaaacaagatgctacggtgttaatttggtcggacgaagcaaaaaagagttttgaatctttaaaatctttaattgttgatgaagttgtactgaaatatccggactttaatttggcacagaacgatccaaaatttaaatttcatattttttcggatgcgtcaaagatgggctaggtgcagtgctttgtcaacgggatcaatctgggaaaatgagaccaatttgttacgcatcaagacgctgtaaacaaaccgagtcaaattacggaccaacagttttagaatgtttaggcataaaatttgccgtacaaaaatttaagcattttattgcatggcttccaacaatcgtatttaccgaccataaggcccttccccaaatgttcaaaagcaaaaattcggtcggaaattcaaaagtggacagatggatcatggaattaggtgctccattccaattagaagtaatttacaagcctggaaaagaaaatcacgttgctgacgcactttcacgagccgttaactcaaaaccccttaatttggaagaaaagggaaacgaaaattgcgcacacatttctgccgttttaacacccgaaattccgaaattgccatttagtgtttctaaggaagaatgggtcgaggaaatcaaaaattcagaattggcttttatttggaactttttggtcaaaaaagaattgctacaagtgttaaaaactcatcagaaacttttggaatcgcttggaaagtttacagttgatgaaaaaatcctttactatttgaattccgaccagtgaatc

SEQ ID NO: 81306 - DNA, 96 bp, Heterodera glycines
ctccgctagaacaattggcatctaacgaactgttgatgagcggcaaattcggcgacccgactccgctggtagcccaattcgctgagccggtgccat

SEQ ID NO: 81307 - DNA, 387 bp, Heterodera glycines
atgtgtctgagcgctcttttcatcaacggccttaaaaaagattcaattcgggccgagttgataaagatgggagtgaacgaaatgaagttcaaagatgccgttgaaacggcagtgcttctcgagcagtccgaattggacgcagagcaaatcggtgggcataagaaagccgaagtggctaaagtcttcgctccaaagggaggaagaaagagcagcgcaccgacgcaacagcaacaaatgcaatgccaccgatgtgggaggaatggccatcgcaacaatgagtgcccgaacaaggactcaaaatgccgaaagtgtggaaatgttggacactgggctgtgatgtgcaagacaaagcagggctccaattggccaaggaggcaagggaagcca

SEQ ID NO: 81308 - DNA, 211 bp, Heterodera glycines
atgggtccgacaaacgaaagcgacggaccgaagaagcaaaagaagggagggagacggagggacggaatgttaaagtcaacgccaaaaccaaaaggcatggcagcagcatcaacggcacttcgccatctgtcaccacttcacaaagttctgctcgtagttgtcgcactgctccaatggacagcgacggggggaagggccgttctgcttcaag

SEQ ID NO: 81309 - DNA, 428 bp, Heterodera glycines
ctgttatttatggaccaaattgaggaggtttcctcggagttgcaacaggtgaagggcgagacggcaattgtggtgaaactgaaggaggggctgaaggagagcaaagtgatccttaccaatcaggtgcccccgaggacgcaaattggcggcactctttccaaaaaaaacattttcaggacgaaatttcgctcaaagaatggcacacttcgcttcgcactgtaaccaatcaaatgcattcgtttggaggctcaatggcacgcccttttcaggctcatcgcgtttcgcaagagttgcttcaacggatgggccgaaaagccatcaaaatctatggggtcaaccacgacccgatgctgcaggagaacgaacggccgggctccgtcacccgggcctttctcaacagggctgcttctgtcgactcgggcatttga

SEQ ID NO: 81310 - DNA, 1278 bp, Heterodera glycines
tttcgcttccgcgactcggtcggctctttcaacagtccccgctatccttccaacgttcgtcatccgttttgcctcccattccgtctgctcttccgtttcagtatccgcttgatgccgagtgcacttatcacatcgttggcccatccaatgcccaaattcttctctttttcaaagtttagccaaattcgtccccaattaccgccgcctttcccttcaattaagcaatttgcgcttttcgaggagaattccatggacgagtgcaacgattggttggaaatattcgatgtttttcgcgatgcgaacggcggagagactttgaaattgcagggtaaacaaagaaagtcaatttcattcctttccaattgcatttgccgctttctcttctttttctcagccaaacattgttggcacgtcttccccgggcccacagtgtccgcccatggctcccacgaaatgcgcgtcgttttccattccgacaatttcggcactgccaatggctttgacgcgcggtacgaaattcgcccggcggccacaaaaagtgaaattggcaattttctatttgccaatcagcggggtgattaattactaaagttcagaagtgtctgacaccaaagactgtaaagagggaaaaccatcggcgacgacaatcgaagcgaacgaacagcggacgacggggcattttggtcggaattggcaaagaatgaatgaattttgaaagaattcgaacaatttaaagcatcgcccggctttcccgtcaaatacacaaagaatttgacgtgcgatttggagattcgagttcgagaagggcaccaagtgctgctgaaggcgaacatgttcaacgtggagggacaaatgacagaagaaaaagtaaaaaagggatgggaggagaagccccttccctcctgctcaggtcgactgcatgaggtgacctctctttgccacccttccatctcttttcatggcatttcaattcgctctcagtgccgtcctccgagttcatttgggcacggacaaccgaagcagtgggtccgacttgcaattgtgtggcgaaagtgtcgcgatgattccggcggtttgtttgtttttttgctgtgagcgatgccatttcttcacattttaagattgtgtccagctccaattcaatccggctgaggtgaaaacattgccaaatattggcacactcccccaatttccctgttcagttttctcacttcgcccgaaaaggtcggccatttcgtccgtccctttgccttttctcttttcgttttaacttatttt

SEQ ID NO: 81311 - DNA, 90 bp, Heterodera glycines
atgggccaacgatgtgataagtgcactcggcatcaagcggatactgaaacggaagagcagacggaatgggaggcaaaacggatgacgaac

SEQ ID NO: 81312 - DNA, 558 bp, Heterodera glycines
atgccaattgcagcttttaccgattgcgatcacgtgttcgattcgccccgcagtggtcacttctctctgccagtgtttccccgggaggcaaatgccgactcttccgcccttttcgcttcatctgacgacgaaaatgccgaaaatgatgaagccccaaatggcaactacgaaagagtgccgagcagctcgtggcaaccctttgtcactgccacagcagcggcagaggaagcggaagaagcgggcaaaagggacgaggcgaacggaattgtgcggtaccaatcactgcccgaaaacatccaagtgagcgccagcggacgacaacgccaacagagcgctgctaggactgaaaatgattgtcccagggcattaattaataatcatcccaaatttgtaaaacaattagcacatttgcaggggtttttaatttttattcccaataaattttgtgttattttgcgtaactgttctttttcagtgtatatacacgtttgtcgcccaaccgcgggaacgagtgaagctgcaaattgagcagttccaactcgagggcaccaccaatca

SEQ ID NO: 81313 - DNA, 3061 bp, Heterodera glycines
  unsure (1)..(3061): unsure at all n locations
ttacggacaaatcggaaaaagtcattgaaccgccattagatacgcaacgacgcacagaaaaacnacagccaaancctaaaggaagcangggcccncgnnnnngcggnccagaaannccaccgaaggnnannnggnaggaaanncacgcnncncaaggaccacaagccanngcnggcnanannnggcncnaaaaagggaanaccgannnangcggcaagncgncnncagcgcngggcacggancaggnccaannacgaanncgacataaagtacatcaacacgtcatcctttggacaagccgatgtactgtcccgcttaatcgccaattatccccggccggaagaagacattttgatagcaaatatctgcacagagacagattgctacatcaacaccatcctccaaactgcaactgatcaattgccgatcacgaaagcagaaatttcagaatggacgccaaaagacgaagtcctccgaaaaatttctgatcacaccaaaaacggctggcctcaaaagtgcaccgaccccgatatctcaccttattttcctaagcgaaaggaaattttagagattgatggagttttgctctacggaaagcgagtgatcgttccgacccaacttcgtgaacgcatcatcaaggctctacacatggcacaccccggaattgtgcgcatgaaagccctcgcccgtcagcacgtgtactggccaggattggacttggaaatcgagcgtatggtcaggcaatgcgaagattgccagagcgcccaaaagagtccacccaaagcaccgctcgctccatggacgtcttgctcacgaccattccaacgcattcacattgatttcgccggtccctgttcagatggccactcctatttgattttgatcgactcattttcaaaatggccggaagtatacagaatggaccgaatttcgacaccagcaacgctccaagtcctccgatccattgtctaccgcctcggatttccagaagaaatcgtgtcagacaatggcactcaattccatgccgcagaatttaaggaattttgcagcgagtttggcatcaaacataccttcaccccgccgtatcacccgcaatccaatggccaagcggagagattcgttgatacgttcaaaagggccatgaagaaatgcgccaaagatggaaaattttgggcagaaaagatgcttctcgcctacaggacaaccccgaattcggcactcaacggactttcgcccgatcaattgttcttcggtcgaaggcttcgaactcagctgtctctcgtccatccgaaggaagaacaagccgaagtcatcgacccagccaaaatccgcaaatcacaagctgattatgcgcgaaaaatggcccgtcaatttgatcaacaccacggatcaaaatcggttgagtttttgccaaaagatcccgttttgcttttgaactttaatcgtggaaaacgattttggcttaatgggaccatcatcgaacgattggaaaaatccccgacgtatcgtgtccacgttccggcactcggaagagccgtacatcggcacgcaaaccaattgcgtcaccgttatcctcttgaagaggacggtaatgatacggtaaggatcccaccccaggctcaagaagagcaagaccgggacccatcgccgatccgcgagcctcctccgcaaccggcaccaattcgacggactcaggcaaagcgacgatctccgagtcctcctttggccccgcgtcgatcgcaacgccaacggaaagcgccgatccgcttctcgccaaacccctgagggttcagcttaaagaagggaggtgttggagtgttaaagaatttgaatttggcgcgcatcgattattgattaatgttgtgacgtgtcaatccctcccccttattcattttgtttatttaagcactccctccttccccacatggttccttctccattcattttgctattttacattttgtactgcatttgacctccgacataaattgtgtttattattttattgtgtgtccaaagttgagacacaacattggcgcagtcagcagccgtgcttcacccattcgaagacacaccgaactgcaacccaacctcaacaaaaccaatagtcccaagacgggtgaggtccgctaaatttagcggttaaattcgacaaaaaccaatagaccctaggcgggtgaggttccgcaagacgcggttttcttcaatttcgacatccaatagtccctaggcgggtgaggagccactctgcgtggttaattgctgatcatcggacgagtcaaagccaatggacgccacccaactgcagcaagtgcttgacgcagtttttgcacgatttgccggaaatgcggcacctgcaaacgcggcctcatcctcactggcacacgcgactctggccagctccttggacaaccggatcaccaaattccactacgattcggaatgcggcaacacatttgaccggtggtttaagcgatttggagtgctcatcgaagaggacggaaaggaactccccgaacagaccaaagttcggcttcttcttggcaaattgggggacgacgaatacaacaaatacagagacagcattagcccgtcccaaccggaccaggttaaatggggcgaatcgctgacaaagctcaaggatttgttcgccgaaacccgctcacttttcgtccgccgcttcgaatgctttcaaattcgacaaaagccgagccaagacatcacatccttggtggcacacatcaacgccgcttgtgaaaatgccgacctcagcttgacgaaggagcaacttaagtgcatcatcctcgtgattgcactacgcgacgagcaccacgatttgcgccaaaagtgcctaaaaatgctcgaagaagcacagaaaaacggcacgcaagtcacgctcaagcaaattgaagaggaattaaggaccattcagctggtgaaggacagcgcactcactttggcaaatcctcctgttgcaacccatgccattcacacccggccacaacagtggagggacccgaaaggcaaaacaccgcaacaacccaagagggccaacaatgca

SEQ ID NO: 81314 - DNA, 2556 bp, Heterodera glycines
atggcctcatcctcactggcacacgcgactctggccagctccttggacaaccggatcaccaaattccagtacgattcggaatgcggcaacacatttgaccggtggtttaagcgatttggagtgctcatcgaagaggacggaaaggaactccccgaacagaccaaagttcggcttattcttggcaaattgggggacgacgaatacaacaaatacagagacagcattagcccgtcccaaccggaccaggttaaatggggcgaatcgctgacaaagctcaaggatttgttcgccgaaacccgctcacttttcgtccgccgcttcgaatgctttcaaattcgacaaaagccgagccaagacatcacatccttggtggcacacatcaacgccgcttgtgaaaatgccgacctcagcttgaaaaaggagcagctaaagtgcatcatcctcgtgattacactacgcgacgagcaccacgatttgcgccaaaagtgcctaaaaatgctcgaagaagcacagaaaaacggcacgcaagtcacgctcaagcaaattgaagaggaattaaggaccatccaattggtaaaggacagcgcactcacattggcttcacctcctgttgcaacgcatgccattcacacccggccacaacagtggagggacccaaaaggcaaaccaccgcaacaacccaagaggaccaacaatgccaaggagcaacccgcgcgtccaccaaacaccaattacggcaaggcaagccgcggatcaccaactcatccgtgcggctcatgtggagaatcggatcattggcgtacggattgccgattcaaggacgccacatgccataaatgccaaggacaagggcacattgcaaaggcatgccgacgcagctccaaccaagcgaaaaatcgcagagagcgatccgtccacactgtcgttgtcaaatcccactgcatgggaattggaaccgcagcaggccgctggtggcgactcacgttcatcatcaatggaattaagattttgatgaacatcgacactggtgctcaggccaccattctcacactcaaaacgtggaaaaagctgggttctccaaaactcgacaaacccgacattgaaacgcggaactgtaatgaagttccattcaacgtcgaaggaaaatttgtctgcaccgtttgccaacccaatcaagcacccaaaaagcttgtggcatacgtcagttccgaaatcaattacgatcttttcggactgccctggattgaggctttggaagtcatcccgcgtgaaatcatgcaccccgacatccacccaaaagctcaaccagccccagcagaaatcaacgccatggccattcctcagccaacccacaaaattttggatttggaatcgctcacaaaggcactccaggctgatttttcggatgtttttggccccggattaggccattgcaccaaagccaaggcccatttgattctcaaacccgatgctcacccaacattctgcaaggcacgacccgtcccacacggcgccctcaatgcgtcaacgaagagttggaccgccttttgcagattggagccatcaaaccgattgagttcagccattgggcagcaccgattttggccgtaatgaaaaagaatggaaagacccgagtttgcatcgacttttccaccggcctcaacaattcgctcgagttgaatagacaccctttgccccggcctgaagacatttacacggccatcagcggctccgtctatttctccaatctcgacctccgagacgcgtatttgcagatggaattggatgaggaatccaaacacctttgtggaataaacacccaccgtggcctcttccaatgccagcgcctcccatttggcgtcaaatctgcgccgtctattttccaacatttgatggaccaaatcgtctcaggcatcccaggcgcgtttgcctacctcgacgacggcataatcgcctccaaaacgcttgaagagcacgtttgttccctttacaaactcttcaaacgaatccaggaatttggccttaaaatccaattggaaaagtgcaaattcctccagcccgaattgctatttctcggccacgtcatctctgcgaaaggaattcgccccgaccccggacgatcagaagtaattcgccaaatgccgccaccacatgacttgagcacacttcgctcattcctaggcgcattgaattattatggaaggtttataaagtccatgcgcgaaatccgcgaaccactggaccagcttctgcgaaaggacgtgaaatgggaatggaccgacgaacagcaaactgccttcaaaaaggccaaagaaatcatgctgtcggaccttttgctcacccatttcgacccgtttcttccaatcgtcgtggctgcagacgcctcaaaagacggaattggcaccacaatcagccacatttttccggacaaatcggaaaaagtcattgaacacgcgtcatgcacactcaacgacgcacagaaaaactacagccaaatcgaaaaggaagcattggccctcgtttttgcggtccataaattccaccgaatgttatttg

SEQ ID NO: 81315 - DNA, 651 bp, Heterodera glycines
gtggaatttatggaccgcaaaaacgagggccaatgcttccttttcgatttggctgtagtttttctgtgcgtcgttgagtgtgcatgacgcgtgttcaatgactttttccgatttgtccggaaaaatgtggctgattgtggtgccaattccgtcttttgaggcgtctgcagccacgacgattggaagaaacgggtcgaaatgggtgagcaaaaggtccgacagcatgatttctttggcctttttgaaggcagtttgctgttcgtcggtccattcccatttcacgtcctttcgcagaagctggtccagtggttcgcggatttcgcgcatggactttataaaccttccataataattcaatgcgcctaggaatgagcgaagtgtgctcaagtcatgtggtggcggcatttggcgaattacttctgatcgtccggggtcggggcgaattcctttcgcagagatgacgtggccgagaaatagcaattcgggctggaggaatttgcacttttccaattggattttaaggccaaattcctggattcgtttgaagagtttgtaaagggaacaaacgtgctcttcaagcgttttggaggcgattatgccgtcgtcgaggtaggcaaacgcgcctgggatgcctgagacgatttggtccat

SEQ ID NO: 81316 - DNA, 735 bp, Heterodera glycines
atggactggacaatccgtcagtggcatcaaggacaatccgtcagtaatggactggacaatccgtcagtggacatcaaggacaatccgtcagtggcaattcgtcagcattttttctttttacaagcaatgatcaaaaaattttgcgattgcgcttgttcggtttaataaaataaaaattggaggaggttttgtaacatttctcgttattagtaattcaattaaataatttttctatagaaatgttcttttaaatattcttaaaataaataaattattatttaattttttcaatttaaattcattttcacattattttatttaaatgttcctgccctgtgaagacgctaattgcccataattgactaatgccataataggcatataataatttaaaatacccacggggcgggggacgttacatatcaaatgaaaataagaatggaaattgaccaatctcacctcaacaaataattttaaatttaaaataaattaaattgcaataatttataataaatgagaaaattgcgcacggaaaacaatttgagacgatcttcaaaagaatattatgatgtatttgagcgatttgttgagaagggacgacggattttattggtgagggaaaaagagggggagaagcgcaaagcgaagggaaaattaacccaattcaaatggacaaacgaacgaatgaatgaggcggaggaattgggcgagggattggggcggggggatggataa

SEQ ID NO: 81317 - DNA, 928 bp, Heterodera glycines
atggcacagcgcgtgggtttcacgcagataaagtacacgcgcactccagcggaattccatcaactcttggacgatccaacattagacaaactggactttgtccacgtctccgagcatatggaccgagttgttgtcaggaagcgtcccgagtttgcaaaggcacccctcacaaactgtcttccagtcgcaatatacgtcacatcgtacgcgagacttcatctctattcatacatggaaaaagtgattgcactggaaggggctgagcttctttattgtggtttgcgaatacaatagaaaaaaaaaatgttagataattttagacactgactcaatctactacgtgaacaagatgggtgggcggtgtgttccggaaggcgaggcacttggacaaatgaagcgtgagcatgttgatcgtcgaattgtggaatttgtagctggtggtccaaaaaattatggaattcggcacacagcacgagacggaactgatgagcgggccaacctaaaaatacgaagcttcagattatcgtacgccactcaacaattactgaattttgaagcaatgaaggatctgacactggctacatataacattgacggacctatgtcagttttttttatttttcacaactaataattttaaattttagtgatgatgtcatcgacaacgatgatctctacgtgtacggaggaggtggagcccatcgttgcatccgagtaactttcccgcaaattgaccgaaatgtccgttctgacgtatacacctgcgaggcccacaaagactacagacctttctacgccaagggccgtgttcgaccgggaatgcaaacacgaccatttggatatgtggaggatgtatcacatccaccaatacaacctacggctgaacgaagaaagagaacattgattgaccctgacccaactcgaccgg

SEQ ID NO: 81318 - DNA, 1526 bp, Heterodera glycines
atgccaccgctgtctctagaggatgactctctcgcgactcactctcgactgaatgaatcgagaatttccaagggatgtatttccggaattaatcgccaagtgattaacaaaaaataatcgactattgtaaaagagcacataaatccacatttccctttcatcttgctgagttcttctccaaaattagacatcggaaaattggaaaaaaaatgtcttaagataaaaaaataatataatatatatattttttggcacttttctcaggaaattgattgctacaaaaaactagtcattttaataagccacacattttgatcataattttgaaattttttttccaatattcaactctcgaaaaaggccaaaggtttgccctggcatttgtaaattatgaatttttcggtaatggtgagggtcaactgggccttgggccaggttttttggtataactaactccgtccataattgaccgacaaaaaattttcaggcaaaatttaaacatagggcactcgaatgatatcaaattcatttaattcggacatcaatcatttggttggggctcagtcgttgccggtccgtgtggcaattcaaaccctttttcaaaaatgctttactaaaaatccaaaaaacatggttaaataaagaaatagtcgcttactgattttattttacccataattatttatcttattttgcgagttttcaaataagcttttttgtttgttagaatattgttgtattgttgtcctgaaaaaaaagattttattataatattttggctgaccaattcaaagtcccaaaatttgtgaaaacaatggtggaaaaatgacactaaagtttaattaatattgtttttttgttaattgatttttgagataaaaactttgcataatttattcccaccacaatgtttttttaaatttaactgacgatttttacagcaaaattagtacgattggactctcctctctattaaaatattaataacattcattaatttaattggattaggcaaaggccaactgatcattcatttgttaatcgcgtgaccacgtgcatttaaaatgataataataaaaaaataattacttttccatttgaaccacccaaaaacattccttatcactggtataattcaccaaattcgtccttcaaaatcaaaattttacattgtatcgtcatatcatgtcatcttcgttgaattggtatatccccccatatatcaaccagaacttttttttattttcatatacatatatttccagggtccggatttatacattttttatttttcacaaaatttgaaaatggatttttctattcatttcgtagttgtaagaatgacttgaatattgcaggaaaataccttgatatgaggactttctatatgtaaaatttaaaaaatttgttaatatacaaattaaaaaatatatttataaaacttgataaatcaaattcagacactgccttgaagagttttatctaacgaaacgaacagaaaaatcgcatttcaaatttggtataaa

SEQ ID NO: 81319 - DNA, 699 bp, Heterodera glycines
atgataaaattgaataaagccgagctgatggaggtaattgagcactgttgtctgatggaccccgaactctgctgcaagttggcgctaactagaacacggatgctgctgaacgtgctgctccaagtcatccgaatcgagagcaggtggacgtccggagcggggttcatcttcgagctgctcattgccttcacgaaattttgtgaaccatcgcttaactgtagaaagagagagtgcatcattgccctcactttcacaaatatttcgaagagcttgggttggggtataattttttcggaattcgtaaagtaacagttgtcttagccgaattttgtccgttttttgaaaatcgttcgattttgcaaaagtaatggctatacaacaaatgcaaatggccagaagatggccaaccgtccgctgattcatcccaattgcctgcctccctttttcaatctctttagaattaaatatcattttttgcataatttgttttttcagagggtcagaactttttcatcaacccaatagaaaaggcaaatgaagacggttatggagaaacgctcaaataaatgatgataatcagggatggaattatatatgctaaaaaacgacaaatatgtgcatgtatatgtgccaaaaaccccccaaataagtgataaaaagttaaaaaagccatgccaaaaactgaaaaaaaattgttta

SEQ ID NO: 81320 - DNA, 73 bp, Heterodera glycines
atggaccagagaaataatacagatgctgaggttcaaaaaatttcattaaacattcaacagctgagtcaaaagg

SEQ ID NO: 81321 - DNA, 503 bp, Heterodera glycines
atggctttccttaaggctctttctgctttggagcaggacatcggtgacattaatcagattttcaaagacttggcccatttggtgcacgaccaaggcgaaatggtggacagcattgaggttgttgtttaagctgtaggacaaagggagggcaatgggaagagcaacactttttaaatagtgccgaaatgcatttagaaaaggaaagggcaaatttaaaaaatgaataattattcaggcgaacattgagcacgccagcatccacgttcagcaagcaaacacaagcgtggcccaagcggtgcattaccaagcgaaggcacggcagaagaagctgatgatttatgtgagtgaaactgcgcaattgaaaaaaactatgccaatcaattaatttgctaattgccttccaccggtgatattttcagatttaatttatttactttcaggctttttgcatctttgtgctgctcgtcctgtttcttgtgctttacttgtggctaaagcactga

SEQ ID NO: 81322 - DNA, 436 bp, Heterodera glycines
atggggagaggaggaagagaaggaggaggaagggagaaagaggaggggaaagaaagggcactgaatggtaagggacggacagaagtaaaagcaaagtcatcacaaaaataattcagaggaagcgatgagaagcaaaaagacagagggagagagtggaggagagacgaaaaagggagagccaaatgaaaacggacacatggaaaacgacgttttataggggggggggggggggatggcattgcccgtcattggcacgcactcatttcacttaaccgaccggtagcaataattcacaccccgggatttcgataacaatcacaaaaaatagaaaaaaacaacaaataatttaggttaatttatgtaaaaaaaattaacttttgcgaagataaaaaaagtttaatgaattatattataattgatataaaatgagaataaa

SEQ ID NO: 81323 - DNA, 81 bp, Heterodera glycines
gtaaatgtccaagtgctggagaactttctgctcgcgttggaattgggctactccaagcacaacaatccctaccacaacacg

SEQ ID NO: 81324 - DNA, 175 bp, Heterodera glycines
atgctcaacggcgaaagggattggtccccactcggcacggaccgtcgtcagcccgtccgattggtgcacatcaaacggccgaacaccgtgacagaaacagggccaatggacgtggcacaaaaggagacattttggcggaggctttccacgttgaaaggatacacagaagttgcgg

SEQ ID NO: 81325 - DNA, 7926 bp, Heterodera glycines
cagaccgaccaaagttgagctcaccaaagggataagtgtgctgatgagaagaggtggtgaagatgaaaatggtgaagttgtggatgctccacccagacctcccgctccaccaccaccaccaccaccaccaccaccaccaccacctccgcctgggagacgcccttggcgtggaccaagtcctccccctccacctccgccacccgggagacgtcctcggcccccaccaattcctccaattcccgctccttctccaccagggagtcctccacctcatcctaaacgtcctcccagaccgagtagagcagcgccttatcggagaggtggtcgtctggagcaatggcagaaaaggcgatacgatatacaacgacggcggccggttgtacgtgatcttcttgctgaagcagctgccgctcctttaccggaaagtgataatgatgatgattatatgttggagagtgggttcgctctgccagcgccatcacaatactatggcgatttacctgtgctgccagacaacgcggacgaaattgaggagatggacaccgcacagcataggattgccaccagaagaaaattaaaaaaggatgaggcaggtgaaaacaatttaagacacaaaaaacataggatctttcgcccttcgcctccacgacccacaccaatgccgcgtgctaaagcaaaaattgaaccaagacctcctccacctccacctccacagcgtccttctgtcaagatagaacaaaagccaaaactggaacttaaaccgtcgacaccaaaacaagccgatcatcccacaccagcacctaaatcgaaaagtggaccaaaatttgagcagctagattctcgcccatccacatcaaggcaagccggatacttccccccgccgacacccaaaattgaacccaaatatgagccgcaatcgacaaagagacccgtgccatatcagatcccgaaaaaagagccaaaaattaatgaaacgccaccgcaacagcaaccccctcctgctgctgtcgtcgaagaaatgccctatgttcctccgcctaggagggggaccaaacgccgccaccccgtgaatggtgagaatgatgatgaggtgcgcatacgaaaacgagttaggcaaccgaggagggtaagagtacagtactcgcccgagccgggtccatcaacatctgcgcagagtgatgaacaacagcaacaacaacgtgaactgtttgccattccgtcaaatcagctgaccatgactcagcggattgaacgactgtacatcaaatgcaaccgttatgcggatcgtatgggtgtccggggcaatacaattaacacagcaaatggcaagccgttggcgcatagcaatttgcgaatggccatcaggtatataattgacaggagagcgggccgccccaccattaaaccacctggagcggccctattggaagagcggcttagacaggacccaattttgtattcatggacggctcctccaaagagaccgtcaaagagcacaaccaccaagacggcgccgaaaatcaagaaggaattccgtccgaaaaaatggagttaatcaacaccactcttgacaagctgtacaataatccatcctccccggcagcgttcgccggagttaccgcactgtggaaggaagcgcgaaaaaaagctaaaacatttacggaaaagggatgtgcagcattatttggaggggcaccgcacctacactctgatgcgcccccggcgggtgcgctttccaagggccaaaactgtagcagcgggattcatgaccgatgtccaggtggatttggccgattttcaagctctttcgcgtcacaatcggggtcaccgctacctgctcgttgcggttgatgtcctatccaaacgcctgtttgttgttccactaaaaaataagcgagccgaggagatgttggaggcattcaagcaactcatcgatcaaatgcccatggtcccgcatcgcattttctcagacaagggcaccgaattcaagaacagattgatgaaggaattctttgaggagcaggaaattgagaagcatgagcccgttcattcgtccgtcaaggcgtcggttgctgagcgggccattcgtaatgttaagcagcgattgtatcggtattttgcggaaaaggagacgctgaactggctggatacagtacagaaaattgtggacgggattaacagttctccatctcgtgttcacgggatgcgccccattgacgttgacttttcaaatgctcagaaagtgtggaagcgaatgtaccaccgacaaccacgattgagcggacgtaaaagaccaccacgttttcacaatgatgaatttgtgcgcatgagtagagagaagggacaatttgagaaagggtatttgccaaattacggggacgaaatccttgagattgatgaggtgttgaaagcggtgcgcccaattcggtacaaattgcgggatgagcatggagagaaattcaagggcagcttttatgaacaggagctggcacgcgtaagaaaggacgcagagacaagctaccgtatcgagaaggtgtacaggaagagaaaactgacagacggaacaacggagatgcttgtgaaattcataggatatcccaatcgggaatggattcaggaatctcagcttgtataaaagcgatcacatttttcattatttgtgcagataaacaatcatgtcgaacagtttctttgtgtttttgcctagcaatgtaagtgattacccggacaatcagcccaacaaatttcgtgtccgcctcccaaaacctttacattttaatggctcgtgggtgtgcggactgcacagtatcagttacccctactcatggtcaaccattggcacattggatgagcagtggattgacattcacttcaccgaccgtagcgcctccgacgaggacagacaacgagtgatcagagtgccggtgcccagggcatcgcatagtagggttgaacagctgagagactttttggccgtcacattgcggaatcgtagtggtgcaaaattgttgccacttcccagtgaggtggaagcgaatcggaatcggacaaagcctctcggctcgccaccaccgttgaagagagagaaaagagctgagtcaccgccagtgtttgacgagagcggaaaacggcttgaatctcccccattgtataacgaaaatgatgatgctgatgacgaagggatgcttgaggagtcaccgcctcgttttgatgaagaagaagaagaatcgcaaacaaaagacactggaatagctcctgtcacacccaaagaaattgatgatgatgaagggttgcttgaagaatcaccgcctcgtattgaagaagaagaagcgcaaacaaaagatattggaattgctcctgtcacacccaaaaccaagtctccgccaccagcagcaactccaagtcctattaagccgtcaatcacaacaccatcggctccaactacaaaaccaacaacaacaacaacaacactgacctctcagccacccgcaaagcatctatcgcccgcaccacaaccgcaaaaaccgttaacgactacttctcaaccgcaaaagccatcggcagttcagccacaaacaaaaccatcaaaccctccgcctccaaaaccaagaatagcgacaacacctgccccgacaacaacaacaacaacaacaacaacaacaacaccatcaaaaacccaaccgccaccaccacaaacagtagcccctaagtctacaacaccagttcctccacctccgaagtctacaacaccagttcctccacctccgaagtcagcaacacctgtccctcaaccgccaaagacaataacgccaccaataacaaaagttcagagcccatcagttaaaccaacaatttcggcaccgccggcgcaactaaaaagttcggcaccgtctccaaaatcaacagcatccagtactacagctaagctgacagcttcaacttcccttcccgctaaatcgaggcctagcgctcaatcgccgccatcaccgccgtcaggctctccaccacgttttgaagaggaagaaaataaagcagaaaaattaaccgcaaaggcaacaacgcctgcaaaaccacaagtcacgagtccgtctgttaaaacaaccacaattacggcgcctccagcgcaactaaaaagctcggcacctcctcaacgaaaaccgcaactgccaactaaaccgctagctccaatttcgctttctgctaaatttccatcgtcagggtctccaccccgttatggagaaaccgaacatcagcagccttcacccgctccaatcgcagctgctttaacgcagccgtcacccgcgccaacctcagctgctctaaagttagcagacttaaatttaccagaaaatatcctcagcgttcaaattgaccctctaggatatgtgcccaactcagtctcaataccatatcacgatgacgcagaacgtttcaaagcggtgttcaatgaggaggtgatcagtcatttgtcgttttcgccgcaattgggctatgttcttggtttcgaaaaccctcaacacgtagggtcaaatgaactctcaaagtatccggtggatatgcgtggcggcatctcaagttttgctgtctactcaaaaggattgaccgagaacatgatcatcggcaattcattgagctctttgctccgagttgtgtctatcagcggtgccattcctaatgagtataacgagaaaatttacgattcgccaatatttgcgcgagtgctgccaagggagataaacgagattgaaattgagctgcgcacaatggacaaaggacgattggtgccgttcgcctatggaacaacgatggtcgtgttgatatttaagaaagtgataaatttttgattccattcattttacatttcatttataattaataataaatggttcatattgtatttgacccgagcatagcacagtatgacgagtatgtgcagtacggtagcggattagaaaaggacgatttcgactactttcgggggtccaaccccttccaacggggctacggtattcaacgcggggcgggcgttggggatgtgtttcgtggactgtggcgcttttttctaccaattcttcgccgcgttggcactacagtaggatcggaggcactgagcactggacaacgcgtgctggaacgagtcgggaatgaggggataccgtttaaagaggcacttgtcagtgagggaaagaaagggatcgacaccgtactcgacaaaggaggattaccaaaacagtttggaagcggaaaaaggggtataaaaagaaagaaagcacatctgcctggtcatcagacgctaattggacgacctattgtaaaacaggcaaaaaagcgtattcgatccgacgcctttggactatattaaataatggcgtttcataaaattgacaacgattctgtgaactcaatcaccaatgctttggactttttccgaattccccctacaaatgtgagcgtttcgtcatcaaaagtgttcgagcttctgcccagcaaccctctgactgacacaccgtaccactttaaacttcattccagtcaaaattacattgacctctctaaatgttatttgctcactgagttccgcattcgcaaggaaaacgcaaatggacaacttgttgatctcactgttgacgatgcacacattgcgccaattcaaatgatcggtcaaactttcatccgtaacataaaaatgagtatcaatgggcgcgaaattttcaatgccaacgctttaatggcttacaaaacatatttctcgcatgagctctcctattcaacgacagcaaaggactctcatctgaacgccgcaggctattatcgggatacgggtgatgtgcttgagacgggaaacggatgcatagcgcgacgtgatttgtttgctggtagcggtgtagctcaattcatcgccaaaattgacacagacctattcaaccaaccactgtatctgatcaatttttgtgaattggacattgaaattctgcccaatgacaatgagtttgtgttaattgcgccggccacgggtgcgccccggtaccgctttgaagttgttggactgaaattatatgtgaaaaaggtgtctctgatggatgggttggcgctggacattgcgcggaagctggaggtgaaacctgcccgttatgcagtgcggaagacaatgatgaagtcaatgttcatcagtcagggtcggtatgagtttacagccaacctgttcatggaccaaatcccccgtcgtgtgacaatgggtctggtggcgaatgctgattatgtcggctcaattcggcgcagtccattcaattttcaaccatttaatgtgcgcgaaatttccattgttgctaatgggcgctcgtacccacaagcaccctatgacttggactaccctaacggtaaatatgttcgaccattcaatgacatgaacgaagcggtgggattcgcaaattcttcggagagcaacgggataacttttgcccaatatgggaaaacgcattgcatttacgtgttcaatttgaccaacagtggggatgatcaagcggcactatttgatctgataaagaatgggaccactgccgtcagcatcaaatttaaccacccagtgcccgacggaggaataatgctggtggtgatgggagaatgtgactcactggtgatgttagacaaaaatcgatcaataagcacagacaccactatttaaagtccgtttgtcatttctctttgttccaataaaataaaaatgtattcaaaaaaatttgcccaaattttgttctttctccgagtttctcttcccgttgtttcatcaacattgcgacaacaacaacaaccggaaaatacctactctgcttacctaaaaaatttgactttgtctcgacaacaatatgaaccacactattcatactctgaatatttaaggagactgtctttattcaaacgtaccaccaacaccattctcagtacaacaactgtcccattaacaactacctcgaacataaacacccatccaaaaagcgacaagttaattgatgagcatgtttctgctgttcttccaccgcttatccaaatgtgtaaggagcagcctgaggaaagcagcatttttcatcaagctatttgctgggccctcttcactctctatttaatgcttatcatcagtcttgtgctacaccaactctgttcaattttttggttgaagaatggacagcgtgcaaataacaaagattttgaacgaaaattgtcggacagagcgagcatttcggggctgctacgccagtgaccaattgccacctccctccacactacagtactccgcagcgctcgttgtgaaccgggacccccaccataagaagggctctcattggtgcgctatttatgcaaagggattggatgcaccagtgttctattttgacagccttgctcagccaatcccagccgctgttacgtcaacttttttgtgtaaattcccggagggactgaggaagaattcttacccctaccaatcctctttattgtctacttgtggtgcccattgcattgttttcatttaccatatgtccgtgggatattcatttgagcaatttctcactacacttagcaattgtacaagtcctgatatgtacgcattagttgtatttaacaaaatattaaataaataaaaatgttttataacttgattgtttattcaattacgaaaaaaaaacttattcgattgaaaaattaaaatagtaggaaccagggtgttgagttgtttcaataatcattaaataaccaacatctcctttgtgatgcggattcatcaatcggtaaagttccatcccatcggcgcggaccagttgaccaaggccatgtgacgccatttctgttgccgggaattggagaagccgcgggaagtgttgacgcagcaaataaccgcctgcagtccgcttcttcatggtcagcgggtttgcg

SEQ ID NO: 81326 - DNA, 1550 bp, Heterodera glycines
atggcgaataaatttttacttgttcctcaagaaatttatcgtggtctcacctccatgtcggacacgggagacattaaccttgatgctgttcgatacgatttggaccgtgccagggccgaacgaacccacccgtctacaaaaaatgtccactacaaccaacagcttagacgctatttgaaaatgaggagggagcttaccgacagaccgaccaaagttgagctcaccaaagggataagtgtgctgatgagaagaggtggtgaagatgaaaatggtgaagttgtggatgctccacccagacctcccgctccaccaccaccaccaccaccacctccgcctgggagacgcccttggcgtggaccaagtcctccccctccacctccgccacccgggagacgtcctcggcccccaccaattcctccaattcccgctccttctccaccagggagtcctccacctcatcctaaacgtcctcccagaccgagtagagcagcgccttatcggagaggtggtcgtctggagcaatggcagaaaaggcgatacgatatacaacgacggcggccggttgtacgtgatcttcttgctgaagcagctgccgctcctttaccggaaagtgataatgatgatgattatatgttggagagtgggttcgctctgccagcgccatcacaatactatggcgatttacctgtgctgccagacaacgcggacgaaattgaggagatggacaccgcacagcataggattgccaccagaagaaaattaaaaaaggatgaggcaggtgaaaacaatttaagacacaaaaaacataggatctttcgcccttcgcctccacgacccacaccaatggcgcgtgctaaagcaaaaattgaaccaagacctcctccacctccacctccacagcgtccttctgtcaagatagaacaaaagccaaaactggaacttaaaccgtcgacaccaaaacaagccgatcatcccacaccagcacctaaatcgaaaagtggaccaaaatttgagcagctagattctcgcccatccacatcaaggcaagccggatacttccccccgccgacacccaaaattgaacccaaatatgagccgcaatcgacaaagagacccgtgccatatcagatcccgaaaaaagagccaaaaattaatgaaacgccaccgcaacagcaagcccctcctgctgctgtcgtcgaagaaatgccctatgttcctccgcctaggagggggaccaaacgccggcaccccgtgaatggtgagaatgatgaggtgcgcatacgaaaacgagttaggcaaccgaggagggtaagagtacagtactcgcccgagccgggtccatcaacatctgcgcagagtgatgaacaacagcaacaacaacaacgtgaactgtttgccattccgtcaaatcagctgaccatgactcagcggattgaacggatgtacatcaaatgcaaccgttatgcggatcgtatgggtgtccggggcaatacaattaacacagcaaatggcaagccgttggcgcatagcaatttgcgaatggccatcag

SEQ ID NO: 81327 - DNA, 504 bp, Heterodera glycines
atgaactcagcggtgccggcgcttcaaaaggcgggagtagatgtgtatgcgggagtcccatctgaagaattgctcaaacgtctcccaaaacccctcttgctcattctcgacgacctgatgctgtccatcgacgagaaatatttgtccgatttgttcaccaaaaagtcacatcaccaccaatttgcggtggtgttcgtcactcaaaatttgtttgaacggaaaataaaagtggcccgcctgtccgctcagtatctggtgctgatgcgggcccctaattccctgttgtccattcgcaacattggtgtccaactttttccgcgtcagctcgacttttttcttgatgcttaccgcaaagcgaccgctcgtccctatggctatttgctgattgatatgcacgctgcatcagacccatcattgcggcttcgaaccaacatatttaaggacgagcaggagggtgaagacgaaggaacggttgtgtttattcccaaaaatggagcgacataa

SEQ ID NO: 81328 - DNA, 690 bp, Heterodera glycines
atggcaatcaatatttccgacaaaaaggcgctcgtcaaccaaatccttgggcaggcagacattacggtgacaacaagcggcataaccgtgagcgggcctcgtctgtccaccccgcgatttataccgttcgaggagtgcggccgctgccgcgcatgcaaagctaccgaagtggaggtggacacaatggtgaccaaagaggggatcaccttgtggtgcagccggatcagcaaaccccaattcgtcccttttgacgttgtctatgacctgccgggccattgtttctttcgcgtgaaaaataaggcccgagtgttcaatgtgccctacggtgacctgccctcagacacgtgcatcactactactaccaccttctcaacccaagaaacgcaaaccgatcaggacctgaagcgcaaagcaaaggtagcacttgacttagtggaagccgggctaatggccgatgccatgcaggacggtgctcgttggaagaaggccaaaaccgcaatcaatgtactcggcaacctccttttagcggaatcgtttgacaccaaagtgacaaatagccctgtggaggaagagaatgtacaggaagagcccagacgagaagatgaacaaaacaaggaggaccttggcgacattgacaaaacgcttgacgagttctttgatagtattaaagcttcaaccgcaaacatgtaa

SEQ ID NO: 81329 - DNA, 1260 bp, Heterodera glycines
atgcaaatgataaaagaagagaaggatgcatgggtaataatttgtagaaaacatttttgttatttgttgttgggccaaactgtgtgacaaagtttttgaaaggtaaagggaccccgtggggagggggtttccctagccaattgccctattcattttaaaaataataatgttgcagtggaaccgattcctctgtaattcctgcgattttggccttcattgttatagagcaggcaattacaaaaagccaattgtttgtgtgcatccggacatctcgaacttcacggactacctccagcgcgcgccccaaacaactgcaacgacaaccgactgtccccagcccaacaacgagccgctagcaactgtcaatgatggagtgcggaaggcgctgaactgcgctgaggtggcgactaccgtaagctacccgtcaaatgcccttctcctccttttggtcatcgtttgtactgtctttgtcttccttctcttcatgactcaggcatttttaattatataaaatcataatctcaataaaatttttcctttttttaaagctcagccaacatttgatcaagttggcccgttttctctctttgaggcgagagttgaagcgtcgtcaaaaggaacaggcagaacgccgtaagtcttcatatttattttttgcacaatcatataatgaaaaatttgtgtgtgttaaggcaagcaaattcgaagccgacagcggcagaaacaacagcagcagcagttcaaaccgagtccattgtacgtgccggcccgtcgcagtccgttgcgcgagcaggaggaacaatttaatgaggcaatttaatttgtaaaattttttcccaatttttaaaatttcaggcgaacacgggacagaaacaacaccagcagcagttcaagacgcgcccgttgtatgtgtcggctcgcagttcggtgcgcgaggaggaggaccaattttatgaggcaatttaatttatattaaaaaaaaatttttacccaatttttataatttcaggcgaatacgggccttgatcatgtgtatgacactccggcaaacgtgccgagcaatcagaatggtgaagaggaggaggatgagtgggacgatgagagcgaattttagaaattcataaaaataaccgattgatcaatttattttttaaaaatatatccatatatttttttaatatatccatttatatacattttttatatatccatctatatttttcttaaataatcaggataaattgtaggtataaaaataaa

SEQ ID NO: 81330 - DNA, 1729 bp, Heterodera glycines
atgggaattctcgaaaaaggatccggcacggatcgacatcttttgtcctttgtgagttgggcatcgccattggaagccatcagtaggaaaacgtcaagcatgtcaaataaaggttttaaggaatatgcatttggaaattaatactttaaatttatatttgaaggtaaaatgcaaaaaaatgggccatttggagcaacacaatcaaacagcaaaacatatcaaaaattgtgatcgttttttgtcgtcaaaacaaaagcaaccattgatcagtcaaccgtttgttgttgataaatttgctgctgaattgtgttcaatgctgctttcagcgaatattcctctttttaaagtgaatacatatattcattttttaacaatttaactttatttaaggtaaataatccttcattcaaggcttttttggagaaatattgtggaagatccatcccacaccatgaaaccctcagaagcaattatgtgaaaaattgttttgaaggggtaaaatttgaaattttttgattgaccaatttttttcctttaggttttgtcaaaaatcaaggacgacattggcgaaaatggattcgtttggtgttcggttgatgaaacgacagacagaaatggacgctgtatggctaatttgcttattagacttctgaatgaacgttggaacgcgccgcatctgatttcggtgaagccactgttggacgaaaatggtgacccaaaagttgatcatcaaacggttgctcgttttgtggacgagggtttgggtgtgttagacatattaatgttttgattttatttattttagcggatttgctatctacaggagcaaagaaaaatcggcttctttttatggtgacggacggcgctgaatacatgaagaaggcggctcggaatctgcgtgttttctatcccaacatggtgcattttacttgcctcgctcatggactgcatcgaatcgctgaagagatccgcaatcagtttaaagacgtcgacgaattaatttcttctaccaaaatggtgtttcgcaaagcaccgtcacgtgttgctttctacagaaagaaattacctacagttcctctggttcccaaacccatttatcacacgatggggcacttggcttgatgccgtcaacttttactctcacaatttcgaagacattaatgaagtgaatgaattggtttaattaatttttttttaaagtttcaggtcgttgattcatttgaccctgaggaggcccagtgtattgccaaatctcagagatgcttttcgatgacaacagtgccccttgacattgcctacattgcggccaattttggttctctccccggagcaattactcgtttggagaaggaggggcttacgatacacgaatgtgccaacattctggtgtgaagtccgcgaagctgtcttttcgtcaacggggagaaattggagcgaaaatccgtcggaaattcgatagcgtcatcgcaaaaaaccccgggatttgatacaatttgcgatattggaaaaattctttctggtcaaaaatcaatttcggtatgccccccaatctgatttcactttacaaatacgctcccttgacttcatgtgatgttgaacgatcattttcaatttacaaatctattttgactgacaatcgctcacgtctatcgtccgaaaatcttgaaatgttacttatttgcaatgtgaatctcaataatgatttggcataatattttttgctttttga

SEQ ID NO: 81331 - DNA, 2964 bp, Heterodera glycines
atgggctattcaatggtcggtccgccgttcggcgacgacgacgaatttggcccactgtttgagatgaattgcaccggcgaaggtgtgaaatgcatcagcacaaattgcatttttggtatttttaatttcaataaaaacgacttgacaatttattatgattaggaattaaaaattggaaacaaaataaatggaagcccaaaaatattacaaaacatcccagtcgatttaagattatcaaaacttacaaaaatgggctggatttcgctttcacatcattcaccttttggccctttcacttttcatcttttattttgagtgaaaggcaacgatattatatttctatgaatggcattttgtggagaatggcaaaaatattattgaaaaattgaaagtcataaattgcaggcaattttggcataaggcaaaaattaatttgattttcatttaaaaaaaaagctttacccacaaaacactgaaattcatttgtttttggatcatattataatatcaacaccaaagttataaaataaataatgttgctgaaaaaaatttcacctttaaccgttcgccattttcatatttttgggcgatttctcctttcactttttattttcgatttggctcattcctagcctaaaataccaaggccctcggaaaacactgagcggggccctgtcctggccgggctctattaattaataattataatgccatcactggcaaatagacaacaagcacagcggcaccgcgctgcgttaccacagttgcagccgtgacgagatgctatggtgccgagcgcaccaattgcactgcgagaaaatgttcaacggaacggtgtccgaatgtgcgaattgtgccgaaaatctgtgcaatgccgaaaatgcaaatttggcattttcagataaaacggtggtcggcacagcgatcggaggtgggacaatgttagggagggggtggaattgatcgcaaaatgatcggagttatttttgaaaacattttaatttttcagttttatttcttctcggcactttgttttactgccttctgaggaacagaaaaacttggcaaattcacacgttgatccttttgttctgttccaccattttaaaactctgaattttgtccaacaatttgttaattcgaattaaattttgcattgtaaattaagttgatttttggcgcatttcgcacttattccttttattttaaattttttaactttttctttaacactaattgaacccttttgctccactaattacccatttttcaactttcattgctcaccacccagcgaattcattgcttctttctttgggatgataaatgtgtgctgattgattcgctcggatgaatgaatgtccgcctttggttggtcagtttttgagttgatccattgacctgcttctgtcgccgatgggttgcttaaaagggcacaatgccatcaaaagtgcacactttgtaaaatgcgaaaattattcaacataaattttaataatttaaataaaatagaaattaaaaaaagaagaaatgccgcttttttctaaagaaagtataaatatttcatattttttagagaattctacttaatcaaatgcttaacgcgcaaaaaaaatttgcaatttttgtttttctttttgagttttcatgtaatttccttacggcaaataatgtgaacaaagttggcgaaggaaaacaacagcaacaacagaacgcatatgtgtcagtagatttgtctaaaatggcatcaattaaattattaaaaataaaaaaatatataaaataataggttttttattttaaaaaataatgaaagatctaaaaataaattaaataagtttgacatattttaagcactgcgccaattggcgggcgtcaaagggcgtatgggtaaatgaattttcatattttattataatattaatcatggtaaactcattacagctcagttatccaacaacaaactcttagctcatcaagctcagctgccaatgataataaacaaattttcatcggagtgcctacgcctccgccagtgccaccgattccgtacggttacggtagtaaagggtaaattctttttaattgacttaattaaatcagtccaaagcaatattataaaaatttagcatttcgcaaaatcaaactgccaacgatgcaccatcaaatagcaaacaaatttaccttggtgtgccgacggcgccgccggtgccgcgcgtgccggtacagcacgatgaccgtagtaaaaggtttttgtggggtttttaaattgtttatgacataggattttagtatttctcaacaacaaaatgccgcaattgacaatgagcagtcaaatggtggtaacaataaacaaattttcatcggtgtgcctacgcctccgtcagttccgcgtgttccggtaccgtacggttacggtaataaagggtaatttttttaattggcttaatttaatcagtccaaatcaatattagacatttagtatttcgcaaaatcaaactgccaacgatgcaccatcaaatagcaaacaaatttaccttggtgtgcctacgcctccgccggtgccgcgcgtgccgtactcaaaccagcagagagcagtggccagagggtcattaaactctatttttaaattcatggaatgccctttttcgatctagagttgccctgaggccccagcaaagtgtcaattacgcgccgacgcctccgcctattccgccaatccccgcaattccgtattacccttaccatcaggcaaaacggagatccatttccgagaacgacgaacccttttcgatgagcaatggaccgcaagtaatgaatgagaaggaataaaattttaaatctaaatgtttttgtttaattttgttcattaattttaattattttcagcgaattttcccccgcggcggcaacaacaaatacgtctacgttcttcataatcaaaaagatgctttgttgcgttaa

SEQ ID NO: 81332 - DNA, 270 bp, Heterodera glycines
atgccctcctccgattacgcggacaatgaggcggacgatcgaatcaaagcgccgccgagtgaacgctttctgaactattcgctgtttcacaattactctccgtacggaatgcgttcgttggcctacgattatgccaaatacgcggagcggaccaaatggccggtgaagaatccgtgcggcaccatccaattcgaggacgagccgcgcacgccgcgctttcaattttggagtccgttgacggcacgatacgagtgcagttacacacagaac

SEQ ID NO: 81333 - DNA, 1207 bp, Heterodera glycines
aattccattattcgcaagagcaatgggcctttttcgctggtcattgctccgactaaagaattggcctctcaaatttttgctttgctcgaacgactgagtgaatcgttggtgttcatccattcgcttaatttggcacaatatgcagaagcaaatgatgaaatgttggagaatgaagttgtagcaaatttcagcaatttttataatgctatttaattttcgatttttttagtcgttggacgttttggtgtcaacgcctggtcggcttttggctgctgttaaaaaagtgccaaaattgctgataaacgttgcccacgttgtgctggatgaggcagatttgctcttttcatacggttaccgcgatgaaattgggttagtttttactgggattaatttaataattataattctcattatattcagtcgtcttaaaagtgcgttgccgccccactttcaaactgtgatgacatcggcgacactcaacgaagacatgaccgaactgaagcgcacctttgttgtcggtcaaatactgtcattgaaacttaaggtgaaagaattattttatatttttcattttcttaaattgccattcctttatttttcaggaaagtgatctccccggcatagaccaacttcaacagtttcaaatccaatgtctaaatgatgaggaacgtttcaccattttgttggcactgataaagttgaaattgctggttgggaagacggtcattttcgtgtccggtgtgaaccgatgctataagtcagcgcaacttttaacattttgatttaatagtttgtttcctttttgttttccagactccatctgtttttccaagcctttaaaattgtctcttgcgttttaaatgctcaaatgccggccaactcacgctgtcgtgtgatccacgaatttaatgcgggccgttggccatatataatcgcatcggaatgcaacgacatctttgacggggacaacgagcaggagcaaaatggggaacaagaaacagcgaaaaacggagatgaagcaaaagaacagcaaggagacacgaccaaacagcaaaaggcataaattaattttgatgctgatattttaatatctttttaaaaataagattcgcaaacgaaaagaattgaaaaagaagagcaaacggcggcagttggacaaagagtcagacgaaggccgtggaatcggtggatacataaacaaaataaa

SEQ ID NO: 81334 - DNA, 1752 bp, Heterodera glycines
atgaccaccactaccgctacggcctcgttgtttgggccaccgccaatgaccaccactaccgctatggcctcgttgtttgggccaccgccaatgaccaccactaccgctacggcctcgttgtttgggccaccgccaatgaccaccactaccattacggcctcgttgtttgggccaccgccaatgaccaccactaccactacggcctcgttgtttgggccaccgccaatgaccaccactaccgctatggcctcgttgtttgggccaccgccaatgaccaccactaccgctacggcctcgttgtttgggccaccgccaatgaccaccactaccgctacggcctcgttgtttgggccaccgccaatgaccaccactaccactacggcctcgttgtttgggccaccgccaatgaccaccactaccgctacggcctcgttgtttgggccaccgccaatgaccaccactaccactacggcctcgttgtttgggccaccgccaatgaccaccactaccgctacggcctcgttgtttgggccaccgccaatgaccaccactaccgctacggcctcgttgtttgggccaccgccaatgaccaccactaccgctacggcctcgttgtttggaccaccgccaatgaccaccactaccgctacggcctcgttgtttgtggcgccatcagctaccacaacctctgctcccctttttgggtatacattttgcagttgaattttatctttactattagtctgcctttttactaacatttttctctctcccaatgaatggtcttttagtttgccttcttccactgccacattttctgccgctgctgctccaaggatgaatttcaaagatcttcaacaaactctgctgaaattacgagtggatttcgagcgacaagaaaagcattttatggctgaactggatgatttaaatgcatttgacatcgttctacgccgtgctcaggataaggttgtcatttttaccggtttaattcagagagactttgaaggttttttcattgggtcaaaacattgacgagttggaacaagaacgtgaacgttttgtgtgcgagttggacattttatctcaacagcagactgaattggatgcactgattacgcaaatggagaaaacgatgggattgtctccgttggaccaacagcaattgtcaggacaaccgtcggtggtgatccgtgacatggcaaatgcaactccggcggatttgcaacgccaaaatatgtgggtggtgggtcaggtgtcgaatttgggagagggcaaaactgcattttaatgatttaatgccttgcttatttttgttagtctccaacttcaaatgactgtaaatgcgcaaatgaagcagttggatgatgagttgggtgatctttgtgaacaggttgaagctttatttttaaatgaaggtccatttgtgcttttagattacggaccttcagcgtttgtcaggtgacagtttgagcggtgacgacttgaaagagcacgagcatcatcgttcaatgcttgatcaaattcaccaaattttacgttcgcagttggacactttggtctgggtggacaaacagtcaggtaacatttattttcccttttattttttaaatttcaatcaaagtcgagaccgtctgagattctacggatcccgaccaattttcagggtccttgcttacttatgttactcttttagctattctgatggatcgagtcaaccgtgcgacatccgatgtgctcactttgcgttaa

SEQ ID NO: 81335 - DNA, 1191 bp, Heterodera glycines
  unsure (1)..(1191): unsure at all n locations
atgcaaaaaatttcgnattttataatttcaattatactttttttttttgttagatntggtctcaatgaagaaagttacaactcaaaaactcgggctgagccaaaacgactcggaccccttcattttcacccggtaatatntaatattgattgatccgtttgtttttgcataaatacccatcctttcctccttgcttcgttcattctattaaaaaattttttttctttcaccatatgttgcgttgaccctctcgcttctatgacccaattccaatcaatattttatgttcgccttgtccatttcattaattgagtaaatttattatttactgcgtatttttccgtaccaggtgttttcgacagtgattgatttcgacagtgattggtttcgacagtactttttaattaatttctacatgatttattgtatatttgaattaatattaattaatatacactttgcaaatacaaaatttataattgaagtaagtaataaaaataagacttgtatgatttttttgctaaaaatttatcgctttcactttttctatacaaatatctcttgctggaatgagtcaaaaatacaacaaatttcttagataagattctcaaatcgtgtgggaaaatctgctaactaatgccgggtttgagtgccaaaattcaaatctgcaggctcttaagcaagaattcgaaaatctcgaacccctctgcaagtataagagccatgttcttataattttaattgtcaaaatttaacgagacgtatgccctatagaacaatttttttttaaataagctttactgtcgaaatcaatcactgtcgaaaccaacactgtcgagatcaccattgtcgaaaactaacagcacctatttttaatgacgcatagtgacttcagaatcgaaaatttcaatgcagaaatgcttttttgagctcctttcttcaaaacaaaagcaaaaatatttttttatgaatttttaaatgtatgcatatttttagcgcccttttttggcaatattaataattggtgtcccgacgaaaatatgttaaaaatttgtcgggtattttttctaggcttaaaaatgagctgatcacgaatctgatctcagattttgaaaatcattgatttttatctaatatttcccggcgctgctcacctgccacacattgtgccaaacccatgggacattttaa

SEQ ID NO: 81336 - DNA, 663 bp, Heterodera glycines
atggcggacaaaaatttgtcagcaattgatggtaatgttttctttacattttcaatggtctataatttttttgttttctcagaagggtgtctgcgcattgacaccaattcgccaaatggagaagtgtccgcaccaccgctaccaacgatgatggcccgctgtttgcccggggccaatgcggaggacacatttgtcgtcgacgtcgaaagtatgaaacttcaaatttattattagaaaaaaagaaaaaaatttttgcagatacatcacactcaattaatctggtgaattattcggacaccagcagcaacgagacaacttttacctggtaagaatgggggggggagggaaaattttcattgaaaattataaaagctgttttgcatttcagcacaactgatcgtccaaaaagaaaagcggctgaaaaagccatgatgcttttgataaaaccgtaatggttttatcactcctttaattcggcttaatgtttttcctttcatttttgaagtcgatgtttccaccagccttatccccaaccgtccgctcttccctattgtgccattgcctaattgttaggggagactattcacccctatccagcccttccatctttctgccactgtgggttgggttttatacaaatattcttcaactgttccatattaa

SEQ ID NO: 81337 - DNA, 154 bp, Heterodera glycines
atggccaacaaaccggccgacgtcgactacaaaattgtgtgcattggggacaaggcgaagatgctgatgcagcgactctacgccaaagaatttctgttcaccgtcaacgacattggccgctctccgccgaccttccaagacgcatcaattgcag

SEQ ID NO: 81338 - DNA, 164 bp, Heterodera glycines
ggtggggatttttaggggcgaaaaattccaatttagggacctaaataggggcaaaaaattcgcgaaataggggcgaaaataggggggaaaaagtttcaaatgtaaaggtgaaatttattaaattgccgttttctctatgtaataagttaaaattaaggcaaaca

SEQ ID NO: 81339 - DNA, 314 bp, Heterodera glycines
actctgaaattcgtggcaaatgcaatgagttgaacgatgcactcaagcagttagacctcacggctacaccacacaaaattcgcacaactcccagcaaacggcgttcattcatcgacatgcacggtggccatggaaaaaaatcggaatttcgaggccttgaaatggcagggaatcggacgaaaaatgttcgaacccggaatttcgaggcctcgaaatggcagggaatcgggcggaaaaatgttcgaatccggaatttgagacctggaaatggcagcaaatcggaattctgagggcaaaaatgattggtaaacgga

SEQ ID NO: 81340 - DNA, 585 bp, Heterodera glycines
atgtatgaagattgcaacaccgtttttgcacggtgccatgacgcgaagaaagcgcgtctcttcattactttcacgaacaacagggaatggcctgagttcaaagagaatttacacaaaaacggtcaagtatttactgaccgttttgacatgtggatgcgtgtctggagcagcaaaatcgctgagttccgagaagaactttatgacaaaaagttcttcggaacaatccttggttacggtgaatcaatggagttccaaggccgaggaggcccacatgcccacattgtggcgcaaacagacctggacgcagttccatatgtcattcaggaatacatatgggcgcacattccatctttgcctgataaagatgacgacacgcccattgcaaaaatgcatcgcgaaatccgcgaaacaatgcatatgcaactgcacagatgcagtgacagttggtgtggtcctagcgacccaatttacgggcggtgcaagaaggggttcccagccccttactcaaaatgtacgattttgcgcccggacaggcccgcgatgtatttccggccttcaccaactgatggtggtgcccaattagag

SEQ ID NO: 81341 - DNA, 846 bp, Heterodera glycines
  unsure (1)..(846): unsure at all n locations
atggaattggaaaaagaaagggaagaaaaacaatgggccgaaagtgtgaaaaaacaaaatgaaattgcggggccatacaaaatgatacagaaaatgcattttgaagagcttaagaaaagcataggaaagccgaaaaaggacgaggaattgcagggaatgatcacaactttggtgcagggtttgccacaataatttaatttaaataaaatttttaagaaattaaaacttaagatttacgggcaaacaaaaacaattgtagagaaaatcttttgagccttttactgattgaagacagaaacgaatttttaaaagaaataattaacgaaacgaaagaagaaattgatcaaacagaattagagaagaatttggaagaattattaaatggagaaaagaaaaagaagaaaagtaaaaagagtaaaaagaaaaaaatcggaaaagaaaaaagcgaaaaatcaatggaaaacacaaaagacacagacagagaaagagaagaagaaaaacggggcagagagcaagaggaagaaaaaagtgaaaatggaaaaagagaaaactgtgacaaaaacgaaaataaaaacagtactaaaacgacggatggagaaaaggcaaaagaaacggaccaaacgacgaaaatggcaataaatgagcaaatgttggcggaagaactgaacaaaattggcacatttaaaagtggggaaatatttaaaattaaaattttaaataaaaggcaaataattaatttaagaattgtgtgatgagttaacattgaatgagctgttcaaaacatttatttgctcaccttccgtggagagacttcttataattgancaagcagcaatcatttgttaa

SEQ ID NO: 81342 - DNA, 410 bp, Heterodera glycines
atgcagaacagtgacttttgcttttgcttctcctcgctgcatttgttcgctttacattccgtctccgctttcccgaaaaagtccgattgtcttacgctttttcccggcacaacgcaaatcaaatcgatgtccgagtcaaaagtttgggtgcccagcaaatgcgacccggtgagcagaagccgggcgccacgcttggcagacggaaattgaaaaggcgcaaaatttaaattaattaaacttaatttgacagacccatccatccacggcacaacggacagaatttataatggcatttgtttgttggtcaaagtgttcttccgaatgctctgccgatggaggcaaatttcgaacgataaattggcccaagaaaatttttaactgagaaatgaacaaataattaattaaataaa

SEQ ID NO: 81343 - DNA, 783 bp, Heterodera glycines
atgggtgcgctaataagcataaaaatatttctaatttgtttggggcttcgaagacccaatttttacatgcttaactttgtagagttcgaaagttttgctctaagtgagtctccccgttttttgcatatttttatcaaaatattttttctatcaaaaaattcacttttagttacataattaaaaaataatcattttaaggttattgttcaaatttatacataaaaaatttgttaatggaaggccacaaaactgaaaatcataatgaaaatgataatgaagaagaaaaatccgcaaaagtgctcaaaaatttacgtttaatggtaacgacattaaaattatgggccaaaagtaagggggaaaatgcatttccagtattatttgtactttttaggcaacttaatctattcaaataaatttggctttttgaatggggtcagtctgacgataatggccacgaaaatcattttgctttacccaaatgcgccaattttgtttttgctcgagaaattctatctaatttatgcgaaaaggtaaaataatttattattaattataaaaacaaaaacttagagaaacaaaagtgccaattaaactaaaattggtggcaaatgaatcagacaaaaaacattttgacgagaaaaaaattgccatggaagaagtgatgcgaatttacacgccatcatttccagaacaaaacacagcgaaaaatgtcactcactcgacggaaaaaattatccgtaaaaatatggacgaaggtggccaattaataaataatcattaaaa

SEQ ID NO: 81344 - DNA, 458 bp, Heterodera glycines
tgaatttaaatagcaaagaaataaaaacggtaaattaattgaccttcaaagggccttccgcgagaattgtccttaaagttggccgccatgtctctttacggcgctgcgaaaatgtttctcgagacgggggagcacccggccgtcctcaaagaggcggtgcagagcccgggtttgtgcctccgggcaattagcagatgattaatcacaattagtcaccggaaaacgggctgggggggggaggagccttttctgttgggtcgattaatccttcaagtttttctcggtcctttccattggtctctctccacaggtggttcgaccattttcggcatccacgaattggagaagggcggcatgcgcggtttgctgatcaacgcggtggaggcggcctctgagcgctcccggcgaacgggcgaagcggcgctgccgcccggcagaacgtccgtaatttatcgaag

SEQ ID NO: 81345 - DNA, 1211 bp, Heterodera glycines
atgctcccgtctcaatgcaaaaagcaaagtgacgcaccccggccaaacacttcgaatttgtcatcctgcaatttgcaactgctcagcgattacctggagtgggtgcacaacattcccgagctcaacatgctcaacgaagatgaccgggtgaaggaggacgagaagaaatgaagaactgtcagatgttccctcacatttaatcccaaattttcttcagaattttttggttttgtgccgtgcgcgtccgtccgcttggcttctgttggcccatcatcggatgcataacaccgaaaacagaccgaacattgaattggacaaattggagcttttgttgcacaatgaaatcgtcggtccgctgcgcgaattggaaattcattcagtcgaattcgaaatattgcgaaatgtctgctttttcagcactggtaatttcaaattttacaacccgatcattggcaattttcggatttggagagagaattttaaaggttccattaccaagtgatcagaatcatttctgagcagttgggatgagagtacggtgatcagttatcactttccaccaattacttccaactgtcgggtcgtttcactttggccccagcaaaaaataatagttttcacatgaaatttaaaaagaataagaagaaatttagatggagagctgttttattttctaagtgaaaaagttatcatattttcggaaaaaaattgttaaaatttaataaaagtgcgaaatatttgctaaaaactggacgaaaacgttagaaagttgttcaaaaacagaattttttttctccaaaaatgcttaaactgagcttcaaaatattcacttaaatgcaaaattaaaaactttaatttaaaattaaaagataaaaaaattttccagtgccccaactgagtgaggccgggcggcggttggtcacttcagtacaaaatgcccaactgagaacactcagtgaattttcgctcagtcggattaatctcattgaaaaagccaacgaaagtccgcttctgctcagttccgtgttcaggctgaataggatgatgaacactttgttgacaattgaggtgaaaaagccggggatttgacaattggcactcactttttcattttcagaaagtcgccaatttcaaagggtaaattacacgagtgattaacatttttgatcataattatagctaattaattacccttgcatttgattgattga

SEQ ID NO: 81346 - DNA, 1798 bp, Heterodera glycines
atgcttaaaggttgccccaagtgttacgctaacgacagacaacaaaaattggcaggtggaaggacagccgaagacctgtatgaacgaaccaagaggcggctatttgaactgcagaatcagcatggctttgagctggaagttgtctggggatgcgaaatgaagcagcgtctgcgtgctgatccagaatttcgccgggtgtacaatgactcattcgttccaagaccgcttgatccaagagaggatgcactacgaggtggacgcactgaaccgtttatccttcagtacacttgcagtccagacgaagagataattctcattgacattgtaaaaaaaaagttaggagaaacaaaaaatattttttcattgttaaaggtgagcttatatccatatgtgatgaaggcattctcgtttccggttggtaacccacgcgttctcacgcgagagacacttctatgcgcaccgacatcaccgcttccctggtgttctgtcgacgcgaacacattcaaagggctgttgtttgttcgtgttctgcccccagatcccgctgtacacccgctaaaagttcctttgcttccctatcgaactaccgacgggcgcctaacttttccgctttgtgcacgctgtgctgacaaccgacaacaacgggcatgcaaacacattgatgcgtcaagggcatgggtttccgcgtaattttatgaaattaatccatgtcaatttactttttttgtcccggtgtttagatacacccatgttgaattgaacaaagcactggagcttggctataaagttattgatttatttgaggtaaaaataacgtatcgtttattagactaaactttaaaaaaaaaaggtatggcattatgaagaatgggataaccaactgtttcgtgactatatgaacacctttgtgggtcttaaagttcaagcaagcggttggccatccggttgtgataccgatgaacagcgcagagcctatgtagatgaatttaggcgggttgaaggcattcagttggaccacaacaaaatttcaaacaaccctggacttcggatggttgcggtaaaaaaaatacagaattacaatttttaaacttaaaaaaaaacacacacacagaaaattcttgcaaactccctctggggaaaacttgcgcaacgagtcggtggaacggaagttcgttatacccgaactccagctgagtttcatgcactgctcgagaatcgcaacatcgacattattgactttcatcacgtctctcaccatatggacagagtggtagtgaggaaaaaggctgaatttgcaaaagcaccgtcaaccaactgcttaccaattgcaatttttgtcacttcatatgctcgtctacacctttatgactatatggaacaagtgctgcgtcttggtcataagctcctttattgcggtgagccaaaaaaaaaaaattttttttttcacctttattgacctattattcaagataccgattcaatttattacgtgacacgcagcggtagacagcaggtgcctgaaggtgaagcgctgggacagatgaagagggaacattgctcgaggcgaatatacgaatttgtgtccggtggtccaaagaattatggttttcgccattgtgatcgcataaatggagaggatgagcgtgctgaattgaaagtccgaagttttcgtctctcatattctgcgcagcaactgctcaacttcgagtccatgaagcgcattgttttggaacattacaacattgatggacaaatgttaacacatttttctctcacataataatccagaaaaaataca

SEQ ID NO: 81347 - DNA, 895 bp, Heterodera glycines
atggacgcgattcttgcgaccgattggctccacaatgcgtacccggaacaaaagatgacaacaggaaatgaagaagaagataaagcaacacaggtattttttttttatgaaaaaagtttataaataaaactatattagtaaaaaaataaaataaattttcaggaaggacaaatgagttggcttaaaatcatcgaggaggaggaggagcgggcgagggaattgcaaaatgatcaaatggaactggaacaagtgaaaggtttatttagttatttttagacattaaaaacagttttttaaatttagacaacattgagttgccaaagcacccgcaaccacaaaccaagtgcagttgcaatgaaaagcagaagagtgtgccgttgattgattttctctgcaaacactacaaatgttcaatgaatgagcttcacgttctgctgcagacgctgagcaaacgtagagaaatttcggaaatgttgcgttccaatcttcatttacgcaccaatcatctgcgccctgcctggaaaaacattcgcgtccattgcaacgaactgacaattcatccagctcaaactgcatatgctatgcgcggttatcttggcattacggtttgtctttgatttatttaaatttaaccaatctatgtgtacaatacactttaggtgcgcgtctactactatgtaaagcatggtataaagctggcttacccccaactgccatgtgttcttcaatttggtggtggtgatcatagctctctgttcccgcttgagtgtcttagtgttgttgttgttaaagaaccatgatttagtgatgtgatgatgatgatgatgcatgatgaacgggtgttttttttaattcaaatattgtcgttttttaatgtcagattaaaaaaaataaa

SEQ ID NO: 81348 - DNA, 1135 bp, Heterodera glycines
atggcagacaattttcaaaaatttgatgaaaaacacttacaactcagacacccgtttacgctgacaatctcagggagcacggggagtggaaaatcggaatgggtgctacgaatgctgaggaatgtgaatgcgctagtttcggaacccatctcggagattttctactgttatggggagttgaatccaaatataatacagcttcagaaaagtggacacatcggcggttgtagggttattgtacatgctggaagcccaaccgaagagcaggttaatcggcgcgcaaaagagtgtgatggaaaactgttgatggtgttggatgatctcatggttggattgggccaacaatttcttgacactgtgttcacccggggatcgcacaattggggggtcagcgttgtgttggtcactcaacatttgttcgcaaaagaactgcgggttgcgcgcaacaactcccactatttggtgctgatgcgtaacccggcaggcgcgctccaagtgcggacgctcgcctctcagctatttccaacgaaaagcaactatttcacggaagcataccgggatgcaactgaaaagcaatttggctacctactaatcgacatgcaccccgagagtccggaattgttgcgcctgaaaacgaatatatatggagagcagggtggtcttcccccattggtttatgttgcaaaatgaagcatgtcaaaagaagaaaaagactaacagataaacatactatgaatgttagcccgctgatgttgaaaaatgctgacttcttacaccactttcgctcaaaatatcgctcaaaaagcagacagcgcaaaatgatagagaacgctttggatgagcagttgctctgttttgtggagatgggtttcaatgtgttgaagggtcgtgttccgttagggaagcgacaaattcaacggttggatgcattgaagcaccagttgaggcgcttagcacgcgcacgttgcgcaaaaaccgcgcgcagagtactattattgaatcgtcaagaccaacaacaacaacaacaccaaaccggtgctggctttccggtggtagccagtatgctgacaagcattctcttaccaatgttaatggacaaattactgccaaaaactaattgataaatagataaaaa

SEQ ID NO: 81349 - DNA, 750 bp, Heterodera glycines
atgcgtcacgcaatgcgaatgtttctcgtcccggaggacgtctttcagtcggtatttgttcaaccccaagcagcaacagcagcagcagacggtgccgacggtacaccaattgggcttttgcgctcacgcatccaacaaattgagcgtagcagggagctgaacgaagagcagaaggccgcgcaataccatcaggaattcaaacggctcaacaaactggtgcgcgagcaggaggagcagccgatcaatgttcgacttcagcacgaaaaggagagagaaaaaaatgcagcaacgccgccgccgccgccgccgcaaacgatcgatcattcaacgccaaaaagattggagaaaaacattgtaccatcagcgtttgggttgaggaggcaaagacaccactacacacaaaaggcgggggcattatcaaatcgcagacctgcccaaaaacaacaaagaaaagcagcagcagcagcagcagaaacaccaaacagcagtggaaatggagaaacggaaaaagaagagggtgatgtagatgatggggaacagtgggacgacgcacaatcatcatcgtccacggtgtcaacaggtggtgccgcaccaaaaagagtgctcagagcaagagatggggaagcaggaaaaggaggaggaggaggagaaacggctgatcgccttcaaccaaaacacaactaccagatgacccaaaaatgcactgatcacacacattcgaaaaaaggggcacagtctgggagtcagtga

SEQ ID NO: 81350 - DNA, 696 bp, Heterodera glycines
atggcccggctcattgccatgccgttcaaacgtgtattggtgctggtgctgctggtggcgctgttggggctggcgcaggatggattttggcggtgatggctaaacatttcaaatttgaatttggcgcccaattggcggaaatacacaaaagcaaattaatttaatattttgtccaataaacaaaaatttgatttgcgcaccaacgaagtgccggacgacaacgtgccatccgcaactgccgatggtgccaaatgctgtcgttgttgctgctccatttgcggttgcggcattgcgactgtcgcgtcgtggtcgctgcgcgttgatgaccactcgtgcaaatccgcgccgtaatcgcgcggcaccaacaaaaagtcgcggcgtcgccctagcggcggttgttgttgttggtgatgttgtggttgttctgcttgaacagctttgtcttcaacttggacttgctgttgtaggcgctcttttggcacggtcttatgctacataaagaataaaaaattaattaattaaatttatgtttttttattatttttttaaataaaattattatagagaaggtgttatttttaaatattaataaattaattttatttttgtaattattaaaaaaaaaaaaaaattaaaatacagtagtttttagatattaattattatttttggaaaagtgataaaaataataataaa

SEQ ID NO: 81351 - DNA, 1049 bp, Heterodera glycines
atgtcacctcgccgagctgccgcttcaggccgaacttccaacggcggcggcggcggcattgtaaaccatgcaaatgcaatggcaccggctccccctccaccaccccctccgccgcccaccggatgggcgccaccgcgtcatcttcaagaacatgtaattaattgcaattagagagtccaatgtccattagtggtgatgcccaagagtctcgagagttccattaactcaaaaatggaaatttgtcggtttctaagtcttgggaaatttgtaaaaaatgtatttcctctaattgagctttaatggcagcagggggggggggtactataatagaggaaatacggtttttacaaaattttaaaaaatatccaataaaaaattatcgcccaaagatattttttcaaattgaacgaattttctaagcttcgaaaaaatcgatcgtttaaaaaaagtcagttctatcgatttcaaatcatagtcaacttgactgatggtatctatctgtatgtgagtgatgatctgatccgtttcatcctccgcaacaaattgttccgaattttgataatttttatgcttttcaaaaattgaatttctccccatttaagcggcatgccgacgacgacggcaaagcccagcaacaacagcagcagaggggggacgaggatggcggtctcgttgttgtgtggcctccatttccagcaactgatcaggaggaccagcatgacattgatcaagcagctgatcagcaacaacaaaatcgcccgcctaaggcagaggcgccgacgccgaaaaatgtgcggcgcgactttccggaagagtacgcgcgccaggaacgtatgcaagcggaagcggagcggcaacgggcggaacggaacgcgcggctgcgcgaaaaacaggtggcacattggctgggcgaaatgtatggactagctgatcaggaaaatggttatatattgattgatcagcgcccaatatttttcgttgatagaagaaagagaattgtctgtctgattaaattcaaagcagacttcaattgtgatcagtctcagtga

SEQ ID NO: 81352 - DNA, 584 bp, Heterodera glycines
aaatccgggccgttctgcttgactatgcacagcaaaaggttggagaacctggaaaaaacgtcaaacatcttatttattgcttatttttttcccttagaatttatgccgtggcgatggcaaacaaattgaacttgacgactctctgcaaacagttgtgcaacactttgtgtacgagaagttcgatgtcaacaaattggtacagaaagtagcatctacaatgacccaggcgctgctgatccataccaaagaaggcaaaaaaattgtgcaccgtggcaccaaaatgtcccatattgaactgaaggtgggcgagggccaatgctgggaaaattgtcaaaaattacaatgacttctggttcaagctataaataagcactgtttcacttttggcagattgagagacgggctggcaacaaagtggtcactttggtctccaatttggcttcttttggcattgacgcgagcgcgttggacagcgaaatccgcggcaccggcacatcgattctcgcaacggcacccgcctgtgaaggaccccaactgttggtccaaggcaacgaggtgtattcgagaatagtgttgtgcttcga

SEQ ID NO: 81353 - DNA, 523 bp, Heterodera glycines
attatttttaaaaccatttgtcaatgtttggtcttcacttttgggtctcaatacggctttggtcatttaaatccaacttttcatttatatcacttcagatcacctgaaggagtggtcaggtcttattggtgtatttgacttttttgatcagaattgaaagattataactagggataagaatttaagtattacttttaagtaatttttcaacggtaggggtcagtttcggttttatgaaaccaatgaatttaaaatagtctttttttgtgtaatttgtggcgctgatcacaaatatgacctttgtttttcaaaattcagaaccccaaactcgaacgaaaattcggaattcataaattacaatgaagacatatttttaggggttttcgaggtggctgaaaatggatatggcatccgttttgccctagaaaatacccgaactcgaacaaaaaaatcgattttttctcaacaaacactcggatgtaatgacaactcgtaagaaatgtaactcgtataattgcttgag

SEQ ID NO: 81354 - DNA, 1606 bp, Heterodera glycines
cagagtgattagcgcaaatatatttatgattacatggattactgtctttaggttaacggatgctccgctgccggaaggctgggaaatgcgtatcacagagcaaggtgtgccattctttatcgatcacaacaacaagacgtccacctacaaccacccgcggactggtcggcctgttggtgtgttctttttgttcctacccaaagtgattgttcaatttcagggcctcttggtggtcccggcttacacatggctgccgacaaaacattcaaaaacaaagttactcagttccgttatggagtatgttccacgagtagcccccccccccccctgggggggcgtccctgtgtccatctcaggtacttttccgtctgtggcgtgccgggttaatgtggatgtatgaaagccacaatattttaaatattgtccatttcttaatttattttatcctttccattggcgttcgcgccgttgccttgaaaatgaggccccagaacagaaaagtaacccattctctgaaatgtgggcccggattttacaaaattccaaaaacgaaaagtgtctcccaattttttttatacaaaatccgttgatcgaccaacagatctttggccattcattaggcggttctttggcggcattggccgccgcgtgggtggccaaaagtgggatgacaacagccgagcaaatacgcttcatcagctttggtcagccaaggactggcaacctcgaatttgcgcgtcactttgattcgttggtacaatttataccaggaatataaaattattcaaaaaatgaaattttgctgaggcattttttgaaatttgaaaaaaaaaaaattttccgaaatcctttcgacagttaccccacaaatatcgagtggtacattcggaggacatcattccaaggcttccgtctaaattattgctgaatgatgaacactcgctgttccaccatcgttacgaagtgagtgatagttaccgtatttctatataattctaatccttcatgagatatttcaggaaagatacggtataaaaatcttttaccccctttattaaagcgggcattttgacctctaaaacctgaaaacttttttaaaaacttcaaatttttatattttctcgataataataaaactgtaaccttttaaaaattatttttccttctaaataattttccatatatttagttaaatttaagatttatatgtagctttacattaaagaattgatgaattttttggaaaatttaccctcaacttgggaaaatttatatgcatatttttcactttttatgcgcatattttacaatttttggtgcatatttttggtctccctaatgatgattattaatttaaagccctataaatttgtcttgaaatcatggttaggtttggtacaacaacgacatgaccacgggcagtgcctatgaagtgtgtgaaagtgctgacggtattcagtgcagcggagcgcttgagcccgctttgaagtcaccgcttccatttggacaacaacagacggacccactgggctcgtacatggcccatttgagctattacaatgttagcctgatcacttggcaccggtcgggctgcgcatccaaaggc

SEQ ID NO: 81355 - DNA, 377 bp, Heterodera glycines
atggaaatgagaataaatgtgagatcacttgctcctaagcattgttgccagttcatcatgttaatgatggctctaatgcactaagacaagtaccaaatccaatttcgcaaccaatttttgattattttcggaagttgattaataggcaaaagaaataattatttcgttctattttgttatttaaaggacttatgttattgtgaacaatggagaaccactgtttccaataattgaatggaaccaccatgcagcagtccttgcaaatttgacaagtactaataatgctcaagaaggataccatcttgcacaagactggcatttcagaatttacatcctcctctttcccggtcagaaaattaattaagttagaaaataaa

SEQ ID NO: 81356 - DNA, 263 bp, Heterodera glycines
atgagtgttttttattttattttgtctcttttttatatccaattcttttgtgagaataaaaatataatataattatttgttcttatcaatattcataaaaaaattgaataattacagctgaattggtattagtgaaaaagacagtgatatgattttctatatatttgtgtttgattgattgtcactatgaattatgcataaagtatttaaggaagtataatagggagttttctattcaacagaatcttcttcaacaaaataaa

SEQ ID NO: 81357 - DNA, 2276 bp, Heterodera glycines
atgaagcacatacttgaatttttaaagaaaaaaatcttcccggacgatccaagacaggcgcaaaatttgaaggaaacgtgccacaaatacacgctgctcgacggactgctttatttatgtgaagataatggcaaattgcgacttttcgtcccatccgaatttcgtgaaaatttggtaaagcaacgacatgaaggaaaatgcgcagggcacatgagtgccaaaaaactctttcttcaattggcagaacagtatttctggccaaatatgctgaaagattgcatgaaaattcatcaacactgccgaatttgtgctcatacaaaggaggcgagagcaaatgaacctccactgaaagtcgttagaacgtcagaaccattcgaattgctatgcatcgacattttggacgttggccccagtaagtcagagttcaaatatatctgtgtgatggtcgaccatttttcgaaatatttaatcgcggagcccatccgaaataagtcagccgaagcagttgcgaaagtgttggttgagaaagctattttgatatacggcacaccgaaaaaaatccattctgacaaaggaaaggaatttgtcaattcaacgattgaagaaatcgtcaaaacttttggaattgaacgatctctcacagctgggtatgacccccaggcgaacgggcttgttgagagagtaaaccgaataataatcgctatgcttaaaaagtcgacggcaagctgctggacatgggatgaacgtttgccgtacattgtgttcgcttacaacattacaccgtctaaaacgacgaaattttcgccattttccctgatttttgggaaaatcgctcgatttccgatggatggggaagtgcccttacaagtcaacccagcatacacaattgacagcgatacatacctccaattatttcgtgaaaatgtgttgaatatgctgaacgaggcgagggaaaattctgaggaagaaagaatgagaagtaaaatttggtacgattcccagccgaaagtgacggctaacaaatttgaagcggggcaacgcgtaatggttgcctttcccggactgaatcgccgatctcggcacaagaaattgttgtggtctcatttcgggccttatcttatcctagaaattaacgaatcgtcggcatttttagtcccaattgacaacagaaatgctgagcacataaaagttccgattgagcgtctaattcgaattcctccaggaatcccggacatttcaacacttccaaaggggaaaaacccatttaaaaatgcgttaaaatcattaattgtcagcattttatcgagttttgaagtctgtgaatcagatggacaaatggcccattatgagcaattaggggcaattgctaatttaaagggtggcgaaggaatgattggaaaaacggaaaaggcggcgcaatcaagagaaatttctttttcagagatggaaattgacaacgaaggcgaagcagaggacatgttcggttggaatgccaagtgtgacgtcggtcaaggcgaacacgagttttgtgccattctccgtgttgcagaactggacccagcgcttggaaatgctgaattgggttcaatcacagtgaagactccacttcaggcacttttggcggtgttccttttgaaggccgggactgtcaaatcaatgacagccgcaagaagttttgtcaaatcgataattgaaggagcgccaaaagaggagctcagtctgttcgtgaccaaaaagggagactatgtggcgacaggacaatgcccaactgaagaagaccaaatgaaggcgctggagtgttggttcgaaaagtgctccgtggcaaagcatgctttggaagagagcggattcaaaaaaatcggcatggacgaacccgtcggactcaatcatttggccgattctgagaagaagaaatgggaagaagcgatgggagagacaccgtgggtgctggagaaattgagggccaaaatcattcacaaggccacaaaactgatcgccttgccacgtgtcataatcggagattcgacagcccaccaattggccgaaatcttggatcaaacggcggtgatcgggccaaaaaatggaacattggcggagacagtgcgaagcctgaagcccgtggtgctctccagcaaagtgaaggccgcactgatcattgtcggacgagattcactcttgggcggagaaaccattgaagtgatgatggagcaatacgagatgattgccaatttgtgccgccgattccagcaagtgaagttcttttggacatgcccacc

SEQ ID NO: 81358 - DNA, 1232 bp, Heterodera glycines
atgccaactgttcgcgaaatacttgagagtctgcaaaagcgagtaaaaaagcctcgcattgctacaaatgaagacagcgtactgaatgttgagaggacagacgcagaacaacaaattgaaaggaacaattttgacgtcgcttcgagtgatgacgaagaaaattgtgagcccgttcaattcaaacgtggagaaacaatccggggagctctttgtctttggtatcaaggtgttaatagtttttttgatttttatttctttacaggctttcgatttatcaaaaacagaaaagatatcagttctttctttggcactcattccgccagtttacgtttggcatgctttttcaattattgtcaacgcggcaccgcttggagttcaaggatggctggcgtattttggcaaaacctacattggcacaactcaattcgagattgaccgtggagcggaggcatttggacccaatgctgatgtcggacgcttctttctacgtcgcactcaaagcacaactcgtaaatgcatatgctattttcatggtaattaatacaattttaaataatttagcgttcagtgtgtcccaggcgtccataatgacaggcagtggacgaatacaattcggactgcattcaccacaaccatcaactccgacgattacattgtccgaagaaagcagcttgcagcttattctacgctgggaacaagacatcgtctgtcctccacgcttcccgatctcgttttggaatgtgtacaccagggctcaaatggcaattgagcgaacgaacaacggcatggaagccgcgcatggacaatttgcagtaaaaatttgtccgttggaagacacttttttgttaatttagcgtgaacttaatcatcatccgtcactgagtgatttcatagcagcattcatcaaggacatcgacaagcaactggacattggacgagcagaacgtctccagaagagcagaaaacgaccgcaacggtacatcatcaaagaacaaagtgtggtgcggatccttgacgaggccgactttgaatctgaagaaggattgacgaacgccttgtatctgatcggcctcgtaatgcaaggctttgtggagggacttcacgtccgtggaaatgaagatagtaaggaagaaactgatgataccgatggaaattgaatttatgattttaacaatgtttacttttatgatttttaaccttttacttttattttttctttggaatttaataaa

SEQ ID NO: 81359 - DNA, 1350 bp, Heterodera glycines
tcttattatctctgcacatccttcacgaacacaactgaaactacgcattgcgacacggaaattatgaatgtcacttatgcgataattgatactgaccggattaccagccaaatattccacgatgtccggctgttttgcatccaagacgagattgacgtcggaataacgtactgttgccgttttgcagtattttgaagctaaacacttttagaaggcggctagttgggtattgtgtaccgcttcaaagctatgagaaggaattcgaagcgtcgcccgaaccaacacggctaattattccgactgaagcatttgataaccaatttgtggacacttttacaaatcattataaggtggggagcaagcattgccgacttgaccaattgttgtctttttcagtttaaaatacggccgatgttcgttgtgccagcggatgcgaacgcgttccagcagatgttcaggtcggcgcctccactgttatgcgcccatcgcattttgaagtcatcaacaatttgcataaggactgacatggagccgagttcgacgcgaatggctctgccgtcgcaagtgtcgaagttggttcaggacaagttcaggctggactgcaaccctcacttggtgccgatacgtctgtcttgcgggtccgagtgtttcctgctgctcgacttggcagagcattgtacgtttttaagtttacggtgccttttttgcagtgcgtctttttgaggccgtgacacttacgacgcgaagaaggagcccgagttcggtcactatcgctttcgaggacaaccaattgaggaggccaaggcgctttcttcgcacacgacggaagaggaagggaaactttcctccgccaacttcggctcctgctcgccgccttccaactccgtgatggaatgctcaacaacgacggagcaacggccgggcaccagcgaacacattgacaacgacgaccactgctcatcgccgcccgttaaaccggtgggtgggtctgtttgacagtggacaataacttatttccatatttcgttagttttaaataagtttaaaattaaataaattattctgaaaaataaatctaaaacaataggatttatttagaaattaaactggccgttgtttttttacaatagaaggaaaccgtactttcaaaacattctgaaagagtttattttcctaagttttcgaatacccaaaactcttgtattgaccgacccccaaaaatgttgttgactgtaaaatggggttggcttacatcccccattaaatcataaaatgccgtttttttattgttttttttagatttttcagttgacatatgcccaagtcgccgccaatagaccgagaagaaag

SEQ ID NO: 81360 - DNA, 130 bp, Heterodera glycines; identical to SEQ ID NO: 75228

SEQ ID NO: 81361 - DNA, 156 bp, Heterodera glycines
atgatcaacactcaaccttgtttcgcatatattgataaatatgccgacactttgatcaaatcggaggaatttttgcaaattgatcaaaaattattgtgcaaaattttggagcgtgatcagttgcaaatcagaggagaaatttcaatttggaaagca

SEQ ID NO: 81362 - DNA, 1105 bp, Heterodera glycines
  unsure (1)..(1105): unsure at all n locations
atgtctttttctcgtgattcaacaaatgatgaatttacagctgatcagggtaattgaaaaagaaataaaaacttaggcgctatatgaaaagcggcagtttttgaattttatcacaaacaaaaggggggagggacccttttgtttttcaaaatttttttatgataaaaaaccatgaaaattatgttatccgggattttagaggtcgctgatcacgaatctgacatctaattcgaggttatggaccccaagaaccccnagggaataaattttcatgactatatattaaaaaattttgcaaaccaaaagggtctccccttttgtttttactttttgataaaatatagcgccaaaacttaaataaaatttatttatttgttttgtttttttccaatggttagaaataatattttaggaacatttgaaaatgtgacaccaccatcagcagttgaagaattgcaatgtttgagaagtatggaaatggaatgggtgcaaaagatgccttcgcaagatgagaacggtagaaaaatttggtagtactgtaagattcttttgaaaatgccaaaattaagacaagaaaaattatacaatttttctatatttttttaatttttgataaaaatttaaatactttaaaaataaaattattatttttacagtctctggcaatgtccacaaaaatgaaatgaccaaatcggattatttggcaaaatttttcaagcgtttgtcgagcgtagaaaatttggcagatgctcatttatcatatgggcaaggaaacagcaagaataaggcgagaatttttatttatatattttttaaaagtaatttattatttaattaaaattgggatttgtgtcctcgaaagtcgggggattcgggaatgataatttcagggtcgggggaaaaagatgaaaaccccagcaacgtcctgattgtggaccagccatttaaattaattcattatatgctcataaggacattttattttgattattttaggattttatcggtacttgaaacttatttttaagaaacaatttttaatttaattttcgttttatttttatttggcatttcagagccaaatttcccatttattttggactga

SEQ ID NO: 81363 - DNA, 1827 bp, Heterodera glycines
cgcaagacacttctggcaattcttccaagggaagagagaagtgtctcccgggctgtttgtgatcaacacatcgtttggcccgctgataaatggcgagtccaacattggaccgccgaactcaaatcaaaaagttttctcaatgatggccatccacagcactaatctggaacaaatgccaaccatcaatgaggttgagcatttcttcaacctcgaatccttggggatccaggatgatcctgcccaggatgggctgtcatcggtgctaaccaagctccgacattctccagaaattctggagaagtacgatgccaccatccgcgatcaactgcaacagggcatcatcgagaaggcccaaagggctcctggacagcttgagcacttcctccctcaccatggagtgctcaccaaaaagctacgcgtcgtttatgacgcgagtgctcacacacgcggaacaccaagcctcaacagctgcctcttccgaggcccagtgcttctgccagatttggcaggcatgcttcttcggttccgttgcccgacttttccacttctcgcggacattcaagccgcatttctccaaatttcattggagccggaagaccgggaggtcacgaagttcctttggctaaaggacacttcaaagggactcccgacaacttggcaatatttagattttgccgagttgcgttcggggtcgacagctcgccattcattttggcggcgacactccgccatcacttgcaacacttcgactccccactgtccagggagatttcggagtccatttatgtggataatgtactcctcgagtgcgagactgtacaggaggccttggaaaaatacaaattttccaaggacatcctccaacaaggatgcttcaacctgagggaattcatctctaattcaaaagaggtgatgaaacaaatccctcaggaggatcagctggataagccgaaggccaaagtccttggccttttttgggacaccgagaaagacgagatcgtcttcaaatttccaacaactgatccattgaggccagtcacacgaagactggtcctcagccatctcgcatcgctctttgaccccttgggggtccttgggccatgcattttgccagctaaacgcctcttccaagaactttggaaggagggccactcttgggatgatgccctctcagaagaggactcaatccgctggaattccatccaaagacaatggaaagacgaggaaatcagagttcctcgccgagcaatgctcaatgacacacagtcaattgagctccacgcttttgtggacgcatcggtccactttattgaaaggctgaaagaaatccgagaatgtctcggatgtacctttcatttcgtccgtactggggacaacccagcggacctcgcaacacgcggagcaactccttcggagctccgcaaccatcatctctggtggaaaggtccaccttggctcgcacaagcgagtcaccattggcccagcgaactctgttttcaagtaacagagtcggatcaacagccagactcaacggagaatgttggtccgagtggtgcgtttctcgcacacactcactcaaaccagccaaatgagcaggtcttaattgacccctcacgcttcagctcatggaaacgccttatgcgaacaacaatgttcgtattaagattcctcgccttaatgtttaaaaggggcgaggaaacggttgcttcactcgcgaagcacagaaaggaaattcgccagatttccaagtctggggacttcaaggcggaagacttcgcactcgcggagcgagttctcatccgcctagaccagatggatgacgcttaa

SEQ ID NO: 81364 - DNA, 531 bp, Heterodera glycines
ggtgtcccaaaaaaggccaaggactttggccttcggcttatccagctgatcctcctgagggatttgtttcatcacctcttttgaattagagatgaattccctcaggttgaagcatccttgttggaggatgtccttggaaaatttgtatttttccaaggcctcctgtacagtctcgcactcgaggagtacattatccacataaatggactccgaaatctccctggacagtggggagtcgaagtgttgcaagtgatggcggagtgtcgccgccaaaatgaatggcgagctgtcgaccccgaacgcaactcggcaaaatctaaatattgccaagttgtcgggagtccctttgaagtgtcctttagccaaaggaacttcgtgacctcccggtcttccggctccaatgaaatttggagaaatgcggcttgaatgtccgcgagaagtggaaaagtcgggcaacggaaccgaagaagcatgcctgccaaatctggcagaagcactgggcctcggaagaggcagctgttgaggcttggt

SEQ ID NO: 81365 - DNA, 844 bp, Heterodera glycines
acatttctacttcttctgtcaccacactccaaccaccgaaccgcttcagtgcccaacgcaacgcaatggccacgtacctattcctcgctgctgctgccttcggagcgggaattgtaatgctgcgctttcttcatttttttcaaattgcatttcataacatttttgtccctttcagtactgttggaagacgtaccttggcccgatgctcgaccaaccgaagagcgacgacgaggagaagcccaagccggaaggaggcgaagaagcgacgaccgccggcgaggaggagaagaaggctggcagcaagggcgacaagcacaagaagaaggacaagaagggcgaaggcgcagcagcagcaccagcggcggacaaaaaggaggagaagcgcaaggacaaacacaaatccaaggagtcggggaagagcgacgacagcaaagcgggcaagaaggacaagcacgggaagaaggacaagaagggcaagaagaaggacaccaccgatgcatccaccgtggacgaagccctgggagaacagagcgcagcggagacgagccaagcagagcaatagccaggccgtgatgcgtgcaaatgactgtgttcgacgacgacgtctcgcgacacccacacatatcccttcgatcattcccgtcccttccgattgctgtgttttgtctgttccaatgcttcctaaatgttccccttgtgaacagtgatccttccttatgtgatctgaacatatatatgttgtatgcccattaatatattgtgcttcgcttattcgatatttgtgaaatctcattcatattcatcgtcgttgtattcatatatacacatttgatatattaataaa

SEQ ID NO: 81366 - DNA, 155 bp, Heterodera glycines
atgattgcacagaattgccgaaaaaattcgagaccaatttccgaatgttgaccgactaattgcaaaacgaaatccgtctttgtcaaagcgccttaccgagtcaaaaaatttggaaatatatctcatatgcaatttcaaccaataaatttgaagaa

SEQ ID NO: 81367 - DNA, 69 bp, Heterodera glycines
atgagctttacgcaggcaccaattctatggaatcatcgccaactccacacggagacgaaggcgtatatg

SEQ ID NO: 81368 - DNA, 3144 bp, Heterodera glycines
gtggcattctacggtcgtgatggctataaatacgctgctgaaaagtacggtatcgaaaaagcggagccgccaaccaaaaacttcaacgacatggacgagttcgacaagttcgggttcatgcacggtgagttttgttggcattttaaaattggtttggcattcaaattcgaaaactagctaaattttaaaaaaaaattagtcatttttgtaatgtttttaaaaattttacgggcatggaatcaattttatgccaatgatatttttattttacaaaaaaaaaattaataatttctttttctcagacatggtgttgctattgtttgacggttgtgccgtatgcaatggcaacaaagtgccgaatgtaacgatttcactgctccaacacatgccaccagtaaaaaataattaaataattatttttggcatttttataattttttaaatttaattttcccagggattgttggttgacgagtgtaaagaatttgttaaccgatccgggtataaataaaataaatattaaatatttgtgttgaatttattgtttgtttttcaagggaagcattggctctacagatggaaatggttgaaaaacaacaaaaatccaaaggcacctttgcatacggtgtttcgctgaaggaacggtacgataactaaaaatgcgtactgtacagtgtactgtatgcaatgtaaaaagtcaaaattaatttaattatttacaatttggcaaaaaataattcctattttttagcctctgtgttgagaagaaacccggcaccgagaaagcagaatattacatgcaaaagctcaagtgggaaataattatcaagatttaattacgcgaaatttttaagggaaaataaattttttgactgaaaattttcgaaatttccgtgttcgttggtacccctctcttagacctctcccacccaaattttctcactaaatttttccaaaattcgcaaaaaatttgtcgaaattatgtgttaatcagctgattttctttctgtattagatacaaataccgagtggtgctggaagtgaagcacacctgcggcgccgacggagagcaaaaaacggtgcttttatttttgttaattgagacttatttttgtacaattaataaatataaatgtgagggtaaatccgatttcatgttttttcttcagcattacatttggttgccggaaatcgatgtctttgataaggaaacggtggtgggccgcgtgatgcaagtaaaaaatgaatatatttttttaatttttattaatttttattaaaaaattggagaaccgtaggggtctggctgtgccgacatttttttggaaaaatttagccaaaatttttgggaaatttgagtgcgtgagatcttggaggggataacaacaaggagaatcgaaattttcaatattgatgccgaaaaatcggcacttttacgcttttgcactttgctatttttcagatccgccaactccatttggatttcgccgacatggaagatactgttgatttgacattgatactgtccggaagcgactccgacaaaagcggccaattcgttaatgccacattgatcccctacaaacacgaacccgtggtgccaccaccatcggtagggtgccattcaacaaaaacaattaaaaggtttagaccaaataaataagctaacttttagggttatggtatacttaaattttttattgtatataaatttttattaattatagcccatcggcctctaataattttatattgtactgtaacatggacgggacggttttgattgtagaatatattaaaaatattaaaaagacaattactttttatttctaataacaaaaaagtggaaaaaataggaaaaaagctaagtgggcggcgggggttaattgagaaggcacaactacggtaacacttggagtaacaaaatggcaactgcatcttaatttaaatttttcttcatcagccaaatccgccaatcgcaacaaatgtggaccatttgggagccaattgcacacaaattgtcttttccgaattgatgccgcaattttttttgaacgtctccaatgatgcgtttgcaattgcgtgccaaaagttcgcggccccaatctatactggcaaaaatttttcggcagatgattattatgccaacacttgcgcgcaagtgccaacttcgctgaactgcaacaagtcagaaagggcattgaaaaattaggcttatgtattctgtattttctctgatacagcccccggtggctccgtttttttaaattgacaaccctctcggggggggggggggggggcattattagagggggctcataaaacagtaactctgacaaatcaaaatcatttaaaatgggaaatatgccgagcagtgatagcactaaaaacaaaaagcttaatgtataaaattctgctttcgatacactatacatcccgtagctcagttggttagagcaaggcacgattgctggggtcgtgggttcgagtctatagatacttctatgtatcgataatatttttttttatgcacaaatgattagaaaaccacctaaaattcagtgatcacgagctgatcggctgttacaaaacgaaaaaagtgaagcacgtggtcaacaatgaaattgccgaagtttgccaaaaacatcttggaaatgttgggcaacagcaggcgcacggatttcgcatccgtttttgtgcccagcgtaacgcgaaggagcagctgatcagtgtggaatccattctggatttctcattctcggacaaaatgtaattattgacataaaaagtgattgtttttccaggacaaaggtccttttttgaaaaggatttccaaggactgtccttggcgattcgagccatattttttgaggatttttgccatttatttttttgtaacctattttttcgtcttataaaaataaataaattaaactgtatcatcattgtcaattaattatgattctcattaataaattttgcgttttttatagatacaaaagagagcacagttactcatacaaaccgggtggacacatcgcaatgaaggagaagatgccgttttttttcattgagttcggcaatgcgaagcagcacagtatgcttcgtggcacgggagacagtagcgaactgtcagcagaattg

SEQ ID NO: 81369 - DNA, 338 bp, Heterodera glycines
atggcaatggaagacaaacgaagaagaaaaacgacggtgggaagcgacgaaagaattagaagaaatgtgccgggaagagaggcgccggagggaacagccgacggcggagcaaaaaataaatgtgggaaaaaggacgggagacacactgatcagaggaatgacgatgttagcgatcacttgggcactcttagacaaaatgacgaaggcattggtcagagacggataaaaaagaaaagaccggaggaaatgatcaaagtcatcaaaccgggaataattgtcggataatgttaataacagtctttaagtttttatttaacaacaacgaacgaacaaataaa

SEQ ID NO: 81370 - DNA, 809 bp, Heterodera glycines
agatttgcaccttttccatgtcacagcttagtccgaaccatctcttcgagaatctcaaatattttgaaacccgttttgatggagatgggtgaattttcagttatttataaaaaaagacatttctctaaaggaccttcggtgttggattatcatcgacaccagttcaacaaaatgagttcattgggtggcacagtgggataggttttgactcagatggtgacattatcggtaggagtctattgaactctagctagaatttaattctgacatcattattataaaggactagagcaatatggaggaccctctgtattgaagacttggacctattcgagaggggatgttattggtgtaggaattgcaactgatgagcttttctttacaataaacggcgcaatcataggtagacataacactattcgcgattttaatatattttttttggagtaaaaaataaggccacagaagaattggaaactctcgcctctcgccgaactctcgctctagttttttttgggactctcgcctctcgccgaactctcgtctttttggggactctcgcctctcgcctaactctcactctcgtcttttcagaaacaagttacacccttggggtatgtgccctgcggcaaggaaagaattgggtatatgcccaatggggaggagtcattgtgtatatgcccaatgggaggagtcattgggtatatgcccaatgggagggagtcattgggtatatgcccaatgggaggagtcattgggtatatgcccaatgggagggagtcattggggatatgcccaatagggagtaa

SEQ ID NO: 81371 - DNA, 183 bp, Heterodera glycines
gtcaaattgatacgaaaaaacaaaagcctaaaataacgcatgaaggccgagcttcggccggtgggctgatcgaatgaaagaatgtttcggaggcggcacattctcattggcacctccaatgttcaaataaattgtttccatttcttcattttgttaatttttatatttaacgaaaaatttaat

SEQ ID NO: 81372 - DNA, 1148 bp, Heterodera glycines
atggcttctcatctgtctgtcactgttcttacgtcaataattgctctttttgttcttcttctggcactccacggaactgctcccaatcagctcaaaattggagagaatggactttttgaggaatatttgcggtgagtggcggtacaattgaactttgaaaatgccattgaatttctaagcttttccatgttaagacaattggacaaacgaagtccgttgaaaaaatcggacggacttagcgattttgtcggctctctcaacggcgccgcgcgacttcgctacggcaaacgaagcgacggattaacggccgaagaaatcgagcaaattctttcgcttaatcggtaatagtgaagctgcagtccccgttttctaaaaacggtgcttttcttatcaccttcaaaatgattatttggttttaatttccgtatttcccagcattcgtcccgaaaaagagtgaaatttagcaagacaaacatttccaagtcgaagacaaaattggaaaatgaacttaaaatccataagggacatttggaataatttaatatactttcacaaaaattttaaaggtaaaatattcctgaaatatgggggatttataaaatatttaaaaatgaaaaaatattttttaattcatttattcgttcgttaatttactataaaaatttaaatttacatgcttttactatttgccatagaaagtggcacttttcgatgctttccatggaatcgtgtccaattattctgatcacattattgtttttggagtcataagctcaaaataaagatttttcttgtgaaataattaaacaaataaagctaatcggttgaattttacagatggaaaatgccaaaaagagttgccaattatgcagaagcattgcccatcggtttgctcgaccaactgaacggagcggaaaggttgcggtaatgagcggcgaaagtcacaccaaaaaatgccaatgaaaatttagatttgggcgaaaatgatttgttttgatgtgtcggctcttcaacgtcgaccacttcagccaaataattaataacccatgcagtgacaaaaataatattgacgaacatttaaatgattatcacgagaaatttatggcatggcactaaagtccgttaagaaaagatgacaaacttaggta

SEQ ID NO: 81373 - DNA, 1203 bp, Heterodera glycines
atgatggattttgaggacgatgaccaatcgctttcttcaaaatattctacgaaaatcggaacttcaaatggaatcagaaataggtcgtttttggacaagtcgaatttactgtccaagtccgcgtaagttgaattcattttccatacaatcccatagaactcggatttctgttttccatcagctacttgattctttcaataaattttaaaaatttgggtaaaaagccatgtttaggtgtagaaccatttagatatggaaaaagatattgctagtaaaaattgaagttcgaatttttagtttatgctttttgatttaattatttgtcagacagccaaacggtttttaacccaataccccgccaggcgcgtacgggttttacggactctgtaactctgttttttgggctgacaaggatttcacgggctggtttttattcccttagccgaaccccgtgttgtttccaaccccatagcctatgtatgtggaaaattccgatagtcatgtcgaatttacaccattctaaacatgcctttaccgccaacaaatgttaaaatttaaaaaaaaagtacgtgatgaaaaatgcaaaatccaagcgtgagttcgcattaaccttagaaaaagttataaagtaaaaaaatattttctcttttttaccgtcggattgattttatttcagtttcaaaaagtcttccgcgccttcccttcgttctttttccgtttgttcttctaccgttccttcgcattcttttggctggcgtgaaaaaagagaggaaactccgttaaaagaagtaaatcagctcatcgaccaactgatgttgtacagcaccgacgaagaaacggcagagaatgaattggacgacgaagcgattggaaggcaaagagaaatggccattggaacggcagcgaaaaacgaaggcaaaacgatgctgagcactcgagcgatttcgccaggaaggcagtgccgacacggcaaacagcagggaccattcgcatcgctcactttcaacccggccgtgcgtaaagtatgtcaccaaaacaatactttttagacttaaattcccttctcagattgccgctggccatgccttcccttttgaaggcggtttatttggctcaaaggctgtgtcactctcaagggcgggttcttcgtgctcctcactttcgatttccaacaacagttcttcaccatttcgtcatctttga

SEQ ID NO: 81374 - DNA, 1443 bp, Heterodera glycines
atgggcccggaaacgccgaagtacggcgaactgatgaagaccacctgctcatcggaggaggacaccgggttggaggaccacggcgtggagacggaggacggagcggcggctgtggcggtgcgggtgaagcggcaggacgcgggtgacttgaccagcctgggcgtgtgtctgggcgacatcctgcccgcggtccgcgagcagtaccccaaccaattggtgtacgtcataatccacacaattcgtgcgccctcaattatactgagcagtcaaaacggaggtgagaagggcaattaatcaatcactgattggccttggcaggcgtcgctttgctgaatttcctcgtcgacgtcgacttttacattcagtcgacaaaccaaagagtgggcacaattcgaattgcttcggatgttcgcataaccattcgcacaaacggtgggtttaaatttaaatgcgaacaagtcactcactgatcagatcaattttatcgtggatggcatcgaaatttattccgcaaattccgtcccctttctcttcctcttcaggtgcccatgttaccggccatgccgatgtggtcagcatgcatttggaggacgtgggcaaccaactcggccttccgcaggacgcgttggacaatttggggacccttggcagggatttaatgcttaaggtggtcacttttgtgaacaaatcatatcgcacatttttcatttagtccatcaacgacaaattagagcagggcacttcgctgaatgtgcccccgggcactggcggaattccaatcgtaagcatttgggtgacccaaatcgaaatgcataaatgatggttgtttcttgccagaacattgtcgacccggtcccgcacattctcgaccatgccattctgatcgagtccgactttacgatggacaccagccaattgggcggatcagagccatgcgaatactgatcagatcaaccacacgcacgcactagtagcaccaccggcattcctttgatcgtttagtgatacgaaagtgacgggtaggagacatccgattggttttttggggagaaggggggcttaattcgatgaaagcggataattttacccgaaattaccaaaacagcgaaatcaaagcgcagtgagcgcgtaacccggtcttatcatccttatcagtctgtcctatcatttttatcatctctgtttttgcccatttgtcttgccttagcttttttgtgcaacccttctcttctcttcccttcctctctttctctgttcctccaattttgtttattatttgtttgtttttttcattttttttgtttatatttaataattaatcgcattttataggttaattttcttgttttccgcctttgtaattgcactttaaaagtcaaaagtatcattcccctttttctgccatttattattgtaatgatcttgccaaagtgaatgaattta

SEQ ID NO: 81375 - DNA, 657 bp, Heterodera glycines
atgaaccagcagcaagtaattaaaacaaaactaaataatgataaattggtgcatgatggtgcacagaaaaagaagtatcgcgatgccgacgcacggattcttcgtctcgtccaacgctataacgatatcaataacaatattgtccctcaaaatgatcacaattatgccaatgccaatgtcaatcccgaaaaccttaacaattttctcgctggtattttccgaaattatgagatgcgacctattttgtcccggattttgttattattataaagttatgaattttctacaaaattttatgaatgggaaacaaaaaatgataaattttggttttattagttcttaagtttttctatttgaatctgacgcttgtacaagaactcgtacgaaaatgtcccccgtacgaaaatggcggtacgaaaacgaccctgaccgcaagattagcatgtatttgtcagataaatgtatgtccttattttgaaaacttataatcactttcatatgaacatatgaactattgataatctttataaaaaaaaaactaaggcaaaatgtgtaaaaattcaaacacaatatttttcaaggctaaaaatttctaagaaattaatttaggataaattaggggtcccgctatttaggaaattctttaggattctaaaa

SEQ ID NO: 81376 - DNA, 1041 bp, Heterodera glycines
atggtatctacacgtaataaaactggaaaatttatgaagctaagcaattctgggactgaagcaaagcgaaagcagaaggaatggcgccaggagcatggtcgcagagtcggttcgacgccaaaaagtgacgaaaattgaccaaaattaattttattttaaaacactgcatttttcagcgctaaagcagaccgaagccgagacaacagcagacggagagggtacatcgacccaagccgccgaaagtggaccatcaacgtcagctatggaccttcgtaagtcaaaaaagtcactattttagaaaaattaaggcccgcattcaagcccaaggccattgtcagcgactccgatcaggcgccatgcgcgtgttcgtgcaaaaactaccgacaaagcaacgaacatggatcttacaactaccgacaatgcaacaaacacggatttgacaactgccgacaaagcaacacacatggatttgacaacgatggataaggcaacagacgtggatttggcttatgaggacgccgcgacacaaaccgagcagttggacaaacagctgaaagagcaggaacaagtgatcagctttcttcaacagcaggtccgcaacagagacgcactgatcgctgatctgcgccgtcaattggaacagcaggcgaaggaccagccaacaagtaaattttgcaaattttagggtgccatttatcattcaaattgtttttagcatccacacggcgcaaaaagaatgctgctacattggagcagacctcgcggcgaaatctggccaagaaaatcgctgatgtgatcgatcgagatcggtcgcggtcagtgagccgatgtttgctgcaatctctgcatcgtgaagtacgtcacaaatttggacactacacaccgatgaagaaggaacaactccgacaacaacaaacaatccatgaagaagatgggctgcttttgctgtcacagctcgggactcaaaaagcatatgagaggatgaaggcactcttgcgtcttatcggcggaaaatttgatgttttcccaccattgaaaaaa

SEQ ID NO: 81377 - DNA, 538 bp, Heterodera glycines
atgtcgccacgggatctggacgaattggaaatgtcgattgatcaatttcggacatttctcaacgatcagccacggatgcgcactttgctcgccctaaaaccaaaggtccatttgctgttgaaccattttgtgccgttcgccagacaacaccaatttttggcacttttggacgagcagggtcataaataattttgaaatttaatccatgaatttttttaggtgatgaagcactgcattcggtgtggaggcgattggaacagctgtggaaaacaatgcctgacgaagaacaaatgcgtcaattgttggaacaccattttgtgtcaaattggcttctcgacacaggaaaaattgacgaaatgaagcgggccagtttggtcaaagattgattcgagataaaattccatttttaaggaccgtgaagaacaacaagaagaaatcggaggccagaagagcgacggagaaagcaatggagaagaacaacaattcgattttgaataaaaacagttggatgaaaggtttttctttgtttttacagaaa

SEQ ID NO: 81378 - DNA, 666 bp, Heterodera glycines
atgcccaaacattggccacaatcgaaaatgtgcagcgtgaccacatgctgcgctcgaaggcggccgaggcgcgggagggcggcgttcggattgccatgggtctacacgactcgccctatctgttctgatctgtgcctcgccctatctgttctgatcagtgccctcgccctatctgttctgatcagtgctctcgccctatctgttctgatcagtgctctcgccctatctgttctgatcagtgctctcgtcgtatctgttctgatcagtgctctcgccctatctgttctgatcagtgccctcgccctatctgttctgatctgtgcctcgccctatctgttctgatcagtgccctcgccctatctgttctgatcagtgccctcgccctatctgttctgatcagtgccctcgccctatctgttctgatcagtgccctcgccctatctgttctgatcagtgccctcgccctatctgttctgatcagtgccctcgccctatctgttctgatcagtgccctcgccctatctgttctcgccttagctgttttgaattaattttagtggctgatcgtccctcctcatattgtgcccatttctgtccgttttattctcgaatgtgtgataatcagtaacagtatcacattccaaaataagtatttttaaaaataaa

SEQ ID NO: 81379 - DNA, 212 bp, Heterodera glycines
atgacgaggacggaacgcgcgggactcattctgatggaaaagttggagatgctccaagtgacggtaaaacaatgcaaatgttaaatttaaatatcaaaaatccaagttaaatccaaatatgcaaatccaaattaaatcatcacttttattttcagaattattcaattcgcgcgagggaaaagccgaaaatgtattccatggtaactgattga

SEQ ID NO: 81380 - DNA, 1361 bp, Heterodera glycines
atgccaaaatgcgatggcaaacaacgtgatgacaacgccaataaaatggggcaatgccaatgccaaaaatttgactgtaaaaggagaggcccgtacaatgtccatggtgtttccgtcaaagaaagaactgttaactgtgcttgtccagcttttttccagcgagtaagtcacgtgaatcatggggaagagagttgggtgttggtctccgttcggtggaaagtagcattgtaaagcaaaactgttcattgttaagtcagcaaattccgctttgggagcatgaagaagtgagtccgttgtgttggaagccggacagtgtgaatcagttggagtgtttggtgcgtcttttggtcgcttaccttctcggctctatccccgatttggtgcttcattggaccaattttgccgtcgatttcgccatctccagcaacaatttgcatttggcaggtggactgttcgtgctcttgcttttccttttatttatttatttttcaggccgttctttccaaactgccggtgcccttggcctcagtccgagtccgtttttgcaccaaattctttcgaggcttaccgaaatggtcggcgatgtcagtgaggagtcccaaagttacatcaccgacttgttcatgtgcttacaaaatttggcccaaaatatcacaattgctgcacacctcgccaattcccctcaattacaatcatcctctatttcaactggtcacaaccgatcagtgagttatacccaacaaatttcgacacaaaatttgcaattcaaatcaccgtcacgaagaataacacagaaaaaaggtgacttggttatcgaatcaaatttatgtgtcgttgatttttgaggttcggacatgcgtcattctctgctcgttggtgccgaaattttattccccatcaaatcggatgccaaacctttgactcggagtcaaagtgcggcaacgcttaaattctctgaggatagcgccagcattttactcactgaaaatgacatggaaatcatttcgcaacttttgttcatcgctttggccatgacagaatccaatttggaaaacgaatttcttctcggactcagattcgttgacaaagtgaccaattttttggcaatttccattaaatcgcttttttagttgctgctcatttctgggaaagaacggctaaacattctcgagaaattggaggaactgatcgttcagcatgggtgggacgactttcccggcattatcgcacattgcttgaaaggtgccataaattgaaaattgtcagaatattttcctttccaggcactttgtattcgtccggttctgaatgtgccatttccgtcttttgcaattgtttgccgcacctcagcgaacaaatga

SEQ ID NO: 81381 - DNA, 828 bp, Heterodera glycines
atgtttggatggatattttccttttttgaccgtcttcaactcggcctcaaatttgcactcctttcgccacgtttcaatgctctggtggacaaatatttcgacggcaaaagtgaattgcgaatttaccaattcggcaagttttattttgatttttttctaaatgtgattggttttttgggttttgggtatttttcgcgaattgtgtttttaaggagtttatatgcaaaaagttttctcggttcgaaaaatggctcataaattagaaaatttttccaaattcgtaattcattataagcacccgtttttttgtggcacggtttttccaaaaaaatttttagggggcagggggtctgcggtgccgataagcgccgccgggaaaattttgcggttttaaatgcggtttgttaacagattttgtccaaaaaatgaccaaattttgagattttgagccatttttagcacattttcatcaaaaatgttgtaccttttctaatcactgctgtacctcttttgatcatcgttgtacctcttctaatcatcgttgtacctcttttaatcactgtcgcacctcttttaatcatcgttgtacctcttctaatcactgctgtacctcttttaatcactgttgcacctcttttaatcatcgttgtacctcttctgatcactgttgtacctcttttaatcacagttgtacctcttctgatcactgttgtacctcttttaatcactgttgtacctcttctgatcactgttgtacctcttttaatcatcgttgtatctcttctaatcactgttgtacctcttctaatcactgctgtacctctttaa

SEQ ID NO: 81382 - DNA, 701 bp, Heterodera glycines
atgccggacggacccaaaagggcggacgaaggtgccattgtcggtttcactgaagggaaatgccaaagacagaacggcacaacaaacggagcaaagggagagacaaaaggcattaatgaaatgggatttgttaaagcaaaagaaaaatggcaaaagataaaaaggatgaacgaaaaacgaagggaatttggcaaaataaaaaagccaaaaagggaattggcacacgtttgggttgaggttgatcaatgatttattaattgcatcggatgatcggtgcccactcactgatcagctccacgtccaccccaaccgttgcgtttcccgccgaattttcggcatgacacgtgtaatggcccaagtgttcttttgagccgtttttcaacagcaaagacccatcggggagcacctttaatcgcaaacaataagagatagaaaagcattcggcaaaagtccaccgccgtgcgtttgtcgtcgccaccgatcagcggacgatcattctgaaaatgggcgaaggactgaaaggatcagcggacagtcggcactttaagccaacgaattttgggccgaggggtgccgagcagaacgatgcagttgatttgcatctctttgccctggatcagctccattcgcgcaggcagttccgctaacacgggcctcactagaaaaggaaaaattgcaaattgaaatgggaaagcaataaa

SEQ ID NO: 81383 - DNA, 1302 bp, Heterodera glycines
atgaaatcgctgccaagacctgcccaggacgaattcggcgagtgttcaaacgtcgccaattcggtgccacggcacgcccgctgtgtgtcgcgtctgttgcgcgcaggatttgatggacgaaaaatttatgcgaaagtgaattgggaaataacaaattgagggaatatttactcaaaatttccttgcccagacaaatgttttaggcctttgccaaatcctaccgtttcgaccgttaccgtatgaaaaagagggcacagatcagagagagccgacggaaaacggaacggaggcaaaagcgacttgtttggctgagcaaaaagagcacattcggaggacagaaagtgggggacaagtgggaaaatgccatagcacatagaacaaattattaaggccggtttttccgatccgaaaattctattgaaatttcaattttgatcaaccaaagcacagggaagggcaaccgataaatcgaaaagcctactccatagaaaatgggaggtaggattaacagataaaaagccaaaaatatcagctaaaatggggaaaattgaaaaaaaagtcccaaatttgtgggtttgtttttgaaaatttggcatatggaatttcatttttaaaatttaggtcagcccttttcagcgcagagaagccaaagtctatttcgaaaattaagaataattccctgggccctcctcgtcccttgggcctcgaattggccaatgcctacgcggcacaccgccgcgaacgtcggcacacatcgatagtgaagaagaactattacgaggttagcgttaattaggacccaattaaagactttcaacagtttttctgaaatgtttcagcttcacagtccttcccaggcgcggctcagtccgctgggaagcgtggccaaactgatgatggccgaagtgttgcgggtgaagggcaagcagcggaaggacgtgaagccgtgggaaattcaaaatttaaaaggattttaattaaaaaatgaattttaattaattaaattaattaattaatttggcccaatttttggcatccgacagatggcaacaaaccatcgaaagggtgcagaaaagtgcgctgaaacggaaggaaattcgtcggaagttggagcagccgacggacaacgacgacgaggagggaaacatggcattggaccaactcaaattcaggggcatgaaacgccaaatgggcctcgagcaggaggaggacgttagaaaaaaagggcggggggatttgtgaaatctcaaatttagcccaagccaatcaaatcaagcactttaccgtatctcttgaaataaa

SEQ ID NO: 81384 - DNA, 75 bp, Heterodera glycines; identical to SEQ ID NO: 69209

SEQ ID NO: 81385 - DNA, 602 bp, Heterodera glycines
atgcccaattggaataatgagtcagcatctccattatcagaatcagcagcagattatttggccattcttcgaccaccaccaaatcgcaaatgttttcatgcatttttggtttttacatttttgaaaaaatcgaatttcgtttgtcttctttcggttaaacaaatccgggccatattgatgataattgatattttaaagtgagtgactgagagtgaaatctaattgaatcgggccaagaaaaccgggaaattcaagttttaataaggcaaaatcaagagtcacgacttcggcaacgattaaaatgacaaggaaatgtcggctctaatcgatagtatggtgtcagaatgtgtgccgttcttaccagtcgcggctttcgcatcacttccacggggacgccgcgaaaagcggccaactatttaacatttttgaaaaaaaaaactcgaatttcgtttatttctggggccctaccctactgatgctaatttacgagtccaaactcaaattttcgctatccgaagaactgattcctacatatttgaacaaaaaaatcacaaaatttcaggagggctttctctgtacacattgaaaaacgaaaccattag

SEQ ID NO: 81386 - DNA, 573 bp, Heterodera glycines
atggagaaattccgatcaaaaatcgaatccagaaggagggagcgcttttttggtgctgaccttggcttagctaaagtcgaacagcatgcaagaaagtcattggaggaacaatttctggttttaagttgacgtccgccctgattaaacttattttttaggcattttacacgaccgttttggaatatttggacaagtggtttcgtgttgatcggttctctgagaaattgcgttgggtctcactgatgtcggacaaaatcccacaaaatgacgcgttggatttggccagacaaaaagccccggatctaacaaataatctctttgacgatgttagcgaagctaaccaaattctaaattcaatcccaaaggacgaattacagatgctcaacccagagcaaaagtggatgaagctatttgaagccgatttaccgcacttgtacaagttggtcagcattgtactttccgttccggtatcaaatgcatttgtcgagagttttttccctttgcggctcacaatggactgatgttcgaaattcgttaaaagtcgaaaccgtgaaggcgctggtccagacgaaa

SEQ ID NO: 81387 - DNA, 1573 bp, Heterodera glycines
atgccagacaaaacaaaaaattcaattgtatcaccaaattcatcgacagaaagtgaggacaaattttatagtccggaaaattttgaaattgacgaaacgccacaaaaacccattgttgccaacaccaacaaaaaaattggtggtcaaattcgaaaaaattatgaacctcaaatgccaaaagcaattaaaacaaatttgaaatcagagattgttgaagaaaattcgtcggaaaatgaggaacaattttatagcccaaaatttgttgcggatttgaagcacactaataagcgtgaaaatgtgcatggaattaattatttaaaaatgttcaaccaatttacaagcgaatttttggaagaaacaatgaaaaacgattggaaacaatgtaaattaatattaaattttgacttatttgctaatttacgaaaattttttaaatttcaataattttttagtgaaattttcaattcaaatagcggaccgatttcttgtttacctcacagaacaagttggcgaaaaaatattgaaacgaaaatggaaaattcttggccataaaaattggtgtaagcccattgaaaataaacaatttattgacttttttgaacaaaaaaatgtcttcaatgtacgaatttcgaatttacaacaaaaatggaaggacataatgccaaaaattaatgtgaactttttcaacgtaatgattttgtttggcatcaatttggctgaccatcgactggtcaaaatgggcgaaccaaaaaatcgggcagagaaaaaagtgaaaaagaaaatgttaaaaatgaaaacaatgctttcaaatgcatttcattgctttccaccaaatgaattggatttgaatgacaataatgatgttcatatcatacttcaatagttggttttaaaatatagcggaatataattttaattttaaatgagaaaaaatttcactaattgtgttttaaaattaatcaaaatttaataattcaataaatttctaattttaatatgaagataaataagaggttttatcatttatggaaatttaatttaaaattaaagaaaatcacttttattaatttgtaagaatcattgtaaacataattttttcatttaaattttgaaaataaagatttaatgttcacaaaatcttagtcaagtgctctaaaaacaatatacgttatcaaaaataatacatttttatttaaataaaaattaaattaaataatttcgaaataaatttagtgtaatgagtcggctgctttttgtcacaacaaaaaataaactatcgaatgaaattgtcatacacgtttttcaattagttgaaagagatggacaattgcacgccgaatcaaatgatgattgattgattgagtgattatattttgtgtatttttaattgcttaaatttaattttaatgcttattttggtgcaaaatttgattagtgaatatttgtgtagtttaaaaatatggcaccgttagataaatgaagagctattagtttttattaaatgataaaaaattaattaattacagtttgcaattacattattaaaacagaaatagtttcgttagcaaataaa

SEQ ID NO: 81388 - DNA, 624 bp, Heterodera glycines
atggcaagagctaattttggaaaaattcggaatctgcttgaaatttctgggcttttggagaccgactcagaatatgtgtatttagctaaaacattaaatgaagctaatttgaagaggaattttgatggtataattattctacaaattcacaattagtttttattctttttttaaaatatttctttataaagaaaataatcttttttcattttaattttatttcgtgccaagaaaataagtcattttaaaaacaatttcaatttcaattttttaaatacacatttgaaaatttctattattttatacatttaaatatttaattgattaaaattgaattttattaataaattcatttccttcaaagctgtgagccgaataattgggctccatgttggcacggatatgctaaaaattttggaaaaatttaacgctttgccaaaccgggcaagcattagcaagacaaagtttagtggcatgttccaagtggcgtacttggaaattttgaagaacacccaggacaagtgttatcaacaatttgttgaacctgtaaaaggaatagacatgtcgagcaaaggattggtaaatgcaattaatactgtttatttcatttaaatttttaataaa

SEQ ID NO: 81389 - DNA, 1585 bp, Heterodera glycines
atgccagagggagggtatgagagagcagagaaccagagtaaaatagcggtgaaatattttgagtggcttgcccaaaaaaaaagagtaaaagtgcggcatgcgtgtaacggaggagaagtgcaatttggggggctgaaggtggactgtgtgattggggcagagaaaaaaataattgagtttcaggtaaaagaaaaattatttcctttttaaacaatacttaaggggtgtgcatttcacgggtgtccgagatgtttttttccttggactatagcgccaaacggacggacaatggaagagaataaaagtagaaccgaaattcgcatggaaattttgagggaaaagtgcaaaaatttttcaatcggagaagtttgggtagaataaaacatttagaaatatttattaattgttagttttaggagtgtgatgtcagagaggaattgaagaaaaataaggagatgaaaaagttctttgaaagtgtgccggacaagggaccgatcaatttgagggatgcttatgccggggggagaacgatgcccttttgtttgtacgcaaaggctacggaagaagttgagatatcaatgttcgacatcattagtttgtatccctttgtcaattatggtaaaaatctacagagtttttataattttttccgcgcttaagacactccataccccgttggggtcccaaaaattgtagtgagcagggattttaatgtgaattggacagtgcccgacgatattccttatgatggactgctgaaagtgaaggtcgtccccccgaaaaatctgttacatcccctcctccccgtgcacatcgatgaaatgctcctcttccctaattgttggtcttgtgcaagaagggccaagaatgaatttgtgatgacaaaagatgtgaaaaaatgtaaccatcgtccagcgcagagagcatttttggggacattcacatcaattgagttgcggaaggctttagagctaggatatagaattgtgggattctatcgagcgtatcattttgaacagtttgacagtcaactgttcaaaggatatgtgcggatgtttttgaagataaaggtggaagcgtcggggtggccggcggaggtgaaaagtgaagatgaaaaaagagcattcatcgaaatgtacaaggcaaagtatgacatcggtttggattatgataagattgggtttaatcccggactaagaatgattacaaaattggtgagaaattataaaaaatctttaaaaaatgttcgaatttaagggtttaaacagtttgtggggaaaattttcgatgcgcaacaccctttcaagtacggaaattgtggccagtatggaacgttggatggaattggggagagacaatacaattgagtttgggcgcccagtaaaaataagcgaagagatatcaagagtcgtgtaccggaaaaaggaggagttcatcagggagcataaagtgtcgaatattgttttgtcattgtggaccacgagtgctgcgaggctaaagctgtacgagtacatggagcaggtctacaagaaggaggggtgtaaactgctctattgtgacacaggtgaaaaggaataaaaagaaa

SEQ ID NO: 81390 - DNA, 345 bp, Heterodera glycines
atgactcgagagtatgcggacagcgaaattttggagtttgtgtccgcgggcccgaaacagtacgccttaaaactcagaagaaagaaggatggtgtgatttggcacaaaaccaaaatcagagggatgacactggatagacgaaacgaatttaaatatgaattgttcaaagagatggtgttggactacaaagaaggggtcaagaaagtttttcactacccggagaagatcgggccgacaaacgacttccgggttctctcaaaagatgtacaaaaagaatatacgccggtgcagaaaaaaggaattattgatcatcactttaatgttttgccttttggatattattaa

SEQ ID NO: 81391 - DNA, 463 bp, Heterodera glycines
atgtcaaagaaaaatttccaagaaacttcaaaagaattccgccgctcgaaaaatacaaaaaattatttcaaaaacagtcctaatttggaaaaatgtttcgaagaaatggagagtcacataaaggaaaataaaaaatttgggataaaagagcacgtgacaactttctattttaagtgccccgaaaatgaagatcccgaaaaaatgtttaaaaacatcctgaaaaaattaatgggggatgcaatgatccgtgaagctgagcctggctggaaaattgagaaaatttcagtggacctttattgcagcgccctgtcggaccccgtgatcctccctgcccgccccttccaacattcgaacccagacattgttttcaatgagttcatcacagacagcaatcatttggggaagtgaatttgttagaccagagaatttcaataattattgccacttattctttccctgttaa

SEQ ID NO: 81392 - DNA, 360 bp, Heterodera glycines
atgggaacaaattacaataaccccgattacagtacgctaatgggtgctaccgtatgttttttacgttgtttctatgagaatttgataaaaacatcggcacattcaaatagcccgccagtgttccaaaataaacgccgctggggaaaaattaaaaattttaagcgatttttttggcattattttcaattaaaagaacaaaaaatttgcataaaaatttcagagatgtggaattttagagataagcccatttgagagcaatggagaatatgagctaaaattattataaatcccaaaacttaaaagatataaaaaatcaccaaaaataataatcaggactttttattaatttaaaaaataata

SEQ ID NO: 81393 - DNA, 616 bp, Heterodera glycines
atgtattcacatgaaccagccggaatccacggtttgcccgaagcaaactgcctcagggtcaaactgacccaaaaagtcatttttatttaaaaaatcactatgcttaatgaaaattgatatatgtgtgtagtaaaaataacgcatctttctcttattttcaatgtggtaaaattcagtggtactttggccgttggatagtgataaggccggtcgttcagtttatctcgggtggtcaattttcttgggaggtcattttgataagagaatttggagaggaattgttttggcattcccgaatgctgatggtcattctcgagttgtaattgctggtgttcatcatttgctgtttttccctctattccttttccaaattcattggttcatggctcttctccgattcgcagagactaaaacaaatcgcggaaaaattcttctatctcgtggtggatatcagggatggcacggaattccgacttccgagttccgacttccgacatttttggggcctcggaattccgacttccgaaatttttgatgaaaagtcggaatttttcggaatttttttgagtttttttttcaaaaaattagcaatttttgtacaatttatgttaataaa

SEQ ID NO: 81394 - DNA, 454 bp, Heterodera glycines
atgccggcattgtacgtgatggactccattcttcgtcaggccaaaaaacaatacaaacacaaaggtttttcatatttttcatatattttattttttttatttatttaattttttctcagatgtttttgccccacgatttgccaccaatttgacgaataccattcaaaatgtgctcacctgcgagtcggctgacagagtttgttcaacttattaatgaaaattttaacggaaatttttatttttggtttttaagtgcccgtttatggctcataaatctccgtttttctacttatttttgaaaaatttatttttagctaaaagttgttcgggtggtgaatttgtggcaagcgcaccaagtcttcaccgaagacgcgcttgagcctgtgctgcaacatttccgggcgatgggactcggttggcatttttgttttaattggaattttataggattcaa

SEQ ID NO: 81395 - DNA, 1859 bp, Heterodera glycines
atgaaaataattttaagaggaaacatcctcaacaaaaagggagaggatccggcaaattggacaacaacaaaattccgggacgtgcttaacgaagcagtccgcaaagaagtccaaatccaagaagtgatgggcgaatatggacatcactacgttcaaccaaaggcagaagttgtctcagcagcacacgtccaatcgcccataacagcaaacaaaaggtcacgaaggcctaatcaaccaagcacacaacggcatgagtcattcatcgcctcaacactggatgagagtctaaggcagcaaggctataagaagcaacaggacatgcaactagcaaacagtcggcatccacaagcgcgagaccaagcacaaagcatcaacaggattccgccctatccttgcacgttctgcaacggcaatcattggcacgacgagtgccaaaaagtgaacacactcaacgaacggatcggcatcgtcagagaaaagaagttgtgcttcaaatgcctgaaggcaaaccatcaagcatcgaactgctctcgaccgtccaagtgctaccattgcaaacgtcggcatcccacagcactctgcagagatcagtgcaggtctgagaatgacatcaatatgccaagcaactcgtacagtgaaaagaagccaaacgaccagaacggcaggcgatcaacagcgatcgaacaacagcagatgtgcaatgccgtccaaagcagggacaccagagcattgctaatgacagcaagggccacgattttcaatccggcacaaccaggcctcagcatgatggcaacagtgttcattgacccgggaagccaccgatcgttcatctcaagcagtgcagccaagcagttggagctgaccaaccttggaacggaagaatgtttcctcacaagctttggcgaaagagagccaaagagatacttaagcgaccgcgtcgcaatcggcattctttgtcctgacaacgacagattcatcttcaacctgaacgcgttgaagttcctgttgaacgaaatgcccgtactacaactgaatgcgctggaccacgatgggcttcagcagaagaagcttaacctgccaaatgcgccacggcaaccagacatcttgcttggaatggatgtttggcacgagctaaagattcaaccaattgaacaattgccaagcggcttcacaatttgtcaatcaaaaattggcaatattatcagcggaaagggtcgaatcgaactcagccaaccatccaacgtctctttcgtgatgatggtcaccaacaaggaatcgacaggcagtaaaccgacacacatgcagaaagccaaacaacatcgagagagtaaaacattgagaaggcatcaaatcaacaagctcttgtccagcgctgcaacgttacgatcaagacgcaagcgagaatcggtgcccaacagcacaacaccaatcgtgattgatctttcttccgacagcgaaagaaactcatccgatgtcgagatcatacaagacccagtcgcgggtcaacaaatcagctcatcgaacaaacattcaactgctccattacccaaggcactgcgaaggccaacagcaacaaagcagagttcatcaattgccaaacgaccagcatcattccgcaagcaaacacgaaaagcagctccttccgcaggaataaaccgaacacacgaactcagcagtcaaatgaaagccctgccgccaacagcaaaagaaaagagcgtaaaccaacaatgcatcatggccctgaccagaagtgccgatccaacgacgagtcaggatgactggaagttagcgaaatttcccaagcatttgctcgacaacaatcaataacacccaaccaaacaccaagcttcgaaaagaca

SEQ ID NO: 81396 - DNA, 1080 bp, Heterodera glycines
atgttgaagagtcggagttcggtgtccatttggatccaaaatgtgcagttggccgcgttggcaatgccaatttcgttggcaatggtcgcatttcaagattggcacaaagtttggcacaacggcggactcaaccagggatttgacctggtcgtgtggggagtggtggcaactcaaagtaaaactccaatagtaaattttattcaatattattgcttttttagccatgagtggcctttgcattgcggtaaatttaattaattaactcattcatataagcaatagtcccatttggatgtgtttttttttgttattttaaaggcttttgttgtgcttttaaaaaaacaaataaacgcaaaaaaatctattaaaattttacataattttatgcaaaaattagccattttcatttctatattttctttgctttaggtggtgatcaaatatgcagacaacattttaaagacgtttgccaattccttctccatcattgtgatcagcatcgcctcaatttgggtgtttgccagcatgccgaagccgttgttcattgttggcgctgcgttgatcatcaccgccgcgctgatctatgccaaattcccgtatcgggccaagcccaaggctgatcagcgatcgaacagcaactcagcaacggacagcggcagtgctgactcggacagcagcaacatgagcaattgtggcacggcaccacccaccggccgaggaggcgacagaatgccaaaggaggaggacaaagtgtcacggctgaccaaactgttcaggatgggcagatcgccaaccatggccaaactgacgccgggccaattggacgccaatggagacggaaatggcgtgcagaaattttagagagagaaatattttatcaataattattattaattaatttttatttttgtgcattttatatcaaattttgctcctctcttctctgtgtacatctttttaataagtgtgaagagcatttgacaaaaagttatcatcaatcaatgggtcattttttgttaagtgataacttcgattttgaccatttgtgcgatcgatgtgccatcattttgatggtgacaa

SEQ ID NO: 81397 - DNA, 787 bp, Heterodera glycines
atgccaacgttttggtcaaagacagggaatgagaagggaattaattgcacaatatgtatgtatgtgagtttggaaatgtcagtattttacccaatcgatcggttgatcgatcaatggcaaacgccagttgatcaatcaataatttcgctacagcttctggaaaatttcctttattttttaaatcgactcaaaaaccgtgaatattctaagaagtataaaaatttacaaaatatattgctcaaaaagttaattatatttatttatcgaaaagggttggttggtctctagaaaatagagaccggcgcgggattttgcgggatccagtccgcaatcccgcattttttgaaaaatttccgatttcttgcaccgcaaaaaagtggttttgaaaagaaaaaaaaagtcaaatttatgaaccgttaataatttgatttccgatcaactttttaccgtcggatccaatcgaaaaatcttagtcgacccatcagccccttttaatgcatcccgacagcccctaaaatttattttcagcattttttgatttttggaaattttttgaatttaattgaaattttttcgaattttccaaaatcccgcaatcccgtacgggatcccgcaaattttaaatgcgggatttgcgggattgcgggatttgcgggattaatcccgcgggatcccgtcccgcaaaaaattttgagttccagtcccgcagcgggatccgcaaatttgaaatttccgggctctagccgagacctctttctaacagaacggggaaaattaaaaaaataaa

SEQ ID NO: 81398 - DNA, 675 bp, Heterodera glycines
atggaaggtgagcagcagcggaagtggccaaattgttgtgctagcgagcgttttattcgcccatttcaggcaaaagtgcgcgggaattggcggaagagagcggaaatgccgaaatggtggacatttttcgtgcaaccgcgacggacaatgggcgggacgcggcggagggcaccgatgggtaaaaaatttggaatttgatcaataataattgttttttccattttcagacagcaaaacgatcaacagcagatgtgacagcacagagagagcgaatcaatggccaaaagcggcggatggatttcttcggaagacattaattgatcactagttgtattgtatttattatgctcatcattcccatttgatccgatttgtctgtaatatgttccaaatatctctgattgtacagtgagtcggtgtataaatgtcggatgaatttggaaaagtttcggaatttttgtaattgtatgttttgccaaaaagtgtgttatcagatttttaagaatttttttttgtggcgcatttttcagactttttggggaacaagcggggcggaaggccggcggtgtcggtaggcgccgccgggaaaaatttagaaaatttgtataattttaacagattttgcccaaaaattgtataaattttgtgattttgagtcatttttaagaaaataaa

SEQ ID NO: 81399 - DNA, 4252 bp, Heterodera glycines
caactgcgcaacaatgtttgggcgtttccctcttttgaccatgctcaactcggcctcaaattggcacagatttcgcccagttttgaacatttggtcgacaaacatttcggtggcaaaaaggtgaattgttttttagtgtttttttaaaaggattttgtgccaaaagggtgcctccaatttcaaagaatttttgcctaaaaaccaaattcggttttttggtgtaaaaacactcttttttagtgtttttgcttcttttttttgagattttgtattcttatattcttgacattttcagcaaccgctcaacaatgtttgatggacatttcccctcttttgaacatgctcatctcgacctcaaattggcactgctttcgctccgtttcgatgcgctggtgtgcaaatttttcaaggacaaaaagcggattgttgcgcaagtttcatttttttcaaataagccggtcaaacctttctaagctcgaaaattatagattgaattcgagttcaaaaatagaaaaatggaaacatttttccttgaattgaagaaaatttttatttatgaaattgtatatttcaaacaagaaatcattattgtaattttttaaaaaaatgataccatttccatcccaaaattttccaaacttaaaaaattctctcaggcaatctctgtgtttggccggttaaaatctttaaaattcatcaatttgaccatgaatagaataaaataaccaaaaatttttagatgcccatatatacaaaattatggcaaggtgtacactaagcaaatagttttactaacccaaatctgaggttagttaggaattaagtttcgtacactttggcacgcataagcccctaaatagaatttaagaagtctttactcttgacagaaatttaaatttgtacttaaaattattttacaaagaataccgaagtcaattgtaaagatttctgtccttattcccttttgagattcacattttttatttgtttccaaatcttgtcggtctgctttgcgaccatgatgagatttgtgcacatgccggtctgcattgcgaccatggcaaatatcggtctgcttagcgaccatgatatttagtgcacacgccggtctgctttgcgaccatggcgaggctggtccgctttgcgaccatagccaatagtgtcggtctgctttgcgaccatgacacagtgccggtctgcttagcgaccatggcaacatatcggtctgcttagcgaccatgatatttaatgcacacgccggtctgctcagcgaccatggcgaggctgtccgatttgcgactatagttcgctgacggaacctgctccttctgggagatgtgtgttccagacttggttcagttctttttccccatcgttaccggccaacatcctgggcgaaactggtcccgcactttgccaagaccagtggactggtgagaggtgacgttaggataaacaactgacccgttttccaaataactggaacctgctcctccgggagacgtgtgttcaggccaacaaattggaacctgctcctccgggagatgtgtgttcaggtaaataaattggaacctgctcctccgtgagatgtgtgttcagaccataaattggaacctgctccttcgggagatgtgtgttcaggcttgtatctatctgcactcgctgccctttggcaaaatgggacatgtgagcgtcctgcctgatagatttcggcagcgacatcactgtgacactggacaagagatgatcattattttacgcaatcctacacattatttgcttgataaatgtttatttttgtgtgcaataattggtcaatttttctactataccttttgccacattcgtattatcccattaattttgtttttcagatgccttctaagcaagaaatgctaaagaagagaaagaaagaagagcacctgcggcggacggagaaatctgttagtccaggtcgctcacctatcccaaattgccctcctaagggcaatccaaactgttcgattttggacaacccattgagtgcagatgggaatggggcggcatcgcccaggggctttaacaccccaaatttaagtgctttgcaattgagcacgccggcttcttcaattggaagcaaaagacgggctagacccccgaaagccggagatgaggcaatcacggcttcgcaaaataatgtgtcttcagttgacacacaatttacatcggccactcaaaatattgaaacgccgttcagcaaaaaatggaaggtcgacgatgttaaccgacccagctctgctattgaagaaattgcttcaacgcctattttcacgcaaagaagccgtggagggcggccggccaagaaaagacgcggcccaggcaggagcaaagctaatgattccatgagcgagagctcgtcaatggaccagagctctgaagctaccacatcagttgcccttttgccaactgtgcctgaaaagataaacttcagcacagtgcaaattaatttcgctacatcgcgaaattttacctgtaaaatttggaaatgggcagcaatcggcctttacgaacgtgatggcgaaacaccgattgccccaagatctggcccaagatacattgagacctgttggaatgatatgacccagtttctcaatgacggctttgctgccacatacttggcatacttggcaaccatatcacaacgaaaagtggtcgttgttgacccaatggtatggagcaatggcctggacagagtcatgccttacaaaaatatgacatttgggtacgaccctaatgttccggcagaagttatacttttgccagtacatttccctggacattggactctcattgtccatgatgtgcaatttggcactcattttgccgattctttgcctactacatatggcaggttggatccgcaactgacggataaaattaaaaatatcatttcggatattttgccgtcagcagtgttggcagggattgttgatgtcgaaaatctgacggtccaacacgatggtaatagttgtgggtacttcgtgtgcctgtatgctgagtcatggcttatgaacaatcgcacatttgttctgcctgatttatccatcaattatgaaaaaaagcgcattttatggcacattaacgagctgtatggctctgataatgtgccatatcatccaagggaaggggtgccaactccttgcccaattgtctatcggcatacggatgaagcgcagtcgacatccaaggccgctgagctaatggaagttgatgaacatgaagatataatgatcatcgaaccacagacaagtggacaggcagttgatgcaattctcacccaagttcaagtggccggtgaaaaccaagctgacacgcttggtttggtgtcggagtcttgcatcccgcaagagccaattgcgcaggctgatgatgtaattttcatcagacctaagacgccaccaaggcgatcaatgcgcgttcaaaaaaggctttcagcttctgttagccgttcgccttcaccggcgccgaaacgccccccgccagcaaattcgctgggagtggcaacgccgatcacacggcgttgctctgcatttcacaaggggtggcaatgcgctgcagcagcagccaaacatttcccggaatattgtgactccgggaaactcggtgacaaaaaatgcgccgattgcggtgcacatctcttctcacatgaagacagtaccatttgctgccggaagggaagagttgtgctgccaatgcttaacccgcatcctgatgagctcaaagagctgattgtggggaataagcaatcccgtgaagggaaagaatttgtgcgacacatgtcgcgttataacaacctgttccaatttgctagcgtttccgctggcaacaaaccaagccctgctggcggtccgatggccgttattcttaacggagaattccatcgccgcataagcagcatgcaggctggtacaactcagattcctggctttggccagttgtacattctggacccagtcgaggctatggaacagcgtcgaaacaaccccaggtttactggggagaaaatcacaaacgaagatgagtttgtgcagggtcaccagctaaatgagcagactcttgagatcttagaacaaatgatccaagtgcatcatcctgctgcgcaagcatataagcaggcgcgtgagcagctcactgagcttctccaacaacaaactccggaagagcttcgcttcttccgcatgactttgttgaatgagcgcagggcccccacaag

SEQ ID NO: 81400 - DNA, 799 bp, Heterodera glycines
atgaattctcttaaacgctttcaactcccggagcaaggaacacgacagcaagaggagttggattcagttgaaccgaaacacatcagcgatgtggtcaacttcaattcggccggcgttttttatgttttgggaaaagtgacaaatatgcagtaccgtgtttacaaagtccaaattaattaattaattaaattattaatttttctgtttttaggcatgcccattccgttccaaggggctcatttgtcgccgaaaattgtccgatgataacatgtgtgaggcttgcggccaaaaagcgattgcccccatccacacggtgtttgtccgtcttctgctgcaggatgttgaacaagcagacattgctcaacgtgtcaccatgttttcgagtgttgccgaagagtttttgggaatgaaagctgctgaattgctcgccaaggagaaggagccggagagccttgcgaaacatttggacgatttgattgctgtgaagataattgcgaaagtcaacattaaggttgtttttttttgcaatttattacatatttgacaaaccacaacataggcgaacagtcagacttacactggatttgattggattgtcaatttgttcaagaagtgccctggaaaaaatgacagtgatgtgccaaaagaaaaagatgatgatgatgatgacgttgatgagattgctaccaaaaaaacaaagaaaaattgagagagagagagagagagataacggattcattttgttgtgagcttcaaaaaaaaaaggatttaatgtgtcctttacttttttaaaaatcca

SEQ ID NO: 81401 - DNA, 3317 bp, Heterodera glycines; identical to SEQ ID NO: 16976

SEQ ID NO: 81402 - DNA, 995 bp, Heterodera glycines
atgtaccactttgtgagttttttggcatttttatggatggcatggaccgaatttgcattttttggacttgaaaaccatgtaaaaatacgaaattttcaacttttattcgaattctgaattgtacatccatttggtttgaagccgacctcgaattcatagacccaaaaaaaaccttaaaattttacggatttcccaaaatggcttaattgttgatccatcatcctatattacctatctataaaataccaatttttcaatttatttacacttttttttcagctttcatggcctcatctttcatatatcgcggaagacacaaaggcaaaaataaattaattaaaatttttcattttttttgccaaaaattttcagggcaatattgttggctatgttttggccaaaatggaagaagaaatggaagacgacgagccccatggacacatcacttcgttggctgtcaagcgaacctttcgtcgactcggcttggcccaaaaattgatgaaccaaacggcacggtcgatggtcgaagtgtaagtgtgcaaattcaaaatttgtgaaattattgccacttttttttgaaattttgtcacacattttgccgcatttttgtattttgatctgaattgaattggtacaatgaatgagaaaggttgaccgagaaatttttgaattggctaaaagtcagaggggttttcttcggtcgatgcctggaaatttcttttgggaattttttcgaattttgaaaaaaatgcttggacctggacctggttccatatttgaccagggcatgcattacaagggccaaaattcaagaaaattcaacaattttttcctgcttttccagttacaacgcgcgttatgtgtcgctgcatgtgcggaagagcaaccgcgcggcgttgaacctgtacgcgcacacgttgaaattcgacatttgcgacatggagcccaaatactatgcggacggcgaagacgcatacatgatgaagcgccgattg

SEQ ID NO: 81403 - DNA, 274 bp, Heterodera glycines
atgtccacatcactgaagcacagggattttgtgggtgaaccgatgggcgacaaggaaatcaccgctgtcgccggaatcggcccggtttatggcaaaaagttggaggacaaagtaaaaaaattcacggagttttcgggatcgttaatctcgaattttcaaccaattcaaatccctgaaaaagggtccatccctttttggattttttcgggtcccaaaaaagtaaaagtgcctccaattgttaatttttgtttttttttcagggtttcgacaaggc

SEQ ID NO: 81404 - DNA, 506 bp, Heterodera glycines
atgactaagcaaagtgttttcaacttgaataaaaatttctggcagaacgaagtggccaagaaatgtgctgcgaagcgacaggaggagtgccaaggagaccaaaagggtgacaaattaatgtgccgtcgaagcagtgaatggcacggcattcgagtgagcagaccgaaaagtgcgcgcaaagagtttctgctggaattatccattacaaacaaaaggtgtaattgaaaaataaaataatatattataaataaaatcaaattatccctccgaagttatccgtttgtgtgcggaaatgacttttctatcgttttcggcaaccggtcaaatttgttgacgcaattggtgaacgaaaaaggtgaattatattttcttaaccggaaaatcggtcagtgatacagtatttaaaaaataaaatttatggcatagcgtattgtagaataattggtcaaattgttggatggtttttgcgttagattggaatctaattctgttttagacgcaataaa

SEQ ID NO: 81405 - DNA, 2642 bp, Heterodera glycines
tttgcatgggtttgccctttcagtggggaatggccatttgcacaatcgatggccaacagttttctttgggcgattcgctggcaccgttctgttttcagtccgtctcaaaggtgacagagacttgtaaaaggcaattaacaaaatgacagtttaatcaaaagagaaatgcatgaaatgttgtcaattttcggcactttttccatttggtcgactcaatttgggcttaaattcaaaaataaaatgcgataaaccctcgaagagattccggcaaaatgaattatttcgccagaattagccgttattttctacgaccctcgagcttctatcattttgtaaggcgttcaattacgccatcgttgcctccgatttgggtgattatgtgcactctttcgtcggccacgaaccgtccggtcgattgttcaacgaaatttgtttggacccaaacggtaaaaaacggcatataattaatgaaaaattatgccaattttgtttggcatttattttgcccatttgccccaaggaaaaccgcacaatccaatgataaattcgggtgcaattattgtcacttcactgctgaaaaagggcgtcgcaatggccgaccgatacgattttgtgagagactttatattggtggtgatgatttggaacactttccattttaaaggctttcaaggagtacaaaaagcttgccgggggcggttacatcggttttaacaatgccacgtaaatattttttaattgttgaatatttttaaattaatgattaaattttaatttatttgtaatcaaatgccccaatttggcacaatttggaattgctgatcacttttgattgattgggcttttgccccactttttgattgcattcccttctccagctttttgtctgaaaagaagacggctgatcggaattacgctttgtcctattatatgaaggtcagtcggtgccgaccgatgctttaaattggtcataaattcgcattttggcacgcgaaacaaaacaatcaaaacatttttgcacaggagaacaaatgttttccgcccgactgcgcgacacttcgcgaggaattggacttttatttccaactttgctcattggagacgcactgcgaatcggccgccgttatggcggcgacaatggccaacggcggtgggtaaaaagaggggggggggcagtaaaagaggtgaaaagggggtgccatttgcatgaaaaatttggcaaaaatggagaactattggagcgattcttacagcaggacaaattaccgtaatcctctaattgaatccatttgccatcctaatactgtagccgtctcacatagatgcaggtgtttgtccgttgacggaagaacgctgcattcagagtcgaccttgtcgagacgtactttcactgatgtattcgtgtgggtaagaaaattagaaaaattgaaaattgttgcaaaaaccgacaaaatcaaatggcaaatttgcgcagaatgtacgactattcgggtcaattcgcatttgatgttggtctcccggccaagtcgggcgtgtccggcggaatggtcgttgtggtgcctaatttgatgggcatttgtctgttctcgccacggctcgacagaatgggcaattcgacgaggcacgcgaaaattggggaaattttaaatttatttttttaatattttattgttagaggcgtcttgttctgccagaagctgatcgacactttcaacttccataattacgattcgctgttgcacgccgactccaaaaagatcgatccccggcgacggctgggcaataccgagactgacttggtggaacagagcatttaaagctaattaacgaaaattgatcagggattttggggcttgactctgatcagcacagagcccgagacccgccccgactttctcttttttatccgatcacggattcctgaatttaaactgttttttcagattgtcaatttgctttacgcgtccaaaaacggtgatttggaaaccgtaagaaggtaaaactaatttattccttgtaattagacttcctctggcttttttgaccactttcccattcccattccccaggttgtatttgcagggcgtcaatttgaacatttgcgactacgacgggcgcacgcctttgcatttggccgcgtgtgagggccatgcgctgctgctgaagtttttgttgaacatcgcccgcgtcgactacacaattaaagtgggacggggatgaaatgccgagcagaaatgccaaagtctaatactgaaaaatcaaacatccaacctaattggaccataatccaataaaatgcaaaaacaaaaagttatggtccaaaaaatcgctggcgacgtttcggcctgtttattttgtcctcctccgatactattcgagaacgaattcatagcgaaagaatttaattttaaaaataattttctcctctaattttggtcttgcccagtctcgagttcctttctgggtttcggtctcgaaatggtcttttcctcctctgccgttcttcaaacggttcaatgcttctcattttgaggaccgctggggccgttcggcgttggacgacgcgcggacctttcaccgcaccacttgcgttgcgctgctgttaaagacggcacagcgacggcgccgctcatacgaacagc

SEQ ID NO: 81406 - DNA, 1343 bp, Heterodera glycines
atgttcgatgacctgagccgcaacatcgaagcgtttgaaaagtcaatggtaataaaaaatatgttgtagttcgattcgtggttgattaggaatgcatcaaattcaaaactcatacaaaaatttcggattttggcactttttgcattttctgcccgatttacgaactaaccaaagggcaaccttttaattatatttctttattagcgtatggttcaggttgttgcgtttgataagtggcacagcagcagcgaattggccgaacaacaggtcgattctctgagaaatgcggtggctaaactggagacttgtgacgctgatgctgttgcccgattgtctgcctcggtcgcgcgtttcgaaactggaaactttgcaaaattgaaggagtcaggtcagaggatcattcgtccactgagtcttgaacggaagcgacagattgaagtgaaggtaagcggaaattgatagcgttatgtgaggagtttatgtgttttgttgcataaattgacgttcctcagtttagctgcatttaggaaaatcgtaaatctgttttcaacttgtgttttccgttttagcaaagagcattaagtcttaatttaagactatttaaaaaaaagaaatttcaatcatatgaaccgctgtgaatctcaggtggccgcgatcgaacgagagctgtgctttaacaaatcctcaattcaacatcactccaaaaactctttgcaaatcattgacaaagaagttcttggggtgagggaatggatcgaagaaagagacgaagatgcagatctcattggcactttgttgaaacacggtgagaagaagcatattgacgagattgacgcactcatggcgcgttccaaggtcagctgggaagtggacggtcaccgattgatgtcaatgctaataaatttccggataaataagaaatttaatatctttttgggaatcaaaaattctgattgtttggtctgaaaatcttggcactaaatattaccgcctctaatgttgccaatttttttccaaaaatgatttggaaatggaaattgccgtcggtttcccgggtttaacataaaaataccaccagacacattgctatttgattatatttccatttttttcagaagaaccaggctcgagtcgcggagtatcataagaattggcagttgttcaatgaaaaggtcaaagagatagcgcatcaggcgaacgacgaagagaagggcgaagatatcgtgggccgtgttggggcttcggttgagcgactccgtcagttggaggagcgtttcaaaaaatttgtcgaagaattggagaaactgcgcaccacggcggcgaatgacgagacggagcagtaa

SEQ ID NO: 81407 - DNA, 615 bp, Heterodera glycines
atggccacgcgaaaacggccacgcgaaaacgtcctggcccgcccaaacgcgtgggtcccagttgacccatagtgagcattaagcataaaacaaaatgccaactatgtacataaattttaaaattttagtggagaataatttgctttgccaaattttttggattccttcaaatttggaaaagggttcggaattgattgaaagtattatccgcgaaaaattgttacatttcaagaaaaaaattatgaaaatttcgctcaatttggaaaattttaatgcagtttttgagtataattggaagcatataaacattaaaaaaaagtgctaaacagttaaatctaaaaaattaatgctcaaaatcctttatttttctcaaaaaaatattttaatcgacgatcaattcaccgaagatactttaattaaaacagtgcaagagcattgattggaaacgcgataacaaacgaatactcaattcacaaccatcttaatgtttgtccacgtgaaagaaaaaagatacaaaggaaaaaatggttccaccataaaaaggctatctaatttaagtctacccggccaaacattctcccaaaatttaaaatatttaaagatttttaatttcta

SEQ ID NO: 81408 - DNA, 695 bp, Heterodera glycines
ggacaagacgaacggctgaccatcgacgggcttctctgcttatgcgatggacaatggttgaacgcggacatcattgactgctatttggacctcatctgccgctgctcgccccgtgctcatttcatcccaacgtacgccattttgagctacgggcgcaagggcacagtgccgtcggaatggtactggcagctggccgagacggacaccattttcgcacctgcccatctctacaacaatcactgggccatggccattttggacatgagggagcggacgttgaggctgatggactccatgaaccacggatatacagacacggaaaaaaaagagtttatggagacaattatgtgagaccgatgactaaccattctcgagtttgtttatattcccttttcaggaatattctccgggacgtcgccatattacaaaaggtggacatcggtgacagaagcgcgtgggacgtgcaggagcggttgtcagtcccccagcagagaaacggaactgactgcggcatttttgcgctgcttttcgcacaatattcgctggagaggcgccaattggaattcggacagtgccatattccgtactttcgacgacggatatgccacgacataatctctgtgattctccatgatcaaaagtctccggttaacagaagcgacgaaactgtcgtacagtgcccatttgctttgtga

SEQ ID NO: 81409 - DNA, 1079 bp, Heterodera glycines
atggcacgactcagccacaatttgtccattgcactgctgcagagcggcagaacacagctgagcaaaaggaacaacaacgacggaccaagccaacggaccatcaaacacacaaagtaacgcaaaacgggggggggggtggttaaggacttgagaaagcgggaaggtcaacggcttgaggggggaacggtaaagccccttcttttaccgtatatgctctaattatagcccagtctctattaatcccgcagtctccaattatcccccagtctacgaggtgttttgaaaaataatccctctatcataatcccccagtctctaattatccccccttttctgaggaggttgaaaaataatcccccatgagctataatttgagcaatacggtattcccccaccccacccgaatttttttaaagaatatttcaagaccaatttcttttagtttaaagttgtttttgtttttgttttttctcaaatgtttatgatgaattacttagttttttcaaatttatccaaacaaaatcgctgtgaaaattttctaaaaatttttttgaaaaattcctaattgtggatagggcttgtctaaatcttctgtgtaatgttaagaaaactatcgtttcagggcgctgatcaaagaagtgcctgaagcgatattttgccgaagttttctcctctccaatggctcgctgaaaattgcttcttcaattctgaacgcaaaaaaggccgtttctgcttcttctgatgatgatccgtccttcatttcggagttcgttttgtgcggcgaggcgccgcgcctttgggcaaaagtgaaacaattggagggccaaaaacgctttttggaggcggcgcaacttttggacggtgtcgaagtggagaatttgcggttgatccatcaattcttggccaatcaaatgacagattccctcagacttctactggaccaagcccgtctctaccgaattgcgggaaacacaaaaaaggcgttgagctgttaccaacgagcgcacactttggactgcacaaatgccgaaggaatggacgcatttgcggcacttctcggcacagttagcgaaagttaa

SEQ ID NO: 81410 - DNA, 93 bp, Heterodera glycines
ggattatttttcaaaacacctcgtagactgggggataattggagactgcgggattaatagagactgggctataattagagcatatacggtaaa

SEQ ID NO: 81411 - DNA, 985 bp, Heterodera glycines
atggacacaacgacgataaatcggattctagcgggaaacacaaagaccagagaacactacttgggatgcttcccttgcgacaaactcccaaacataatcaacaagtacccttcaacattcgtggcgaataatgacccatcgaataaggaaggaacgcattggatagcaatgttcatcgttgacgataggaccgtctactattttgatagttttggtaggaaaccgaacagatgtatcagccagtttttacggaattatgaaaaagtgatttcgaataagccagctattcagtcagtgtttagtgagaattgcggctactattgcatttattttgttcattttatgtgctcatttggaggaagaaattatgagagtaattttgaaaaaatgagaaaaaagttgataggagaagataatccagatttgtttgtcgtgaattttgttaaaaaactgataaaaagtatttaaggaatttttcattaactcatttataaaaatggaccgtttagacacaataattgcttctcttctgaattgtcccgcacgtaacttgtgcgaccgcttaaatcacccggatgagatacaaaaagtagaaaaatacctcaaaggaaaaactctacagacaacatacaaaaatcaactagatgaatacaaagattttgagtacggtggaattacaaaagaatgtgcccgtaagcagatggcatacaatgggtttaaaaatgtgaccgtcgaccagcacttttatgtacggcaccgcatttgtcttcgctacgctaataacccatgtgtgatcgaaaaacacaagaatggcaatgaacgattctacccacttgaacttgtaagagtgaaggacaaaaacgatatttatttagggcaaaatttccctaaaccaataccttcaatttgtaatgataatgattttattgatgatcaaccttgttatcattggtgaatttcaatatttgaaattacataataatga

SEQ ID NO: 81412 - DNA, 717 bp, Heterodera glycines
attttaacatcatcagcatataatttaatattcactcctgatggtatgacatcaggaaggttttgggatgtttttgttcgtgaattatggccaattttttcgacaaacattcgctgtttgggctttttccgtggtgatcatttggacaatttgcttcgtcaaatttcaccgacaattctcactgatctcaacaaattgaattcaatcaattcctatgatttgttgcccgctgcgattggtgatgattttgatgtgccaaatgcaacaatttctgctggccaagcgttgtccaaatggttgcactctccgagaaaagatggccaacccaagcgattgcgttgcgtagattacaacaaacaaacgaacttcgattggatcaacaatttcaaggaggtgtggcccaacatttttgtgatttttgttttccaatcaaattgtttagcattttctccgtgccaatgccatttcttccgtcaattaccaaattcatttttctgttcatgtgccgtcaatgccaatggtgccatttgaattggtaaacgaatggacaaaggaaaagctgacattgaccaaagcaaatgaattggacaacatttggataatgaaacgatgcaaaattattggggagacagcggcggttgattggaaagacggaaattgggacaacaattgcaacaatgtgttcatttggctttcttatggcattaaatccattgg

SEQ ID NO: 81413 - DNA, 681 bp, Heterodera glycines
atgatggtgggcaacaatttgaaagacacgcaacttcagcaaatcgtcgataaaaccattcttttccatgacaaggacggggatgggaaaatatccttcgaggagttttgtgacgtgagttggggtgacgtgcaaaacggtcgttgttttctgagctttgcggtgttttaccgctttgattggtctgaccaaccgagccgactttggcctttctcctgacttacttttgcactttggccatttggtcaccgttttgtctctttctctttaccaaatcatccaattttacaggtagtggaggggacagaagttcacaaaaaaatgtaatactttttctgcttaatgctacgcaattcattttcacttttcagggtcctagaaaacatttgaaagaaatgtaatcctttaaattatttgtttccgttttgttttactaatttgttctcccctaatttattaacactccgtttttcctttgttttgttttccctccctttgtgtttgttttaaatgcttcgtcttttttccgtttcccgttaacatttccccattttcaggtcgttggtaatttggacgttcacgagaagatggtggtaaagccgtaaaaaaatgaattctccaaaaatgagctgaaaagtgttgtcagagtcaatttagctgtttttttaaaaatttaagaca

SEQ ID NO: 81414 - DNA, 727 bp, Heterodera glycines
atggccaaattaaagcgaaatataaaaagagaggcggtgaaacagcggtggcaaaagcaagaggagagaaaagcgcagacggccaaggcgatacaagctcgcctggccaagaaaagtgagttaagtgatttttaactcaaacatctttttttaatttcagacgctccacagccaaacctcgacgaacaaatgtcacaacaggacgaagcagggccgtcaaattctgctgcatccgccgaagaagcgatggagcctccgccaccaactccaggaccagtgccaacgccagaaatggacgaggaaattttggaatttggcttttcgctgccatcgacatctgtcacaccaatcggcgattgtctccaggtgatttggacggattggagacggcagtcgaccagttcaaggcatttctcgatcaacaaccaatggtgcaaacacttctttcaaaaaagacaaaggcccatttgctgcttcaccactttgttccatttgcgcgccaacaccgatttttggggcttttggatgagcaggatggggccatatcatttttgggggctcaattttaaatgttgtgatttttcaggagatgaggcactgcattccgtgtggtggcgacttgagcaactttggaaaacgatgccggacggtgtacaaatgcgccaacagctggagcatcatttcgtcccgaattggctgctggacaccgggagatttgacgaattga

SEQ ID NO: 81415 - DNA, 660 bp, Heterodera glycines
atgaagaaagtgatcaagaagctgacgtcgatgtcgttgactgatcgaggatttatggtttttattttcattacaagcggtagataaaatttttaaaaatttgaaacaattttaaaatcattttggtcatttttccttttatttattcattaaaatcatcaaaatacagctatacatgcaccgggaatcgaacctgggacccccattttggtgactttctcacagaccactgagacaggtatttaaatcttttttggtattggagctgatttctgggatggtggacagcaattttgaaacccggaaataccaaattttcaaaattctgtaatcaattttaatggcaccgcctgccgagaaaaagcaaaaacttttgtccgccgttgaaaatcagcagcaatcgtcgtcgtcgggttcttttgtatgccccctccctttttgaaaaaaaaaattcaaaattttttttctcggaaagactcatttaggggtttttagggtcggaatatcagattctgataactatttctacgcaattcgacccccaaatcttgattggaacaaaaaatcgaattttatggcagtggttactggcacggatagaattgagaaaaatccaaccaatcattataaagtacattgcagcaaaataaattagggcaa

SEQ ID NO: 81416 - DNA, 159 bp, Heterodera glycines
cgcggtgatgtgaacatttgctcgggcagttgccccttttttctttcgtcgacccgcgccaatcgaagggcgccgaaagtgaagcgaatgccaacggaaatgaaccagcggtggccgtgttcgcccaatgctgccgaatggtcgaagcacaaatggtca

SEQ ID NO: 81417 - DNA, 517 bp, Heterodera glycines
atgtgtgaggcttgcggccaaaaagcgattgctcccatccacacggtgtttgttcgtcttctgctacaggatgttgaacaagcagacattgctcaacgtgtcaccatgttttcgagtgttgctgaagagtttttgggaatgaaagctgccgaattgctagccaaggagaaggagccggaaagccttgcgaaacacttggacgatttgattgctgtgaatctgatcgcaaaagttaacattaaggttttttttgttgctatttattttgtatttgacaaaccacgccctaggcgaacaatcagacgtacactggatttgattggattgtcaaccttttcaagaagtgcccagggaatgatgacagtgatgtgccaaaagaaaaaaatgatgttgatgagattgcaaccaagaaggccaagaaaaattgatagagagagagagagagagaaaaatgattcatttgttgtgagctttaaaaaaaagattgagcatgtcctttactttttttttaaatcca

SEQ ID NO: 81418 - DNA, 938 bp, Heterodera glycines
  unsure (1)..(938): unsure at all n locations
atgttggacctggacctggattccatgttggacctggacctggatttacatgttggacctggacctggattccatgttggacctggacctggattccatgttggacctggacctggattccatgttggacctggacctggattccatgttggacctggacctggattccatgttggacctggacctggattccatgttggacctggacctggattccatgttggacctggacctggattccatgttggacctggacctggattccatgttggacctggacctggattccatgttggacctggacctggattccatgttggacctggacctggattccatgttggacctggacctggattccatgttggacctggacctggattccatgttggacctggacctggattccatgttggacctggacctggattccatgttggacctggacctggattccatgttggacctggacctggattccatgttggacctggacctggattccatgttggacctggacctggattccatgttggacctggacctggattccatgttggacctggacctggattccatgttggacctggacctggattccatgttggacctggacctggattccatgttggacctggacctggattccatgttggacctggacctggattccatgttggacctggacctggattccatgttggacctggacctggattccatgttggacctggacctggattccatgttggacctggacctggattccatgttggacctggacctggattccatgttggacctggacctggattccatgttggacctggacctggattccatgttggacctggacctggattccatgttggacctggacctggattccatgttggacctgnacctggatccatgttggacctggacctggattccat

SEQ ID NO: 81419 - DNA, 1262 bp, Heterodera glycines
atggaaggtgaacagcttgaaaatgatgaaaacgtttctccgagtcgcgtttcccccaccaatgcctttggtgttcaaaagagtggccatttgctgcacaattttgctgagcctggaccactgacgacaaaggttttgttgaccattgtgaaattcttttttgattgctttgctcattttcagatttattattacgtcgatgaccaacaaattccgttctccaccgaaattgccatccctccgtccaaaattacgctggcggacttcaaaaagtgtatcacgcgcaggaactaccgatattattgcaaagtgatggacccggcacttaacgcgtgagaagcgcaaagaagggaaacaaacccaaaaaaattaatcactcgtttattcagcgaggtgaagacggacattcgcgacgaaaacgccgtgctaaagccaaattcgaagaatggacgctttgaactgtttttgctgtccgagacacaacagacgcactcgtccgcctccactctccccatccaaaagctacaggttttgtcattttacgaataaaagatttaaattgaagcaataaccactttagcatgtcgatgccatccgtgcctctctcatggaaaaacggacaacggccaataattacattcttgacgggaggccaaaattcattgatgacagtcagtaaaactgattatttttgataaacttcactcctatttttgtaggcagtagcagccccgaggaagacagcaccaatttgcgtttgtttggcgagtcaaattttgagggcattacggggagcatcgacgacagcgactctcagtcagtgcaaatgattccaaatagcatgctgtttataaatgcctctcgttttgcaggtacaccaccgactttacgagtgtttctcagcagaatccacacgtgccgaagcgcaaatttgccatggcggagcgatggtgcggggaaagttgtgacgatggcaaacatgggcatggccaacaacaacaaagccaccgccatcgtctcgcctttgtgagtacgaacaaacgctacgacagcaacaacaaaccgtgttggacgcgcgagaagcggacgcgccgcaggtcattcacggcactttccagcacattcgaggacaccacggaagcatcaatgtccttggaaatgatcacggtgaaaagcctctgccttacatgatttacaagggaacattccaaactgtcactgctcagatcgctttaaaaccacttttatcgtgtagagcatag

SEQ ID NO: 81420 - DNA, 253 bp, Heterodera glycines
cggggaacaattgccaaggacgaatctgtcgaaatccatgttttgaaagacaaggaaaacatttgtgccaattcggacttgcgcttgccgtccaaacgcaaatacaacgaacaattggaggagagcgatgggtgtttgatgtgttccggttgatggattgtttttccatttatttgattgtatttttgggcatttttttatttggctttaaccattggttttcgttaacatatgataaattgatattttgctt

SEQ ID NO: 81421 - DNA, 678 bp, Heterodera glycines
atgtgttcagcagcacaaaagtttgaacagcacattcaatacgcggacatttggtatttaacgtttcaattcaaagacagcgaagagccggtaaaaaataaatgaacaaaaaacaaaaaaacaaattgagaattattctttttaggttgtggtggaaataaccgacccaggcacagtgagaaaagaaaattggagaaaaaattaattattttaaaaggagaaaacgggcgaacgccaaatggccatccaacaaaagtgggaaatgagggcaattaattaactaattggttgactgactctgagcaattgaaatacagatcagacgcgatcattctctgctactccgctttcaatcccggctcatttctcgccttggagtccgtcacagaggactttcaaacattcaatggaaaaccggtgaatggggggagacgaaaagccaaggcatttgctaattcataaattgggcatcagcccgccactctgctgctgtgcaacgaggaccaattggcggaggagggcttcgaggacggacacgaaacggacactgctgacgacggatacggcaccaactcgggcggagggtcgccgtcggacagagaaatgccaccacagacagtgccgaaaaggaggagcacaacgccaacggggagacagcattcgatggagcgaatccga

SEQ ID NO: 81422 - DNA, 572 bp, Heterodera glycines
agaaaaaggatgagaaaagaggaaaagaagagaaagtgaaagaaacggagaagccgaaagaagaaaagaaaaagacaaaagaagtgaaggaagaggacgagaaaaagaaagagagcaaaacggtacaatgtaaaaaaaataataattgaaattaaaaaaacaaaaattaaggcaaaaaagaaagaaaacaaaggagaagcggaagagagaaaagtagatgaagaggaagaagagggggaggaagacgaagaggaagaagaagacgaagaggaagaagagggggaggaaacagtgagagaataatattatttaaatttaatcttttattatggattaattatatgctgaatatcaggagattgatgacgaggaagacaaggaaaacattgaggatgaagctgaaattgatgaagaggaggaggaagagccacgcaaaaagaaacggcggaaggggcggagaaagaaaaaggtggaaattgacaatttaaaatggaaagggacaaacgggcaaaaatcgacttttggcacttagaactgatcagtttccagagcaaagttggaaaacgaataaa

SEQ ID NO: 81423 - DNA, 996 bp, Heterodera glycines
atggacgggcactcgtactctaaccgagcagagcaggacattatccttgactacgtcaaaagggtatgcactgaattgcatgtcaaaccatcagaaatcggagtcgtcacaccctacaactaccaagtgagtgtgaattattctaccccaatcgtcgtttaaatttgtaaaagtgccatcatttcagtacttttggttcacttttaggtccgtcggctgcggcataaactcagcaccgaacacaagggagtgactgtggacaccgtggagcgttaccagggttcccagcgtcgggtgatcattgtcagcactgttcggaacaacgaaaaggaggcgatcggatttctgatgtcggacaaggtgtttacaaattctaaaagctggtgttaatttcaaaacttagcgtttcaacacaataatcactcgtgcggaagagcttttgatcatcgtcggaaatgccaaagtgatgatgagggattcgtcttggaaggagttcgtgttgaaatatcattttccctaacaataaattatttttttattcttttacaggatgatcgactattgccgcaaaaacggtgccacagttgacatgccgtctgaagcggagcttttcccatcgggccaatttcaaaatggttttgaatgttgtaaatatgtgtcattattaaattgttttcctttaaagatgtgctgacggacagtgacaagagcagcagcagtagcagcagcgaagttgatgagaaggagcgaactgacgaacttgtgaagaagggcacgtcgagtgccgccgctgctgaacaacagaatctcagggccaaggcatcttccgccgaggaagaggatgaagacgattcgagtgttgctggggagacaacgacggaagacgatgacgaggaggaagacgacgaggatgaggacgactttgacgaatcctcttcctctggagatggggacgaatttttgacggacacagacgaggaggaggagcagcactga

SEQ ID NO: 81424 - DNA, 315 bp, Heterodera glycines
atggttgactatttcaagaagattggcattagttcctcgctgatcgaacgctacgagtccaacccgaattacaaagatgacccgtaagtagactttaaacacatttttgtcactcaaatatttggtttttatttctctttcaggcgtattgttaccatgctgcgcgccaattaccgttcccatgccagcatcatcgatgtgccgtctcgtcttttctacgccaaccaaatgtacgtccccgaggatgcgcaaccgcgagacccactcgccacgtggaaggcattaccgaagcaggtcgtctcagtacttgtttaa

SEQ ID NO: 81425 - DNA, 1669 bp, Heterodera glycines
atgggatcacgccgaactgttcacggagggttggaaattattcctttgccgcggttggtttgtccataattcttaaattattagtccgatatttttccctttcaattattgtttaatcaaaatttcccttgcaaattaataaaaaaaacgtataaaaacaatggtaaatccttgattcttattaaaataacccagaaatttggtcgttttaatttttcttcaaatcaagcgttccctggtccgacgctgaccatggactcatccactcgcgcttcaatgcgaatcgcgttgcagctcatctcatggatgaagcaaatgcaagttttgtctggtctacaatgttttgcttgtttttacttgaggagaactctctaaattaagacaatcataatttaatttttgcaggaaattctcgagtatctcaaccagaaggaaccgcccggactgcttgcatatgccaagaaacagaaggcttacaatcgcttgttgatgcttaacgaccaggtaaataacaattacttacaatttaaagatttttcattattctatttctgcgcaattaacaccaattttgcagattaccagcgaggataacaagacgggaccgcacacggtgaagctgtgctcgcgttcgcgcaccggcgcctccgtttacggcgttcagctgagcattgactactgcgagcggaacagcaatgacatcaaagcgtccccggtgatcattctggagccatacgaacagcagcagtcgcgtcagaatatgcaatactatgacccatattacaaggtcaacagcaacagggcactttattttggaagttattaaccaataaacaatttgtttatttttaggggcgtgtgatttccactgacgagaagaagcagaccatccattttctgccattctttcgaacgatgccggaagggaatgtgagttattaacatttgatgttcattcaatttactcattactttttcagtacatggttcgctttttgccgtcccaattcgtctacaactcgagaaatcatattatgaacgagctgcaggacaaccagcggccctacagattcttgatcttcccgcctccggtggacgaaaaggtagttttcttatcaacctgaataaaatgttcatttaactcggatacaaattaacccaattctttcagctcaccgttgaacagtatgtggagttgcgcgatttggctatttcaaaatgtcaatttatgtcggatcgcttcaataccgaacagcgacaggcaattgttgtgagttcaaataacaatcgtttaggatatggtcaaattgtttatcatttagtaaaaaaatgtttattaaggcaattgccaatgcgatagaattccgcatcagtagcgagaacgacaacattctcccgttcgttttgcatggacctccaggtgagaaagggaggggcaaacaaacacacgatttgatatatgaaatgaataattacctcttcccaatgcgttaggtaccgggaagacaacgactctggtggaggcgtgtcgtttgatggtgacgcaatttgacactggcagaattctcgtctgtactccttccaacacggctgccgacttgtttgctcacgaattgatccatgtggcaggaattgacacgagcaaagtgtttcggtcagttttaataaa

SEQ ID NO: 81426 - DNA, 2167 bp, Heterodera glycines
atggcgtccaagcaccaaatgattgcgacgccgatggaatatatgtacaatttggatgccgacaaagtgttagagcgatttggaaagtatggaaagtatcaggtaggtacatggaatttcggtgaatattaattttaaaattgaaaacgagaaaatattgttttaatcgggtttctttctttttttgtatcacttttccaagttccaattctgttatttgtaaattcgatctctgatttttttcagatgatcgtctatctgatggctgcactgaacttcttcatcttctcttacaaaaccacagtgatttcactgatagctgagccccaaccgaactgcactttacacgcaaatgttgtgcatttttttaatttctgaactgttaaaaattcattttgatttttatacttttaaaatgcaaatttctctaccatttaaggattcttcactttcgctcaatgattctcgtcactacgtaacattagcaactgattttggcattggctgtgaggacaaacatttgctggagcatgccaacggtgcttttatgctcggtaaatgccaaatcggcaaagtgattattttgtttaaatcattaacacgattttttccttttcgcaatttctctttttccggtttccattttctcattttattttaaaattccattgttttctgccccttctctctttgccaggtaactttctgttcaccgctttggccacttattcggccgaccgtttcggccgtcgtcccattttccttctctccctttggtccatcgtcgttctgagcgtcgcctgtgcctttgccccttcctacgaatggtttctgttcttccgcttcttttccggcgcttttggagctgtaatttttgaaatttgtcttactaaaaccagagttttgcaaaaatgttgacaaaaaaactgacaatttaaaaaattgaaaaataaatttatttgtgtgttcgatgttttcagtccatcactgtggttggctttgtgctcaccgtggaaagtgtcgccgcgtcttttcgctctgtccaagtcaatcattttttttttaatttattcatttttaaatttacatttatttgtcaggttttggtcaattcgctgatttgggtggccggcattctctcagttggcgttttgcaccttttcattttcaattggcgccttttgtacctttgcgtagtcgcgcccggactcttttccgtcgtttatttttggcttttcccgggtcaatttccattcattccatccaattttatgcaaattcttacttttttcagagtcaatccattggttaatagcaaatggaaaaacaaagggagtgaaacggtgggcatttttaaattattttttcaaaaattatacggtaatttattggcgaaatgtctctcttctgttacagttatatcagtcgtgcttcacgtgtcaacaacgtgactttgaacctgcactcgtgccaatcggacattgtggcgccggaccaaacgccgccccatccgtcgaatgcgccccgggcgaaacgcaactttttggatctcttccgaatgccgacactgctgctccatttgtcgctgaactgctacattttgtcagtaatttggcaacccattcatatgatttatattatttttatttgtgtcaaaattggaccaaattttggaattttctctgccttttcagcattgtgttgaactttgtctattgggtactcacgctatacagtgtgaagttgcacgagcagagaatgatcggatttttcctctccgcggtggtcgaagtgcccgcgggcattttggccatgcttttgcttttctgttgtggccgagtgagtggcgctgttgatgagatgatctacaataaatcaattaatttgtttgaatttcagcgaactgtcaccgtcgtggcactgtttggtcaaacggtgtctttgggtctgaccattttggtgccacgtctgttaatcgcacattttttatttatttttactaatttcccaatttttagaaggtagcacctcgaatttgctgctttctctggtcgccaaagtgttcaacggtgtttcttgggcttccgagccgttgctgcttagtgaaatggcacccacaacagtgcgcaacatggtacggttgttgttgttgttgttgttgttttag

SEQ ID NO: 81427 - DNA, 426 bp, Heterodera glycines
atgcaaaagattgtggtcaccgccatgtccgtgctggccattctgttcgcgttggtcgcgcccgagacgagcggtcgcgctctgccgcaggacttggcggactttgacgggggtccatgcgtcgcttttctgtgccgcacactgaaacggtggcgcagtgggggcgacacgaaaaaacggaggagaaaaagcaacgcgctggtggaggaggggagcagcggcgaacggacagcgctggccgaagaggcggcggcggaggacggaggtgacgaagacggagcagtaccagcagcagaacaacggcaaaggcagcagacaaacagcaacaacaatgacgacaatgccagccgaacggggcaagcgattgttggggatgaagccgtcgtcgtagacaacaaccgcacacccaaccgaaaatggtaccaa

SEQ ID NO: 81428 - DNA, 2350 bp, Heterodera glycines
gggaaaattgcaaagaaggggggcggaaccggaggaccaaagaaaaattaaaattaaaacaaaagatgtgaaaatgcaaattaaaattagcatttttgaggaaggcgatcaaagcttttcaatccttcgcccatttgggtgccaatttcagacaaaaaataaataataattttttatttcatcccgcacatagccagagacgggcaaattggacatcaaaactaagaaaaagatggcacagccgaggtgcggcatgcaagacgcacaaatgattgtggggccaggaggtgatcagaagtgatcggagacaattttaggaagggaatcaatcagtcaataattaatgattgatgagtagcgacgcactaatcggaattattttttggttgtttttcaggcggtccaaaatggaacaagaatttggtaaccttcaaaatcaacaatttctccccacaacttcctcagtcgcggatcaggcaaatgcaatgggcatttaattgataaatcattcccactaaaatgaaattaaaatatttaatttaaaaaaccacgaaatatttaaattaaattttgaagggatgccatcaaacgtgcctatgacacttggtctcaagtgattccagtgcgttttcaggtgaatatttttttaactgacaaatgaaggcataattttaatttttttaatttgaaattaaatttgcccaggagacacaaggccaagccgacattaatgtgcagttcgccgcgcgaagtcacggcgacccgtggccattcgacggacgaagtgagaaaagcgcacacagacaatgatgttgctttcttccgatcagtgatcggcggtcatttctctgtcgtttcacgaatatattttaaatgcgcaaaaattgaggcggcgttttggcacatgccacaatgccaacggatgggaagttgcactttgacgatgatgaacgatgggcgctggggccggaggatgcgcggaaaattgccaagttgtattatgaatcaaacaacgaattcattagtatttaattacataaccaccatttccactaattaccccctaaagcggttacaccgatttgttccctgtggcggtgcacgaaattgggcacacattgggcctggagcactccaaagtggagaacgcgatcatggccccgttctaccaggagtcggtggacgacaacggcaattacattccgcaaacgctgaagtcggacgacatcagacgcatccaagccatttacggagggtcgggcggcgggggacgaacgccgtcgtccgcggcggggaccagtggcggcagaaggccaacgacgacgacgggcggcggaagcacgggcagcggctcgttcggaagtggcggttggggaagcgggagcagtttcggcggattcggaagcagcggcaggggcagcagctttggaggcagtggtgggtagatcccggcgggattttgcgggatcccattccgcaatcctgcattttttggaaaatacctgattaatcccgcgggatcccgtcccgaaaaattttgagttacaatcccgcagcgggatccgcaaatccgaaatttccgggctttattggtgggcttttttggcattttgccaccggcggatgataacccggtcaaagtccaatatgtgaggcgggtggtgactgatcaacggaactgtccgactaatccccacttccacggaatgaaatgttccgcggatgcatttccctgtcccttccttcgacagcaggtggaagtcggagccgtttcggcaccagtgacgacgactggggcggtttgttcggcagcgggggacgatcgcggacaacgtcgtggcagtcgccggacggacggacgcgcagccgcgtaaccgccagtggcacggattggccctcctcgcgcttgggcagctcttcctcctcacgcggccacaaaagcggcggcgggggcttcagcttggacagtctcttcagcaaatggatgggccgtcgttgaacagcagcagacagaacaacccatttgaacaatgaatgatcaatgaaacgccatttttgtagttttaacataaaaacaagtccaagtcattttggagaaaataaacaagaaataaaagtgggataataatataaggagttgcaaaaaaccaagtgtgtttaattaataggaacgacccaagctattggaggagataaacagtcgacgaatatgcaactatatatatttttttattcaatttgatatgcaataaaaagtggttataatttaattagtcaaaaaatcaaagttttgcctcacaaccacacagcgaaaggaaaatgatcacaattaaatgggatgggggggggg

SEQ ID NO: 81429 - DNA, 1569 bp, Heterodera glycines
atggcaaaatcgtatcgaataaccaaaaatggtgcgatgggaaggaatggaggagagaaagttgtcaatggattggttggtcgggggactataattaggactaattagttcaatttagtttgaacaaaattcgaagaccaagatggtctggtgtgggtaacattttgacacgaaagcgtacttgaaacttatgatttaaacccaggaattgataaaccttttttaaaggcgcctccttgaaaaatttatgcaaaatttgttcaatcgatagtatagaattaaaaaaatggactattttgtgccaaaacttaatcctccctaatttgtccgtatcgccatgtattcaaaccaaatgacattattacacaatttaggcaaataattaatcatttcgaattcgcctgggataaccattaaatttgttaacacatttcagcagcagcacagagagaagaagatcagtgttttgcacgcgcatgttgatgagcaacataataatgaggggaatggtggaccaacagcaaacgaacaaaacatgggaatggtaatgggcgaacggttggacgggtcgcacgagcacaacggcggccgggacggcactctgccgacaccgaaaaatgatgattggtctgtctcatttgtcagtcgacccccgggtttttgccaatttccaaattccccaccccaacctcaccataggcatgagcctcatcagttagctagggaccgcaaaaatcagagtttctcgcctcgagaattttccgagactcgcttctaaaaccagctgcgcatttgtcaaatgccgcggttaccctcatgtgatttttatcggaaaaatatggaaatttctcggtgaaaatcttcaaaattcatctagctttcctcttttacaataagactccttaacgagttcgtcccatattcttgccgtttcagtgcttttgttgccaccccattgctgcagcaaaggcggcgtatgccgacgacaccttccgccaccacttcaaacaacaacaacttgtactgctccaaattgtcggcaccgccgcttgctcccatgaataatacgtcatctcctccgacaaatgatcagcaaaatggcacttatgagagggtaaatgagaggggcgaatgtgagggagtatggggtccctgaaaaaatggggttctggtttattaggaacaataatcggttgtttaagtaaaattaatgatttttcataatttaatgacaatcaaattatcggatactcacttttctatcattcatttaatgctgattatatccagcagcaaatgtcatgtaaatgtttcagcagaaaccaccgacaattcgtgtgcaaatggccaacggtgccaatgcgtctttgcctggcgctgctgatcactcgggcgatgccaaaccgttggcatgtcgccaaaaacaaagccaacggcaaaacgatcagccaaatcggtggccgagtgccccaatcgcaccaaaagacgagctttgaacagatgaaaaatataaaaaacatttatttgaccatctattgccaaagggaataatttccaaaatcaaataaa

SEQ ID NO: 81430 - DNA, 369 bp, Heterodera glycines
atgaacggacctgaagagttcgcgattgtcgagcaggtcgatgaagcggagaatggtcggaccgtcgaccaacaaacaatggcgaaactgcgcacttttgcaaaacgctgcattttcctccaattggatcggcttcatttgtccctcataatggcaatgtctgcacgcgctcactccgcaggggatgtcgttgcgcaagtaaagttcgtgaacgcgctaaaaggattgactttaccaaagtattataagaaaattggcgtggcatttttatgacttggtcccggagttttgaaactgaaccgggacagaaacagcaaaaagccagttttccgtgaccccggtttcggtcccaaatttagcttgggatta

SEQ ID NO: 81431 - DNA, 680 bp, Heterodera glycines
gttcaacacgaaaatctgcaccaaatttgcgattttttgggataccgaaagagcccggactcaaacgtattcagtggttttatgttcttggtgacagagaaattgggcccaaagaccgggtgtcgaaaagcgtttccatttggtaatttttgataaacaaatcaatttaggtctgtgcaatacatttccgcttgggaaaaccaaacagcgatccatcgcacgaaggtgggccatttgtgggtccaataaatatgtcttactccccgctatttaaaaaaaccgaatccctcgtggtgacaaaacaaaacaatttaaagaaatgatcgagttcagatttcgttccccatttgaatttgaacaatgactctcccgagtacatggattatcttgaatcattggacgattgcaaaagaccgatgggcacagagaatcgaagacgcccgataaagccactgattttgaagaagaaaagcaaaagcggacagcaacaggaagtaaatgaggaaattattcgttttcacaatggtcaggaaaatgaactatgttttcagtcccaatcagcctgtgccgcgccaaagcttttgccaattccaaaatcagtcgcagaatcagtcgatttgagagagggacaacccgtacttatcagacgatacaaaaaggaaagacgacaacaaaattga

SEQ ID NO: 81432 - DNA, 286 bp, Heterodera glycines
atggcgcacccagccggagatgtggtgagcgattggtgcttttcattttctttttctatgtcatttcattttttcaatttttcagaccgacgcccaagtgctggagatgtcttccgaccaaattgacgaacgcgtacgacagctcgacgaagaaattcgcgtcatgagggacgaaatgcgcaaaattgcgtacaacatcaaaacaatgggaacgaagacgaaggagaacaacaaacagatgcagaaagtgagcaaacaaacaaaaggaggaacgacaaatttatga

SEQ ID NO: 81433 - DNA, 385 bp, Heterodera glycines
atggaattaaatgacagccaaaacagcaacggaatgccaagggaaaagcatgttgatctggtggattttaaagtgaaagaatttaagcttgaagtaattttttgagaataattgagtcaagcaaatatcataattttccacagacatttttctcaatgcacctggaagtaatgggaaagtacgacacgagggccggtacattgcgggactgtgattaaaattgaaaattttggccttgatgttgtaattttgaaaattttgagatagaaaccctgatctaactcagagtttcgatctcagttttgaaaatcctcatttcagccataaaaaatgatcatttgccactaaaatgctcgaactaaaaaattcgatttctattgtttta

SEQ ID NO: 81434 - DNA, 574 bp, Heterodera glycines
ttatttacgcgaccaaagctcgccgtgcgttggcggcggaagcggccacggcgttggacgacggcacggaggagcccatcgatgccaccgaaatcttcgaacacatccgcgacattaacgaccccgagcatccgtacacgttggaacagctgaacgtcgtccaagtggggaaggggcacagttagaaattccgtgttttttttttgacttaattttaggatttttgggaaaatttttggaaaattagtaaattattataaaattcgaaaaaaatattaaaatttattcggggcgaacgacacgatattggagagggggaacgaactgctcccgttttttcggcttggtattaacacggccgtttagtccccgcattttttgaaatttatatccatttccattgaaaccaattgccccccccctttacttttcctctgttctccaggaggaactgatccaagtcagcgccgacccgaccgaccctttcgtcgacgtgcgctttactccgactattccgcactgttccatggcggcactgattggactggccatctacgcaaagttgagacggagg

SEQ ID NO: 81435 - DNA, 2916 bp, Heterodera glycines
atgaatttggaatcgggaccattgaggattcacgagaatggaagcatggaactgatcgaagcactgaactttgaacagagcgccgaatggattcaatcggtacaaattgacggaacgcataaaagtgagaaatattaaaaaatttagttaaaataatttctttattatcaagaccctttattatatgtatctttttgtggagagaataagcaaatcgaagttacttttgggaagggctcttaattagggacgaaatgaaagagaaaagatgcaattaggagaattattatagaaaaagttaagaaagggaaaaaagaggagctcaaaacgggggggggggtaaatttatggaaaagtcaggaattaagtttttaataaattattttagcacgccttcagaccattcgaattgacgtgttggatgtcgatgaaccggcagtctttataaatcgcccccggccttttctcgctgtcgtccctcccctggaaattctcccccggggcttccaagtgtttcgtttggaggccaaagacgaaaatggggaaggaagtgccgaaaaagtgactttcagactgatcaacacggagcgtaagaccaaatcgaaggcctcatttgatgagtatgccaaacattcagcaccgaattcatttactgtggacggattgagcggcgcaattcgcacagcactcacaaaatattcgcctgggggcacttacaaagttttcgtggaggcaatggacaacggaggggctgaacaaagggtaggtaaatggtggccatttatgctgtggcataatctgagagtgccttttgctaagagtcccaccggcgggcgttcctccgaaattgccgtcgtcgaagtgttcgccggggatcgtcctccccaatttctgcgtcaaaagtacgctgcgtcggtggctgaatcggtggacactgggcaaagtgtgcttcaactggagaccttctcattcccaccaattagcgaaaatgggacaccaaaagtacagaagtgccggaattcgttaactaattggatcatttagggcccaattaaatacagtcttttcgagaagggatcgaatggtgcaaaattcagccgggagacttcggattttttcggtatccacgaaagaagcggactgatttatttgaagaagcgattggacttcgatgacaaaacccagccaaggcttttttatctcttcggtctgtcggcaaaatcaaatccgaaaagcatttaaattttgaaggggttgccgaagaggacggaaaagagtcatccgttcccgtggaactttctgtcgtcgatgtgaatgacaacgccccccaatttgtccaacccgatttaatcctcttcaattcgcgaggacattcccacggggcacactatgcataagggtaatggccagagggatgctgtctcagcattttggccaccaatttccagtcgatgcaatcgacgccgactcgggactgaactcggcacttctctttgccgtcgatcacccacaattcatggtcaacggacggggcgaattgcaaagaaagccgggcactaaaccattggatgctgatcaggtgatgaagcaattagcgactctaattgacgacttccgagttcagttgcgacagggccactttctgtaccgcttcaacgtgtccgtgtccgaccagggcattcctccgctcatttcctccgctattgttcacattcaaacggaaaacgttaacgatgaagcgcctgaatttgttcctactgcgcaatatatggcgacagttaatggccaaattaaatttaaatgaaaaaaaagaatttcaggtggcagaagacgccctcgggggaacgccggtagtgcaagtgcaagcgatagacccggacagggaccaagtgaactacgcatttgtggacgaggaaggagacgaaactgtggtcaatggactgtttgaaattgaccctgacacaggttggacaaagcaaagaacggacgaaccaaccgcaaaacgatcgcctttctttttgaggactgattcggctccatctctccgttcggaatgatcagctcctttccttggactcgcccttaaatttgactgtcattgctcgagatgatggctcttgctgttctcatcggcggaagggactcgccgttcgtcacacgacaaaagcgacggtcagtgaacagacggacaaagaccgagctaattaccataataaagtaaacacgaacaaagatgattgtgccatttgtgtgaaggttcttgttggggtgctcgacttgaacaacaataagcccgagttccctcactgtgccgattattctcggatggcaatggtcgaagagggccaataccgcgtcaatgcctcgccgatccttcgtgtggaggccatcgaccacgacttgggtcgcaatgggcacgtgtcgtattctctttactacgcacgcagcgagtcgcggaagccctttctgatcgactcggacagtggcgaactccgaccttcgccttattttgtttttgatcgcgagcaaaaagtcgtcgaggaggtgaccatcaaagcgacggacaaaggcgaccgaccgttgatcggcttctgccagttcaaagtgcaggtgatcgacgtgaatgacaatgcgcccgctttcgacaagtcaatttatgagacttctatgggaagggcggcacgggtcggcaccgctgtgctgacagcggtggcggaagaccgggacgggccgcgcaacgctcacatcagctacgccttggcaccggacgagacctcgtccgcggaacacttcgaagactttcagtcgttcacccttcccgacccggaaattggcgagattatgctggccaaaaaggtgccaccagagaacgacagacttctcttctcaatcatcgcaacggacaacggatttccg

SEQ ID NO: 81436 - DNA, 634 bp, Heterodera glycines
atgtgccgtctccagcgggacttttcgttacacagaatagttcaagacaggtactgttcaattaatgatagacaatacagcgaatgaattgttaagatcgttaaaagggcacgacatgaagtcaatgcaccacctgtggttcctaaaagcgttgaccaactgattgtatcaggacagctgtcatcgcattagatacggagctggggaatgacgttgcacttcgtccgctcattgactggttaaactgattatttttgaaaaaacgacaatttgtgcaatttttaggttgctcaacaattacatcggacaaccaaggccaaatggaacttggtcacagccaacattcccaccagaacagtggaacgtctacactcgcacattgaatggggaagcgaggacaaacaaccacgcagaggcagaacatcaccgtcttcaaggcgccttcaattgccgtcatccatcgatctggcacttcattgacgttctccgccgtgagcagaagggcaccgatgggaagtatgcgtcatttgttgctggactcgaaccgccgcagaaagcgccaaaataccaagcgccagaacaagcgcctcttcaatttggtgcaaaattacattccagtgaacccgaacaatga

SEQ ID NO: 81437 - DNA, 839 bp, Heterodera glycines
atgcaaatcaaaattgaagaggcggaagtgactgcgcttaaaacagggccaaagatggccgccaaattggagggacagctgaaagcggtggaaaacgaattggagggcgagcagcgaaggcaggcggacgcctccaaaagtttggccaaagcggagagacgcgcgcgggagctccaatttcaggcgggaaacagaagagtgaaattaaattgagcaattagaaacggatgatgattgatttaaggcaattatgaaaaactgtcaaggattttccttgagaaaattgaaattccgcagtttcccaaaaaataaaaattgtcccttttaggcagaagaggagcgcaaaaactacgaaaagttgtgtgacttggctgaaaagctgcaggtgaaaattcgagcgcagaagaaactgttggacgatacggtacgtaccgtaatcgaaaagggtttttcgaagtgaatgttttattcaggaagaacacgcgaatatttccctgcaaaaatatcgacaatttcaaatctctgtggacaacgcggaggagcgtgcaaataccgcggagtcatcattggcacgcatgcgttcccggtcgagactggccgtgcccagcggcagcggaccgttggccaagtcggagacatttgctctgtgatcaaaggggccgagtgtggtcgaacttgatctaatcaatcgataccatcgagcttaatctaatcaatcaataccaatcattatcgatcgattactaatcattaggactgattttgattcaaaattaattaatttttgctagtaaaatttttttaaatgcaaatgtattagtttaaaattaatacaaaga

SEQ ID NO: 81438 - DNA, 57 bp, Heterodera glycines; identical to SEQ ID NO: 56798

SEQ ID NO: 81439 - DNA, 650 bp, Heterodera glycines
atggggcagaggccgaatgtgcgcgacgcggcaccgagaggaacatgggaaagcattgcgcaaatgcttgggcccaacgatgcaattaattcggtgatttttatttattttattttttatttaaattttaaattggatttgcattctcttcctattttttgttcagtttctctttgatggatgtcaacgaatttggtcttgctgcaagttcttctctgcttacatgcgaagagattgccgaagtttttctccatcttacggtatttgccaaatgctttttcaaaaaggcatttttcattcgaatttccctttaggtccgtcctcgtccccaatgtcgtttttcggcacgcggtttccgtgccaattcgcgctcaaaacatattgtgcaggtgaaaagacatttgccaataaattcgctttatcattaaaattaaatatgaataaatctcaaattgtttctccaatttcagcgcttttccgccctctcctccaagcgatgcacgcgccgtgagaacaaaatttgctttaccgccgatcgggacgttctgatcagcggagtggcgatttatggcgccaatcagtcgggcagtcggatgatcaccgacgatagcacggcaaagacaaattgggaacataaaatagccataaag

SEQ ID NO: 81440 - DNA, 2105 bp, Heterodera glycines
  unsure (1)..(2105): unsure at all n locations
atggatcttcgtgctgctccaaaagagaacggcacctcctcaaatgggggtgggcaataaatatttgaaaattgaaaacgaaacccaattaatgtattggctaattaatgaaggttcctcctcctcggcttcacatatcggtgccaatgtgtcaaccaccggtgcncaattttcttcttcggccccgtcgacatttaacagttttcaacagttttcgttggacgagcccacttcgccacgtcggaccaacaacagatcgccattgactgatcaacaccgtattcttttttgtgtttttgtcaatgaattaaatggatttgctggtaaacaaatgataaaattcataatttaaatttcagccttttttaaatccgccgatgacgccgaaggaatttccactgaagggaattctcatgccgaagtgtcactgacgagtcgactgaatgccttccgtctgaaagacgtcggttgtgacgttgcgtttgtggttggagaggaaaaagaggtaaaaacacaaaattaattatttattttatttcttgaaaatattggaaaatacgagaatggaaactatcaattgttcagcaattaaaagcgcacaaattggtgttgggtgccagttctgccgttttcttcgccatgttttacggtcctttgggctcttccttcgttggcactgccatcccgcaaattgcgtacgaagtgccacaaattgtgcatgaatcgaccacaacaacagcagcgggacaccaaaaggcagcacaggtaagaaaattagaaaaaaggaaataaaaaagcataatattttaaataatttataattttatttgacagccgacggatgagggggaagaatattacgaggaggaatatgaggaggacgagtacgaagagggcgaggagagggaggaggaggccgagaacatcagcggggacgggtcctgctccaattcgttggcctcgtcgctggagggcgaccatctgctgcgcggtatgatcgaaaaaaacggaaaatggccgctcagatataggcgaacgaggaccaattccggaagatttgaagccaattttgaacatatttaatgagaaattgcttatcgtcgtgaaaaacattttgcatttaatttccaaattaatttaaatttaatacatttaaatatgtttttaaatgcggtattattttgccaattccgcgccttttagagcccccaaaagtgttcactacgcctcaccatcctccacctccccccgccgccgttcactcgcatcaccagcagcagcgtcagcctcagtttccttttgatgggaaacggcacttttccaacggtttccatggccatgccaaattgggacacaaaacggtgcaggcgatcggcgacagtcagcagctggcggccgagttggccaagcaggggctgcaagtgatctgtgcacccgactgcgagccgaaggcatttgccattttggtaatggaaggcattttaattaattttaaattaataattttgtcattttaaataatcccccccccattttcgcctttctcagattgactttgtgtacagtgacttcgacgtgcgttcgctgtccgtccgtggccaattgactgatgacaatgtgatgaacacgctttacgcagccaaaaaatacgccatcgatgcgctcgtcacggaatgcgtgcgctattgcaccgcgcgactgaccgcgacaaacgccgtctcaccgttggcacaggcgcgccttttcgacgagggcactttcggtggaacaggtgaaaatcgggaagttgcagggcaaagtggcaaaagtgaaaaaatggacaaaatgatgacaaaatatgcatatattttaatattattcttttcaattttcgctttttcgttaattgcttcattaattttaattatgctccgttccaaaattataaactcaaaactttgaagacatgtatttttttctatagggtaagaaaaaatctgaaaaaattcatgtaagcctaacatttcattgcaaacattaagccaaatttggcttttcagtgctaccaagtgattgatcagaacaccgacttggccctggacgcggccaacgtggcggacatttga

SEQ ID NO: 81441 - DNA, 1386 bp, Heterodera glycines
atcaaaaatggcattcggtccaaccatttctctaaattagcattttttgtttttgtaaacagggaaattgccgattgtgaatgaacgtgacgagttgacttctctgatcgcgcgaactgatctgaaaaaggcacgcgaattcccacgcagttcatacgacgcaaagaaacagctgatggttggcgcggcaattaccacgcgggaaaaggcgcgggaagcggtgaaagcactcgtaaaggcggaggtggacgtattggtcattgtgagttgggggggagggcgagggggaaagagggagaggaagatgaacgcgtacaacggactaaaaatagcaaacaaaccaagggcatgcccaagtgtcagcaggttcgactgctcgcattgttccagtttccaggattcttcaaatgggtccagcaaattccaagtggatttgctccgctggatcaaatccgaatttcccgaatggccacaagtgattgccggcaatgtggtgaccatgcgacaggcgaagttgctcattgaaaacggagccgacgcattgcgcgttggcatgggcagtgggagcatttgcatcactcaggaggtgggcgagtttcaattaacttcttctcattatgcaattgcccaattcaaggtttgtgcagttggccgtgctcagggctccgctgtgtataatgttgcgcgctttgccaaaaccttcggtgtgccggtgatcgccgatggcggcattcgcgacgtcgggtgcgcccgactattttaaatcaattgacctaatgttacacaatgtcccatttgactgttagttacatcaccaaggcgttggcattgggtgcttccactgttatgatgggcggtcttttggctgggactaatgaggtcatcccccatttacttccattgggctaattggctgtttttgcaggcgcctggtgagtatttctggggtccgtcgggcgttcgactgaagaaataccgcggcatgggctcattggacgcgatggaagccaacgagtgcagccaggacagatacttcacttggtctctgctctttcactgtcagcaaatgatttattgcttttttcatttagcgaagatggaaatatcaaagtggcccaaggcgtaactgctgcccaacgcgaccgcggaagtgttttcaaattcgtcccttacattctccgcggcattcagcacggacttcaggacatcggagttcgatccatcgccgagctctggtgtgttttttgttttgttttaatggactaattaatttctgaattaaggaacggagtcaattgcggtgccgtcaaattggaacggcgaacgcacagcgcacaattggagggaggcgttcactcaattcattcgtatgtttcgagacttatt

SEQ ID NO: 81442 - DNA, 105 bp, Heterodera glycines
atggtgctgctgctcttgctggtggtgttggatgggctgttcatgttggaagtgatgttgctgaagttgctcaaagttgccatcaaattgaagctgttgctgctg

SEQ ID NO: 81443 - DNA, 329 bp, Heterodera glycines
atggatgtcacttcgaatcccaacggatcggtcgaatttgaaaaggtcccaaaaagtctaaagaaaggttgtgctgacactgggctggattttgatgaggatggcctgacaattcacgaattgttcagccaaggcaccgggctcacgtacaatgacttcagtaacaaaaggaaaaaaattttttttttgaattttcatccctttagacattttgcccggttacatcgacttcccagtctctgacgtcgaattgggcacgcatttgacaaggaaaatccgtctcagtgcgccgcttgtttcttctccgatggacacagtcactgaaagcg

SEQ ID NO: 81444 - DNA, 933 bp, Heterodera glycines
atgaaaacattaacgattactgtacgcaatgaaaaaagtgttaaggatgaggtattactgcaggagtacaattatagtagtacaaatattataaatacttaggatccagatcaaatatccggtacacatttatgatcctaagtattccaaatcagttaatttatggaaacaaatcagacattttggttggtcaacggccattatcgcaatagagcatggtggacagctaaacacatgtccgcatcccctaactccgaataacacttggcctttctctaggcaccaattgcaccgatcacttattatcaacttttttcctctgtctctctcgtattttccttttcttctcccctctctgtcactcgcttactcatcagttggccaatcaccgtcgcactttgtgccgcaattcgctgagtcctttgttgttctttgttcagcatcgtcgcccatttgtgatcaatccactgctcggcttccagcagattttgacggaatttttgctccatttgttggcgcatcgtttccatctgctcgtccgttatcgcggctgcaccttcttcaagctttcggctgcgcatttccctggccctcaatgtcctccgccaagcgcattttgatctgtgtgaacgccgccagtgcaagagcggtcacttcttaaaacttttcaattattcttttgcatttatatttttgacattaattataccccggtcttcttccgaaccaattttcgttttttggtttctgaagctgctgctgatgttgatgatgatgatgatgccggagccatagtccgctttaagcttgaaatagctattacgttcatctcctcatttccatatcgcagaactggatttgaattttgtgagagaaactgtacgaaaaactaattgaaaaaattatcgacgaatttggctgcagaataataaa

SEQ ID NO: 81445 - DNA, 240 bp, Heterodera glycines
atgcattgtttgaagcgttcaaagtgcgagaaggactgaatgaagattagaaaaaaggaggaaaaggcggaggaagcagatggcgaacaacaacaaaaaatggcacaaaaatttttttaattttcacatttatttttatgcattttcacattttttattttttatttaccttcagtaaaccaaattacaaaattgttcaggcaaatttcattttctatgggttgttgtgtgatcaaatag

SEQ ID NO: 81446 - DNA, 1361 bp, Heterodera glycines
atggataaagggaatggaggcagaaatgtgtgtagaatggattggaacgaggaatggaaaagggaaattaatgaacaaaaagtaaaatatgtaaacccaaccatttttatcaacttatttttttccaaattaaaaaaaaacaattttaatttaaatttagattttaaactttaattggtaatagaaattgtcggcctgcccaattgtcgtcgcatcatgccaccaaaaagagtaaaataaaatcctgagattttcaaaaaataattatttattttttttttccagacatttgctgaactattaaaaccaattgttacgcgcagtgcacaacgacgtgaagcagcggaggacacggtgctggcaaaaaggcaaatgggcttcagaagagggccacttgcaaatcgtgagtttgattttaaaatttaataaattttaaatttaattataaattcattacatttcctttattaaattttttttggcaatttaagcgccgccacaaataccaccataaaatgaagaaggtctgccgttgccaatgccaccatcaaatgccgaagtcgtcgtcgaaccaaatggcacaacttcaacaacaacagtcaaagtcgccgcccgacagaaggccaagacttcatcgacaacaacagcagcaaaagtcgtcgccactcaaaatgccggctgctcatcatcatcaacagcagcaaatgtccgtcaaccgtcgttgtcgtcactttccgccgaagaaattgcacgacaaaaaaagggacaaaaacaaattcaacaaaaaactggcaagttttaataaaaagtttgaatttcatagcatttaaataattaaaaatattaacctttcattgtctttttaaattattataaaaattgttttaattatttttatcatatcttccaaaaattttttcttttttttacagccgtcgcccccatcaatccgcattcctaatggcaaaacgccgataaggtccgtccacgccgcccggaacccaaccagccggatgaccaatacgagctccgttcggtattggcgactgatgaagtggtgtccggtggcacgacacatctgtgtctgtatgtggattttcttggtataaattttttttgaatttttacatttaaaatttcaatttaaatttcgatttaatttttaaattttcagattatcaagggcaagagggtgtttatcaacgaaaagcgatgcccttgagctgacgcacttccacgacattgactctaccatcgactctacgctccatgcaattgtggaacgaccggtggcgccatttctacaacaacggcttaatgctcgcccactttttcatcaatgtaataaaaaatttttctaa

SEQ ID NO: 81447 - DNA, 202 bp, Heterodera glycines
atggctgtgaacattgagcgaaatttgaaagaagtgcaagaggaaatagtgaaaatgcaaaataggtactcttacaataattaattaaatttattttaattataatgtgcaaaatttgtgcagaaaaagacgattttgcgagttgctcgaaatgaatgaggtgaaaagtgcaatttttgcattataaaataattgaaaagaa

SEQ ID NO: 81448 - DNA, 113 bp, Heterodera glycines
gtagatggctgggcaattgatggggtcggctggtaggccacacgaggggtagaagtgtgaggtgtgcaccgtcgcggttgttagtgcagtagcagctcaggcgcagatgcgtg

SEQ ID NO: 81449 - DNA, 686 bp, Heterodera glycines
atggtagcagtgaaattgcttgtatggaatgtggcaaaaagtaggtgtaattaataaaaaaagatttgagttttcgggtttatttggcgtgtgttttataggcgacacggcgtgttttcataaataaattatcatataacggaatttttatgtgatagaaatcttgaactatatattaaattatgtgctaaaaaacatgggcaaaatgtgccaaacttcgaaatatgtacaaaatgtttttatgtgaaaaaacgccaaaatatttttgttttaattttataagcgctcaaaatcaaattttgttcgaagaaaacgctattattttttcttgttaaattaaaatatatttttaaatttttaatcataaacctttttaagaaaaaatttgtttagtctataaataaatcttgatgagttaaaatatgcctaaaatgtttgcttttataaatattaaaaaaactttttcatcagattttcgccaacagaggaaaatgcgatgggctggcacattgtcaatgctcacgacaaatacgcggttaaactgctcaagaaacaactcgaaaaacagtgaaatgagacggcaaacaggcccgtaaccagggcgagggcagttgcccccccctggaaatgaaaaattgaattttttccagttcgaatttataagttttaaccaaatgctttaaaaa

SEQ ID NO: 81450 - DNA, 381 bp, Heterodera glycines
atgcgtgttgtcataaacggaagaaatgaggggaaggtcgagaacaaagaaaagggggacgaagaaaagccgaaacagagtgccgaagatggaaaaaatggctttgaggaggtgagatattttaaaacttttaaactacttaaaataattttttttaatgcaattaattaacctttagtttacaccagcatactttttttgcaattaagttagccaagggatattttaagcaatgaaaaaaatcttatcagtaaaaaaaattataaaaaattcaggatattgactcggatgctgacagttggggctgatttcaagcgatcaatgaaggacggaggagataagcaagaatttattaatttacatagatttattgcttattaa

SEQ ID NO: 81451 - DNA, 905 bp, Heterodera glycines
atgaaagagaagaagatgggcttaaactcgaacaggaaaatatcgctaattgtgcctgtctggggccatttggggtggcaaaaggcaatttgggcgtatttgaggcccatcaaagtgccgaaaaacagcgaaacaagcacaaaagtgccgaggtaaacagtgcgattcacttttgcatgccttaattttgaaattgcattttatatttaatgccaattcttaattaatttaatcaatttattaatgttgcaattcggcaccatttttcaaatgccaattggatgagtctgtccagcccggtcagtgcgattaatgccaaactcgcactgcagccgaccaacggaacgacaaggaatttgaacgcagtgaaataggggacgaaattgcggccggagagggaaacgcagaggaaaaataaatggccaaattggtggacagtctcaaaaagggcagtcaatgccaacagaaagctcgaagtgccacgaagagagctgcgaaagggaaagccaagctcaagaacagaaaagcgaaaatgcaaacattggaacagataattaaacgaaatcaaattaagcgtaatttagggacaataagcggggaaaagtaatcggaaacattatgccaaggcttagagcctttttgagtaagcttttgcctgtatttgaaggtgatcaaaaggatgccaatgttcatcaaaatgccggggacgacgatagcattgagcagcgatgccgtgaagatgagcattggggaatggccagagtctttgtattggacccacagctgaaaaagcattggctaacgtaattgaagaaccaattaaactttacctgataataggaataattttcattgagtccttcaatttgttgcccattcattttcgattttcggaatttaataaa

SEQ ID NO: 81452 - DNA, 570 bp, Heterodera glycines
atggccaattttatcgcaattgttttttatgtgttcatttgggtggtggtcaaatggaagaaatgcaagtttttttaaattcgaaatttgctttaattggcaattccaaattttggcatttttaatttcagtcggcagccaattgcccaccaatgccatcaaatcaaagaccaacaccaacgcgcgtttgttcaagtcactggtggtgatcatttcgatcagcatcggctgctatctgatcagtgccgtcgtccgactgttcgttttgccgccctggcacttggaccaagtcaaagtgtggtttgtggagctgtactttggcattctgttgaatgtcggcgttgcgctgaatgcgccggtgcttttcatttgcaggtggcaaaatttttcaatttttaaatatttttcgattttaaattttaacgaataattaccaatttagcaaggattaccgcaaatgctttgtgcgtgaatttgcacttctcagaagcaaattggcaaaattgcacaaaacatttctaaaaggtgcttaaattcaatcgcttcctaacattatttaatttataatga

SEQ ID NO: 81453 - DNA, 1364 bp, Heterodera glycines
atggacaatctgtggaaaatatttgggattcatttgaaaaaattgccggattttgaaaatagccaaaagaaattggagcgaaattcgctgaagccaatgcacgactttttggaagttttggagaaaaacattggcaaaaagaacacagaaaaagggacccaaagacagcgaattttggtggaaaattacgcggcacttttgacggattcgctggtggaagacgcaaaactccgcacggagttcaaacgaagggcgcgtgtccggcagagactgcgcaaaatgttcgaattcgccgagggaaatttgggaatatttgaggacgaattttggaacattttcaatggtaataaatttttaaaaaagagaaaacattgcaattagtcaattcgcacttaaaaaaaaggatttaataaaaatgaagaacagtggcaaaaagaggagagcgaaaaagaaacgatgggaaaaagaaaagagaagcgaaaattggcggaaaaggaaaagcgagaaattgacattgtaaattgggcgggggggggatgattggcattggcattggcatttaaattccaattaaaatttcagaatgacgctttgctgttccttggtaaaaaaaacacacttttagtcacattcaaaaattagtgcttttttatcttagaaaaggtcaaaagcaaattcgcaaatgagatgcaaaattatgaacagtttctaaaaattatgcgaaaatttagggaaggaaagtgagtttaatgggcaaatggcccaaattcacaggcaatttattaaagagttaattcggccaaactgttcaaaaaaattgagaatttattcgagggcgatttcaaactgatcgaagaatttatgcgatttacagtgaataaatttgaagaaacaaaggaaaaggacgcagagagtagcagaagcaaaagtgaaggaataaaaggcaaaaggaattaattactaatgatgcatttaaaataatttaataataattaattcaattggcaaattcagtgaacggaagggaaaaaggcaaacggaaggaaaacgaatcagcagaaaaagacggaggggaagaagcacaatcggacggatggaaactgataaagcaaattggggagcaatcgggtaaaatgccaaaaaagggagggggaggggaataattaatggcatcagcagagcaattacaaaaacaatttgaaaaaacgacggaaatttacgacaaattcgtgaaaacggtgcgcggagttgcggcggaaatgtgaaattaatcaattcattaaaattttaaaaatattttaaagggacaaaaaacaaactggagaacaatgcataggaattatttgcactggcggagaaataaa

SEQ ID NO: 81454 - DNA, 1304 bp, Heterodera glycines
atgccacaactgggcatcaaaggaactgccggcattttgaacattttctgttgcatttatttcctttacagtttgcacaaattgcagacaagccgtgccatgatgaaaatggtaggccaaataggatcttagcaaagaagtcaacattttttgttaccatggactggtacagtaggccagggatgttgcgagaacaaaattctattaagagaaacgagaaaagcgagacaaaaatgcgagaaaagcgagaccaaaagtcaaataaaacattgactttgtgaagggatgatgagattggagatgggagaattgggtgtgatcagttgggttgacccaaattgccaaaaacctcccctgcgttcattagtgcgcacttatgtatcagaggagtactcaataaaaaaagaatgaaaaatcacataaaactaattaatgaaaatcgtgagaattttgcgtataaataataggaaaatttcaattttctaatttttttttagaaaaaccatctcgtcattgtgacaatatgcttcgcaatatgccttgactttttccccgcatttctcagcatcggcttaactattgtaagccaatttcggtcaaattagaattaaaaaatgaattaaattcaatttaaaagttctatatattattaaaaatgcaaaatggactttcgaaatgaaaaattaaatttttttcgaagaaattgatttttttttaaattagctaattttctttaacaaatttgactctaaattttccagatccaagttttcttattttttttttgccaaaatgtgtctcaatatattcaaaatttggtgaaaatggctaaaatttccgttttttcccaaggagccaaaaatttaaaaaaaaaaacactggcaaaaattttttggccggaagagcaaaaaaaaaaaagtgtccctcccgattttttttggcctgttgcaaaattacttatttagttcggctctggcttgctctcaaacgtggcatccaccagcactgtgttggactcgctgtgctgtgccatttatttttcgctagtgtttgtgccacccagctggctgaaacggggtggtgccaataatgccaatgccattggtggcacaacaaatattcaacagcaacgacaacactcgcaactgcaaccgcaacaacgcactaatcgaattgcttcaactgttagcatgatgagtccaattattgtgccagcattgaatcgccatccgccgattagccggtacagtgacggaatggtacaaattggtacggtatcggcaacagttcgtcatggaacatag

SEQ ID NO: 81455 - DNA, 485 bp, Heterodera glycines
atggcaacaattggaattggaggtaatatttttcacatataaaattatcaatattttactttttttattgccacctttattttttaaattattttttaattaattttgatttttttttctatttttataacttattaataaaataaatgaatgttgaaaaatattattatttataattttatttaaaaaaattcaaatgtaaaagaatggtttttatagtcattaaattagtatatttttttaaattatttaataaatttatttatattttaattaattttaattttagattttcatcccgacgctgccaatgtgttggaagcagctgttgccatcgttttcctgggctccggcattggactattagctgctttaatgatcggcattgcttatcatttccaatcattgtttttcatcaccctgaggggatggcttttaaagcgaattcagttcagcaaacaacaaaagtgatcaatcaaaataaa

SEQ ID NO: 81456 - DNA, 99 bp, Heterodera glycines
ttgttcatgttgttgactgcaattattctggccgtgattgctgtgatgaacccatcttggcaaactgtggacattcgcgagtttcaggcggaacaccat

SEQ ID NO: 81457 - DNA, 1619 bp, Heterodera glycines
atggaactggaaattgatttgaaccgagccttcggaattccggcaattcgtgccgtggaaaacaaaaaggaattggacgcatgtttggcccaatatccggaggttttccaggacggagtcggacgatgcaaaaagatggcgtcgctgaaattcaaggagggatgccaaccgaagcgatgcaagccgagaccagtgccattttctcttcgcaatgaagttgaaaaggttttggaccaatggcagtcggagaaaatcatcgagccagtggcaaccagtgaatgggccactccgctggtcattgtgccaaaggcaaatggcaagctgcggctgtgctttgactgcaaagtcacggtaaatccttggttggatgtgcatcaataccctcttccacgccccgaggagctgttcagcatcttgaatggtggcgaaaaattttcaaaaatcgatttgaaggacgcatatttacaacttttgcttgatgaaaaggcaaagagttgtctcacaatttgcacgcacaaaggacttttccacttcgctcggttgccattcggagttgcttcggcacccgcaatttttcagcaagtaatggaagaagttctgctgggcattgatggcgtggcagtttatctggatgatattctgatcacagcagcactgatcagcaacatgtcaaaagaatcgaccaggttcttaaacggttgtctgagaacggacttcgagtcaagcgtgaaaaatgtgaattcctcaaaccggaaatcgaatatttgggacacattgtggacaaaaaaggtctgcatgcgtcacctggcaaaatcgagacaattttgaaaatgccggagccgaaaaatctgaaagaattgcagtcatttctgggaatggtgaactattatggaaaatttgtgccatccctggcaacgctttcagaaccactcaatgaattaaggcgaaatgacgccaaatggacatggacaaagagccaacaaaaggcattcgatgggatcaaaaaggttttgacatcaaccgaagttttggtccattatgacccgcaaaaaccactttttctggccgctgacgcgtccgactatggagttggagcggtcatttttcacaaagatgaaaaaggaaaagttggtgtgattgcgtattcctcccgaacgctaaattcttcggagcgcaattactcgcaaattgaaaaagaagcgagggcaatcattttcggagtcgacaaattcaagcagtacttgtacggtcgaaagttcgtacttcaaactgaccacgagccactaaaaaagatttttgggccaaaaggagagctcccgattgttgcggcaaaacgacttcatcgatggtcactgacattgatgaacttcgattttgaagttgtgtactgctctacaaaagaatttggcaatgcagacggtctgtcgcgattgccgtgtccggaagagacaaccatcgactgtgttggactggaagttcagcaagttcaggccgaaaatatttcatgcctgccggtcacagtcagtgccatcgcaaaagaagtcaaaaaggatgaaattcttcgaaaagtgaaagaatttatcgaaaaaggatggccacaaaagtcgaagaaggactaa

SEQ ID NO: 81458 - DNA, 1128 bp, Heterodera glycines
atgtcgggatttttgcgtacaaaaatcgcaatagagctaaaggctcttgagaaggcgaaaacggcaacagaattgtatgctgagccggaccaaactctgacctcattggaaaatgcaattctcctggaaagcgcggcagagagaataaagtcagaggtggaggcagtgaatgccaaaattgagcaaatttggataaccgcaagcaaatggcatgacgtcatacaaaaaatggacaaggacgaaagaaaaagtgagcagacagcgtatgaacaatttcaaacaacggagaaactgaacacaaaaatggaagcagccaacacaaagctaacagagcttaaggacctggagatgaaggtggaagcaggagcaaagctgcaacgctccaaagcggacagagacgcgcgagtggagcaaagagaacatgcaaaagcaatggcgaagtcaaatgcagaagcagacaaagggaataaccgtgcgagaggcaatgaaatgactgccgcattgtaccaattgccaacactaagaattaagccgtttgggggagacaaacgggaatggcccatgtttgaagaagcatttaaagtggctgtggaccaaaagccaggaagcaaaacggagaagctaaatttgctgaaatcgctggttgagcgagaggccgcattgctcatcggaggcctacgcctggaagagaaaaattacgaaattgccatgaagctgttaaaggacacctatggagacaaaggcgaatatgtaaggaggttgcacacggagttgtcgaacctcaagcgatgcttttcggtggaagacacaaagcatttttgcatggaattggaacgcctagcaagagaattggaagcagcggaagaagacattgaagggccgccaatttatttaatgcttgagaagaagctatacaagcctttcctgcgtgaaattctggaagagaaagcaaaaaatccagacttttgggacacgtcatccctccgaaaggccttaggaagtgcattgagcaaagagctagcaatcaaagaagtcatgagggagtatggcttcgaaggcaaagaggcaaatccagagcatggattcaaacggcaattaaggcggaacagattcggaggctcagtcaat

SEQ ID NO: 81459 - DNA, 1104 bp, Heterodera glycines
atggaaaaatcaatagaaaatgtgttggaacgactctacaatgacccaaaatcgcctgccgcattcgctggcgtagaccgattatggttggaagccaaaaaggaacttggccataaagtttctaaaaaggatgtaaaacactatttggaggggcatcgcacatacactttaatgcgtccaagacgtattaacttccctcgttcacgaacaacagctgctggctttatgacagactgtcaggtggatttggcggattttcaatcgctttctcgacacaacagcggcaatcgatacataatggttgtaattgatgtgctttctaagcaaatatttgttacaccacttcgcacaaagaaggccgatgacatggttgagggctttaagagtgttttttccaaaatgccgatgaaaccccaccgaattttcttagacaagggcaccgagtttaaaaatcagcagttgaaaaagctatttgatgaagaggaagtcgagaaatatgagagcacacactctgagaaaaaggcagcattggccgagcgtgctattcgacaaattaaaaatcgtgtctatcgttattttgctcaactcaaaactctcaactgggtgaatgtaatcgacaaaattgttagtggaatcaacaattcaccgattcgtgtacatggcatgcgaccaatcgatgtgaactttaaaaattctcaaaaagtgtgggaaagaatgtttggtgcagaccagcacagagcactttttggtaagcacagaaaaagaccaaaatttatgcccgaccagacggtgagaatgagcatagccaaaggtcaatttgagaaaggatacataccaaactacggcgatgaaattcttgaaattgatgccgtcaaacggcatacgaaaccaatgcgttataagttacgtgatgcaaaaggagaaaagtttaaaggattcttttaccctgaagaattgactcccgtacgtaaggaagctgagacggcatacagaattgagcgagtttttcgaaagcggaagcgggctgatggaacgatggaagtattagttaaatttatcggttatcccgaaagagaatggattcatgagacacaacttgtataa

SEQ ID NO: 81460 - DNA, 1746 bp, Heterodera glycines
atggtgttgatgttccggcgtgcggtgtttcaggacgatgttacggtgtacccggtcgccatacggtaggtttatgaccggattctgtttttgtaagcctatcattcatgtaatttgtgctcaatttaaggcaagaggcccgattcggagatgcgtactggagtgaggacaatttcatgcactacctgttcagggtgatgacctcgtgggcaattgtgtacaatgtgcactatttgggtgtgttttggggtgtcgcaaatgaaaattttctaaacttatttattttagctttattgcagtttacccgaccattaaataattagacaatgacaaattaatgtactattacgttttctaggataatcctaattagatatcttggtatcattccatagccccaagaatcccaatattaatgtatgtaatttggatgctttagaaaaaaatgatgcattaaaattgtcaaagattttatggttggtcgtgtgaactgcattagagcctttattattcaatttaagcatctaatatttatttgtttaaagctcctcaacatcgacgaccgaatgaaaatgccacggaatttgcggcacgggttcagcgactgatcgccactcgggtgggcgtccgtccgattgcttacgatgggggcggaatttggtgggtgttcgtttatctgtctgacatgaatagtcatgcataatttgcatttggtcgctttcaggtacaaaccgaccgaccgacaaaaggcacacgtcgaatggcaaaagcgctgcgcgagcaatttggaggaactgttgagcacggaagtggtgtcaacaacgggcactgaagaggaggagggcgaggcgaaggaggtgaatttgcggatggggtgggaatggaagacatttcaatttgttttttattttattggtcgtcaaattcaatgccatttagaagacggggcaggatggacacctttccaagggcgtagcaagaatttttggccgattttttaaacagatttccctaaaaatggcgattttttggtcgaattttattgcttttaagggaatattgattcaggcggtgcctatagatgccgccggggggaacttttgagttttttttgatgaaatttcttacaattaacaaaatggtataccattttttttaattttcccattttcattaaaaattttcatttttcggtttcggagaggttccccgttcccccccccccctcgctacgcctttgaacctttcatttaattgaatctttcaataccgaatggattaattcatttttaaaattccggtcgttccatttcaagcaactgattgttcggtcaatttcctcggatgggaccgaagaggggggaacttttgtcgctgaaccgtccaaacatgatgaagaacagctgcaacatgagcaacaaaaaagtgccactgctgctgctgtgactcaaaagcggagggaggaacgccgtcgtcggatgagtcaaagcgtcgagtccgttgtggacgacgtggtcggcgcagcagttggcgaagacagcgacgagatggacttgatcggctgaccgaccaaacacacagatccgattggaatgaggacgacaaatgattatgatgatgataatgcttttgctggatcatgattatgttctaacacatttattcttggcaaggcgcctgctctgatggacattcttttgtcagtataattttttgatgtagtaactgacttctcgagaagtgaaa

SEQ ID NO: 81461 - DNA, 1906 bp, Heterodera glycines; identical to SEQ ID NO: 2762

SEQ ID NO: 81462 - DNA, 1406 bp, Heterodera glycines; identical to SEQ ID NO: 2763
  unsure (1)..(1406): unsure at all n locations

SEQ ID NO: 81463 - DNA, 316 bp, Heterodera glycines
atggccggagccggggcggaaggaggacagggagcaggaggaggacgagttggaggaggaggagaacaacagtgccggaggggacgacggtgcggttgtgctgttgctgtgctggtcatctgagtgtgagtgatgggcgagtgggaaaaacatttcgggaaggcccctaatataaaaattcggaggggggggggggggaatccgaagggttttttgctattcggccattacaaatttttcaaattgtacatttttcagaaaaaataaatttcccgtcagaaagtgaacaattttgtgcacttctggcaaaattaaa

SEQ ID NO: 81464 - DNA, 738 bp, Heterodera glycines
atggtgtgtcccccgttttttgagcgtgctccctccatcatcaacaaacccaacgggtgctccatcttagaaatttaaaataatttaaatattacatattttttatttttaaattttgtttgtcgtttgtcagttcggtgctgttcgagtgcatttgcaacgcgaaccccgagccgacggtcaaatggtttttgaaggacaaagaattggcgggcgatcgcttcgtcagcaaagtgaagaagcaagtgggcaagtacttgtgcacactgaccatcaaagtgagtaatgacagaaaagcaaatggaaaaaggcacccacttaattacctaattagtcaattaatgagcaattgctgtttcatttaaattgaagaaataaaattgaaaataaatgaaaaaaagaatagttttgtaaaactttttccgaacgtaataaaaataaataaagcaatttattattcgcttttgaatgctaatcatttttcgtttaatatcactaatatattttaaatttagtctccaaatcagcaagatcaaggcatttacaaggtgatttaaagaaagaaatttaattataatttaattgggtccaaaggtcgtcgctacgaacccccaggggacgcactccgtctcccaaaattacatgctgatgtgcaccgccaacgaagtgttcaaaacccaaatggactgaaaacggataaatttttacaaaaatttccaacggattttcaaaaataaa

SEQ ID NO: 81465 - DNA, 1160 bp, Heterodera glycines
aaaatttcattcattttttctcttccattttcatgttcctgcttggcgaactgtggcccctgtggggcggcacaatgatcttaccggccaagggcaagctgttctatgtcccccaagtgaattaacccaacataaatttgtcagcattctttttattaaatttgtttttcagcgtccctacatgaccatcggctccctgagggatcaggcaatttgccacgggattggctttttgaatttactgccattgtcaggtcatttacccggaccgtccggcggacatgcgtcgccgtgggttcaccgacagtgcgctggaggcactgcttgaccaagtgcagttgcgcaacattttggagcgcgaggggggctgggagggccaacaggactggatggacgtgctgagcgggggcgaaaagcaacgcattgcggttagtggagcaccacctaaaccagacattgttttttcgttcgctttaatctcctcccttctctcgtgtctgcagatggcccgcctgttctaccacagtccgcagttcgccattttggacgagtgcacttccgccgtgtcggccgacgttgaggacgccatctaccgacgatgccatgagttgggcatcactttgttcaccgtttcccatcgcaaatcgctgtggaagtgagtcaagtgttattgggtttattgaaattcacaaatttggaaacaattcgtactcaattcaacgacttacacataaattactccgaaaatgagactctgcaatataattctccaactacgaaaatttgtgcagaggacaaaattttgtcacctgcattttttagaaaaacttaacggaaatttttcaagaaaaaatctttaaaaaatttttctatgaaaattcaaaaaaattcagctccgagattttgggtgcatccgaaaaaaatttgaagctttgactgtcggtttctctgattagaattctccaaattaggacaaatcttcagaataaggaaacatcttcaaattctctcattgttttttattacaattttatttattttatttgctttattttccccgccccttaaggcaccatgacttctctctgcacatggacggccggggccactacgattttaagcggatcgaccacgacaacccggcggagcagttcggctca

SEQ ID NO: 81466 - DNA, 2100 bp, Heterodera glycines
atgaccctttcatttgccaatttactaattactcccctaattcatgtccttcccaatttgttaaaggccaaccggtggatgttcatgtcgacgtcgagcaattacaaagtgttggccgcttgctttgacgtcgcattggtcgcactgattattggcagtgtcaaaatgttgtccgattcgccagtggtaagataaaaaaataaaaaattccaaaaacataaccattttttcttttttttagattttctccctctattggtgttgtgtgctcaccaccggcttattggaaacgcttttgctgcgcagcccaaaagtatgtacaaattcaattttaaataaatttctaattaagtacccgttaaagcgtttattaatttttataatttataaatttttaatccacaaaattttattttgtccattttaaatcccatggtctttcattttcaacaaatacataccattgcttttcatttgaactaattttttgttccttggcaggtgaagcgtctcttttccatcggtccgttgcccgacgacgcggaaaaacccttccgttcgctgtttcggcgccgcatttacgtcccctattccatgcactgattggcactttgttttttgtcatttgtggtggcactttttcgctcttttctgccatttaaagtattttttgggatctcattcccccgaaaagtgtcacttttgcatatttttttagactccgtttgtttatttttttctgtatactttgttttttttgttaaaattttctgttcattatttacccaatcattttaattttggtgatacttaaattcatttttttaaatttttcaaataatctgccattgaaagtgaatggaaacttttcgcattgatccttcaagctccattgatcggctcagtcggcttttccccaacccttttcggagggatgagcaaggccaatcggaggaagggcaccagcaagaacagcagcaggtgggccaacagaatgggcggattcattggggattatacttttggcactttgagtgacgggattggccattagttcttggcattttccctttgattttctgtttatcatttcactttcctttcccagcagcctccttttgtgtacactccgtccgcttttgttcgccaaatcgacgaaatgatcggctcgcggacgcgcccatggcgaaagagtgggccgggaataatcactccaatttattccacttttccgtacagttgccaacggcgttgatgaggacgttcagttgcgcatcgccagagttgttcaggtgtttcccaattcctttgcccttcaaatttttattttccattttgccgttctcaaaattcctcgagactctcgagagaagcccctatcatttgtcaacacatcatttattaaaatgcatctacttgtctgtccccttttcagtccaattttgcattgcctccgatgagtcgcgaggagcgcgtgatggcctccgttatggttgtccggcaatttcattaaattaaatttttttaattctcccctccccttttacaggaaaattgtgccttcaaatcggtggttgcgtgtgcgttaggtgccggcatcggcgttctgttcggcctgtttactgtcagcgtggacccaagttatgcgatcagcaaagacccgaccaagccggtatgttggcatttacaatatttccacttttttaaagtagattactattttttatttgattttcaatgtttacttttcatcctccatttttccattttcagctgtcattgcgcgagacgtggaccgaaatgaagacgcgggtgggccgttactcgcgaaactttgcctccatcggtttactttttgctggcactgaatgcattttggagacgacacgcgcaaaaagcgactggagaaatggtgggaattggagaaaaaatcaaaaaattccactcttaaaattcggtttctccccctttttaggcactctttcgggtgccatcgttggcggaatgttgggattccgtgccggccttcagcccgctttgctgggcgccgccggatttgccgccttttcaacggccatcgaattttacatgcgaagataa

SEQ ID NO: 81467 - DNA, 825 bp, Heterodera glycines
atgacggccaaattggaaatgttccgccaaaaaagtcggacgaaaccgcccaaaaagatcggcagaaagtcgtgcgaatggacggcgccggagacggacaatccgggaaaagcgatttacgcagtcactcgccctttgctggtggaacacaaggagaaactcaccaaactgagggaccagctgaaggcgcaaattgaggtaggcgaaaatgagcggtttttttttgtcaaaacaatgaaagttattagaaattggtgccatcccgcgggaaagttttttttttttttgatgaattgcgagattggtaaaagacaaaacgttcaatgcctaaaaatgcaggaatgttcaaaaaatgttctttagactgatactttttgggtaaaattgacaattcaagcagtttttcttattcaaattaaaaaacaattcttaaggccgcgaatcggcccgccaatagcgaccattatatggccgtctaatttattttgcctatttttgggaaatggactctccagtcccgagtctgtaacccgactcattgtcagagttgttgccgcggcctaaaattgcaataagctccaatctcacagcggggggaaccctgtctcccataaacaaaatattaaaaaaatatttctttaggccaatgaaagggaattgatggaagaagattaaacagcgacagaacatattcaaaattctgatgctaattatgatgatgacggtctctctctcttctcagcaattcctttgtctctgagtgacaaaatatttattttatgtcgccaattttaatgctttatctctcttttttgtttttcgtga

SEQ ID NO: 81468 - DNA, 208 bp, Heterodera glycines
atgacctttgttcgccatttcccccacttttcatttgatttgtccctgttcagttttgtcttccgtctctctgctcggtccgtcctcctccgttcttttgctcgcggtcggtctccgattggccaccgttccggtgagaattctcaccgaaaaactgacgtctcaacgtctgatgatggtccacttggtgcgcaagcaggtgtacgag

SEQ ID NO: 81469 - DNA, 731 bp, Heterodera glycines
atgctcgagaattcatcggctcagctcaaggtgggcaaataaataaattaaaaaataagattaatttaatttaaataattaatttttatttttcaagacaacgaaatcgttgttatttgcttgaagagcgtgaacaaggcatggccacttcaatgagcattccacaaacgccattagtaaaagaaaatttaaaaaaacttattttttaattaattaaaaagtttgcgcatcatttattaaattttggaataattcgaaaattcgatggaaaaaatttgtttgtttatgttcggagtcaaaagttatgtgaaaagaaattcaataatttatttaaaaaatggttatgtaaattttagatttttctttgataaaataacaaaaaattaaacactataaaattgtaattttaaattaatttaaaatctcaggaaagtgccgtttcattcacaacgccaacaccattgccaatggctgatatccggctgaattccgccgcgtatggcactttttatatggaacaaatgcgcgaaaatggcacccgagatgaagccaacatttggccaagaaccaaaaatagcgtggaacaaaaagaaggatcactaaacaatggtggcattgaatggcaacgaaaaatcaagcgaagaaagacatcagcagtacaacatcaggtggtttttaatatcaagtttttttttgggcaaaaggcaaaaatttcaacaaaaaagggctaa

SEQ ID NO: 81470 - DNA, 280 bp, Heterodera glycines
atgagttggatcccattttttctcgaccaccgaagccttccggcccgaattacacttgctgtctcgtcactaatgagcatcacttttcaatatggaaacattttgaaatcacttccccgtgttaggtatataaaatgaacaaaattttatttttaaattaaaaatttgaaaattaataaatctaggcttcccaaattatccaattctatgattttttggtacataagttgggctttcgtgctcatatttttgcattagacaaaattaatagaaaaataaa

SEQ ID NO: 81471 - DNA, 704 bp, Heterodera glycines
attccgaattatcgttggaaaaaatttaaaaaaatcttttttccataggtttcaaaggcattgcgccgtcgcagcccctggacggacaaggacgagttgctggacgtgctctactggggacgccaactgctggccctgtgcattggcatttgttggggcctcgtgccgatgaaaggtgccattgcgctgctcctctacattctcatcacctccgctgtcggccattcctatttgacctggttccaagaggcacgtcgccaacattccgtttattttggccaattttaattgtaaattggtgcccttgaattcatggaaaaagtaaaatggtggcataattcctcaaaaattcagtgatcatatagcaagtgtcagggcaaccaaatgggcccgattacaatttttgagatttaaacaaatctgttttcccggaacgggttctcaattttgtaatgtaattcattagagtccggacgacggactttgacgccactcgacacttttaccgggccaaattgtctaattgtatgcccgggcccgtcaatttcatccgggctctattcatgttgtttcaatttgcgctatttcagcaagatgatgaggagtttggcggcttttgggaaattgccaaggagggatttggcgctgctttcgcaacatttatgggtacgtatgttacccttttttgctatttcaaaattagt

SEQ ID NO: 81472 - DNA, 605 bp, Heterodera glycines
ttaattcaatagtagacgaatataatgaaaatataatcaaatagattgccgggggaatatcacacttatttaagtattgatgaaagcgatccaaacagtgattttcctatctcacatgaaattttaaattctttaaagtgtccaagccttccaaatcataaaatagagcttaaaactaattcaatgataatgttgttgagaaatttaaatgttcgagaagggttgtgtaatgggacaagaatgcaaataaaagaaatgggagaccatgtaattagttgtgtgattaaaagtggggataaaaccggagaaacgacattaattccaaggattactttacttgaagacaaaaaatttccatttcctttgcggaggcatcaatttcctattaaacctgcttttgcttttacgataaacaaaagccaatcacaaactttttcaaaaattgggattgattataccgatgaaccatttgcccatggacaaacttatgttgcattttctcgctgtaaatcatggaaaggcttaaaaataaaacttttggatgacaaaaagaaaggaaaatcaaaaacattgtgtggcaagagattttaaaataaagaaaaata

SEQ ID NO: 81473 - DNA, 326 bp, Heterodera glycines
tcgcgggcactgccccgaaaactgaaaaatgtattctttcaagttgaccgattggggtactcaaacaattatggggagcaaaaatccaacgcagaattaaagtacaggctatagggaagctattccggaaggattcggtctccccataaatctgggcgcatcggttcggagggactgccccgaaaacaaaaaaatcgattatttcaagtgtccgtttgcggtactcaaacatttatggcgagcaaaaatccaacgcagaattaaagtacaggctatagggaagctattcccgaaggatccggtctccccataaatctgggcgcatc

SEQ ID NO: 81474 - DNA, 686 bp, Heterodera glycines
ggtacagctatcactttttttactccatacaacggtccaaaggctcgtgatctcatcaaggtgttggaagaggctaaacaagtgagtgcatatcgaattgaaacgatttggcatcaaatttatccaattttcagaatgtgccagtcgaacttgccaaccttgcgaacaatgtatctgataacggttacggagaccgtcgtggccggtcgtatggtcgtggaggaggtggtggcggtggctactcgggatccagctttgcgccaactggtgccaatcgttccgctttcaactccggtggtggaggcagcttcagagggggaggaggatcgggaggcggaagcagaggagggtacggtagctccaacagctatggtggtggtggtagtggctatggcggtggcgccagctacggtggtagtggcggtggcgccagctacggcggtggaaacagctacggtggagctggagctagtcgcaacaccagaggaggaggcggctccggtggcagcagttacggaagcggcgccggcggaggcagcaactaccgcggtggaggtggctccggtagtggtgctggtttcaaggccagcggaggaagtcgcggcggtggttctggcgccggttgggcaggtggcggtggaggcgattcgaattggggaggcagcggcggatggagtgccaactga

SEQ ID NO: 81475 - DNA, 565 bp, Heterodera glycines
ctctgaaacaaaacaaaagtatcaaaaagacaacaatttgaccgcctcttaagttgctcaatcagttggcactccatccgccgctgcctccccaattcgaatcgcctccaccgccacctgcccaaccggcgccagaaccaccgccgcgacttcctccgctggccttgaaaccagcaccactaccggagccacctccaccgcggtagttgctgcctccgccggcgccgcttccgtaactgctgccaccggagccgcctcctcctctggtgttgcgactagctccagctccaccgtagctgtttccaccgccgtagctggcgccaccgccactaccaccgtagctggcgccaccgccatagccactaccaccaccaccatagctgttggagctaccgtaccctcctctgcttccgcctcccgatcctcctccccctctgaagctgcctccaccaccggagttgaaagcggaacgattggcaccagttggcgcaaagctggatcccgagtagccaccgccaccacctcctccacgaccatacgaccggccacgacggtctccgtaacc

SEQ ID NO: 81476 - DNA, 576 bp, Heterodera glycines
atggttcgaattttgttgccaaacggtgagtcggccaacgtcagtccttcagaaagtgttgaagaagcgattaagcattgcgttggtggagatatttcatcgcagaatgactattgtgagtttttttaatttaatttaaaaaatagaatttgaattctcccttttcagcattggttttctttggtcgcaaattaaactccgaccaacgcttagctgacattccgcatttggacggcgagtcacgctcagttcgattagtctgccgaaaatcgcccggtgttagcattgaaaagaacctggcggatgtggacaaactgcggtcacaatgccgaactttgtaccagaatcttggcgaggaacttcagcaaaaggttggaaggaccaacaatttgttttttctccttatgtttaattacaaagctggagacatatatggtggacgataacaatgccatattcaattccattctcaaagaccatcccgaacttgtgcatgatccgatcgcccttcccattgtcaaggatttgcgactgctggtgcctgccatcattgaggtggtccgtttaggagtgaaa

SEQ ID NO: 81477 - DNA, 423 bp, Heterodera glycines
ttaattaagcgccgctggttttttgaccattgcccttgaagcgcccttttgctgtgctttcgtcgatttcatcgaaagaattgctcaattttccgagtcgcgtgcgtattggcaaaaggcagcactttatggcgggatgggtatcgtccccattttgctgtgtgccgggactgagactattttgggtgccgggatgatatgcgcttcgggcgtcgcctacggttttatggcattgggaaagaagtgggtttaatttgttgcactattgtcaattgacaaaaaactgataactacaccggctctgtttttggttcaattctaagtacgtttttaagggctgaccgtactacgatgttaggcggtgctaataccgctggacaggacccggcatggagcccacaactgaaccaaccatttccacaa

SEQ ID NO: 81478 - DNA, 409 bp, Heterodera glycines
  unsure (1)..(409): unsure at all n locations
atgcctctcatcatttatttttccgtcgttttcctgcttttgcttctgctgttcaaaattgacacaaaaggatggagctggctacagtactacaacttactgtcaaccattccgatgtttttgcccgccgttttgaatccaattgtgccaatttgcaccatcaattattatcgtcatgtgctcgtgtcggacgtaaaacgttttggtatatggtgtatcaatttaatttttagcattttaaaatgtacacataaaaatttcagggaattttttgaaagttttgtttcatctaaaaattggtcaacaaaacatgaatgaaaatgagccgaaacaacagcaacacaccagccagcaagatgngcaattaatgtgccaagaacgcaaaatatcgaaacgcaaaattaattaa

SEQ ID NO: 81479 - DNA, 3466 bp, Heterodera glycines
atgacatcgcaaaatagtgcgtcatcagttggcacacaaaacacatcggccactcaaaatgttgagtcgccgccaagcagtaaaaaattgaaggtcgaagatgttgatcgacccctgtctgctattgaagcaattgcttcaacgcctgtttcaacgcaaaaaagccgtggtgggcggccggccaaaaaaactcgaggaccaggcaggggccaaacagttggttcaatgagcgaaggctcttcaattgaccacggctcagaagcaatcacaaatgtggcgattttaccaaatgtgcctgaaaaaataaatttcagcacagtgcaaattaacttcgccacatctcgtattgggctttacgaatgcgatgagagacgctctggcccaagattcattgaaacgtgctggaatgatctgacacagtttctaaatgatggctttattgtcgaatatttggcatacttggcaagcatatcacaacgaaaagtggtcgttgttgatccaatggtgtggcaaatgggcatagaccgggtcatccaatataaaaaaatgacatttgggtatgaccctaatgttacggcagaagtcattcttttgccaatacatttcccgggacactggactctcattgtccatgatgttcagtgcggtactcattttgccgattctttgcctaccccttatggcagattggattttcaagtgacggataaaattaaaaatatcatttctgatgttttgccgtcaacagtgttgaccggtattgttaatgccataaatctgacggtccaacacgatggaaatagctgcgggtactttgtgtgcctgtatgccgaatcctggctaatgaacaatcgcacgtttgttctgccagacttatccatcaattatgaaaagaagcgtattttatggcacattaacgagctgtatggctctgataatgtgccatatcatccaagggaaggggtgccaactccttgcccaattgtctatcgacatacagatgaagcgcagtcgaaatccaagaccgctgagccaatggaaattgatgagcatgatgacataacgatcatcgaacctcagacgagtgggcaggcagttaatgccgtttccacccaagcccaagtggcaggtgaaaaccaagctgacacgcttggtttggtgtcggatttttgcgtcgtgcaagagccaattgcgcaggctgacgatgcaatcttcgtcaggccgaagacgcctccgaggcgatcatcgcgcataggcagacggcaatcatcttcgattagccgttctccttcagccgcaccaagacgtcgttcatcaacaaatgctgttgagcaagtcactgcatttacgcagcgttgctaccttgtccacaagggttggtgctgtgctgctgcagcagcaaagcattatccagaatacacagattctggtaagcttggcgaaaaaaaatgctcttattgtggagcgctacttttcccgcatgaggacagcagcctttgctgtcgtcagggaagagttgtgttgccaaaactcaatcctcacccaaaagagcttcaagagctaattgtgggggaaaaacaatcccgcgagggaaaagaatttattcgcaatatgtcgcgttacaacaacttgctccaattcgcgagtgtttcggctggaaataagccatgccctgctggcggcccgatggctgtaattctcaacggggaattccatcgccgcataagcagcatgcaggctggcacaacacagattcctggctttggtcagctgtacattctggatccagtcgaagccatggagcagcggcgaaaaaatcccacctttacgggagagaaaatcacaaacgatgaagagtttgtgcaaggtcatcagcttaatgatgagacccttgaaattttggagcaaatgatccaagaaaatcatccagctgcttctgcttataagcaggctcgtgaacagctccatgagttgttaaaacaacaaaggactgaagagcttcggttcttcagaatgactttgttggatgagcgctctgctccgggtgctatgaaagacccgaagttgcatccccaccagataatcaccccctcaacgggtgaagggatgttcgcgattcatgcggatcccaacggtgccccggcaccaaaagggatatgggtggaaaacaagcaagggcagctgaacgaaattgcccctctcagtccatggactgatagcttaacctatccattgattaagcctaagggcgacgatggatataaaattggcattccatatgccaaacccgcacaaagaaagcggaaaagcgacatgtctgatgatatgtttgacaatcaagcaatgtcagatgatgacatttgcgataccgagtcaattgcatcgtctgggtctgaagcatcgatgcagtcagtgaccagtcgctatgacaaatcgaaaaaatttgtctccctgcgagattactgcaagtattatctcgccataagggatgaaaatttggagtggcaataccaccacattctttcatgtggcggtggtcttggacagcgctggatcttagaccaagcgtccaaaattgactggcaaattgcaacctttttgcgccgtccagacatggacctgcgcataagtactccaaaaaatctgctgcattatttggtgaaccaatacaataagcagcaagctcggcaaaaccccaatgcacgacaaaagactgtcgatgacattggtagcgttgttcgcctttctgagagaaatgtaaattctcttcagtattggaaaaaaatgtatgaagactgcaacaccatttttgcgcgttgccatgacgcaaaaaaggcgcggctcttcatcacattcacgaataaccgtgagtggccagagttcaaggaaaacatttacaaaaatggtcaaatgttcactgaccgtttcgacatgtggatgcgtgtgtggtccagcaaaattgctgttttccaccaggagctctatgaaaagagtttcttcggaacaatccttggctcaggcgagtcaatggagttccaagggcgtggtggcccacacgcacacattgtagcccagactgacctggacgcagtcccagaagtcatccaggaatacatatgggctcatattccacctttgccgtgcaaagacgatgactcacccatagcgcaaatgcatcgcgaagtccgcgaactaatgcatatgcaactgcacagatgcagtgatagttggtgtggtccacgtgaccccaactttgggcggtgtaaaaagggcttcccagccccgtactcgaaatgtacaatactacacccggacaggcccgcattgtattaccggcctagcccaaccgacggtggtgcccaaattgaggtgaacggcttaatatacgacaactcgcaagtcgtgccgtacaacccatacattttgctgcgttaccgagtacaccacaacgtgttattcgcatacg

SEQ ID NO: 81480 - DNA, 1135 bp, Heterodera glycines
atggaaggctgcagcgctccaaaacgtagtcgtcaatctattgggattaaaacgacgcctgaccatcaaaacgaacacgttcatgtctattcaaagcatcaaaacagaattcaattcagccaaggaaattttttgttcagttctgacacacttctggaatttgttgaccctgatgaaatgtgagaagatttatatttatattaaaaatgattggctctttaattattggcgactatagcttcaaaatatggttttcagttctctagagcagtacataaagagtgatgatttgaaaagatgcagtgtccccaggcccgaaggaatggatctttgggagcgtgattcggagtgtggcagcccaaagcgttagctttaattttaaatcggctacctgaaaaaaagcttttttattgactttgttttataaatcacactattctctgaatcacagcggataaatatgattcgcttacaattttaatattcagtttagtaatacttggcactaccctttttcaaagggagaaattttctgtgagaaagtcattcttatcgtatagtgtagcttttaacaccccatgctacactagctaataacctaatgtagtgatgatacactagcttaataacctaagatgctacactagcttaataacctaatgtagcgatgctacactagcatcttggggattctgaggcatcattctgaggggggggggggaagttcgaatccgggcggtgtacattatttttctttgcattttatcattattttctatgcttttgattagcctatataaagggagaaattttctgtgcgaaagccattcttatcgtatagtgtagcttttaacaccccatgcttcctacgctgactaatgacatagcgtagtattcctacactagcctttcctacactaggctaatgtagttatcatactcgagctcaaagtctataaaagggagtggaaaatcgcttcctcggatcatttttgaaaactagcgtaggaatcctacgctgactaatgacctagcgtaggattcctacactagcctttcctacactaggctaatgtagttcaaatgcactagcgtagagtatccagtgttttagttaattggcaacctgaataaa

SEQ ID NO: 81481 - DNA, 578 bp, Heterodera glycines
atggcaaatatatacgacgccaactttatccaccagtttcacaataaaaaatgtgcaagtgagcaaataccaagcctatttcgaatagaatcatcataatgttaataagaaacattaaaacaaaggttaagaatttaataataaatgcataacattatttgttaaaacaattaatagtttgttataaacttttgaaaaacaatattattttcaaatttatttttaatttatttacatcttttaatgtaaattgaggaattcgatggtggcaaatattcgctggcagctattggcatgccgcttttgggctttttatcccatttttccgcttgttaatggttaataaaaattcagaaaagagagcaaaaatgtttaatggaaaaatggagaaaatgggggacgaaaataattgattaaaaattcaagtataaaaatttcattattttaatttttccacataacaaaattagcaaattttattttttcagtgaattttctttttcttccttatccataatggctttcaggtaaatagttcttaaaatattgatattggtttgcattataattataaaaaa

SEQ ID NO: 81482 - DNA, 2274 bp, Heterodera glycines
atgttcttcctttgccctcccattgttcttcttccattggcccttttctgcgtcgcttcccatggcttaacaaatcattcgaaagcatttggaaatgaaagcgaatcgaatagaacggacttttttggcactgaacccatggaaattccccgtcataaaagtgccgacggattcgacccaatggtggacgacgtattcgctttgctttctgctggagaagagggggaagaggagggaaatgggacgaaggtgggaattacggtggaggaggaggaggaagaggaagagcagcaggtgagagacccctgacaggcttcgtgcctttgtgctcctgctgatcaccccttcgtccagctgcttctccgttgtgccgatcagctgtcgccctttgtgccgcttttgctcgtgccgccccattaccatcgctgggacttcagttgccattttcaaggcaatttggcgttttgtttttgttgatttatttttaataggcaatcagtccgaaaagcccgccgatctttccccaaacaatgccaatgaaaatgccgacctcttcttgaaaatgtcaaagccgtgccgctccagccaagtgccgcttacttaaggaacgcactcaaattgttcttttcagtcatttcgcgatgccatcacttccgaacctaactgtcacctttttgttggttttgtcgaccatttccactcattccccacaaacactttggtcacaaaactcaacggaaaaactatgaacggaaaagaagcggtggttcggttggtatgtggtgaggagatgaagcagttcaatgaaagcaatgtgaaggagaacggactcaaaaaaacgagcggggatgaggaaacggtcagaattaatggaccgaggggaggggcaattagaaaattatttatctctgtgggggagagggccggggaaggcaaagcttgtgacatcataatcattttgtaacccattgtcccaatcaccacccccctaatcacatatgacataaccaattgttgccttgggggcggtccctttaatccagctcttttccccttccccacttctccacacaatcagtctctgactgcgaatcgggagaggcggtccatccaattgtataatactcttgaataaatgattgttaacaacacctctaccaaattgggaatgttaatggacccgcctggacccacagtattcacttgtattgtaacccgacccttttcagttcctgaagactttggtggttgttgagaagacttggcttcccggttgcttggctgtttttttcgactcgcgaactttggaccttcagctggacgaaattgccaaattattgtggaaagacggacagccgaaattggggacatcgaacggaaagaacaaatgggcggcatcaaaagtgagcagagaatggaggactgcgaaaaatgattaattaaacttctcatcttagtttgtgtgtggggagaacgaacgcaaaacattttatgaggagctgagaaaaatgaaaggccgaaacgagaaaatgggaaaaatattaatcattgaggacggggaaagtgaggtgggcatcgggggagacggatgatcagaaatgggaagatgggtgatcagaatatgggaagacgagtgatcagaaatgggaagatgggtgatcagaatatgggaagacgagtgatcagaaatgggaagatgggtgatcagaatatgggaagacgagtgatcagaaatgggaagatgggtgatcagaataagggaagacgagtgatcagaatatgggagatgaaccgtcaatgcacggagagggaggggggaggagagggggggggggtacggtaccccaccttccctaccaacccaaatcttggcacggacctcccctgcttatttgtaaggtcagaaatgttctcctgaagaagagtgacgaggagctgtactgctcggaacaggtaatttgcctcaccaatggtcattttggatttatttttccaaggccgagaagggattctttcaacgcctttgggacggattgtttggataaaacgggacgggaggaagagactgaaggaagaagaggaagatggaggaagagaagtgaggagaaagaagaagatggaggggggaggaagagactgaaggaagaagaggaagatggaggaagagaagtgaggagaaagaagaagatggaggaggaggaagagactgaaggaagaagagcagggggaggaagagacggaaggagaaagagggatgaacacggaaatgattga

SEQ ID NO: 81483 - DNA, 104 bp, Heterodera glycines
ttggcagactacctcagccttcaggtcgacccgattcattcaatcggaaattggcaatgtcaattggggacacaatgtgagaggaggggaggtggaggggggaa

SEQ ID NO: 81484 - DNA, 71 bp, Heterodera glycines
ttaattaccaagtccaatttgtaaagttgtcaatgtttctattcataaaaaacacataatttgaatggaaa

SEQ ID NO: 81485 - DNA, 49 bp, Heterodera glycines; identical to SEQ ID NO: 51181

SEQ ID NO: 81486 - DNA, 1106 bp, Heterodera glycines
atgacaataattgtattaattttggattttttttttgaatcaggcaacaccgcaactggacgacaattgcccgggggaccaccggcacccatcacagaccctgttggagcagcagaacaatgcgttgtaccggctcctcttcgatggcagcaacgagaactacttcacccatttggagcgagcccgtcacctcgtccacacatgcgccgtgtgtgagaagaagtacgagttcgtgttggtgcggttcccggacacaggagtcgagactccatggcatcctgtgttaccaacgcatcgcaacattcgtgatggttggacgttgctagacctagcaatgttggtaagcgaaatttgtttcaatttttgaaattggtcatcgaaaaaaaaatatttgaggagcccgacacaatttatcttttgacgcagcatggcaacaatgtgttgcacctgatgaagcgattggagggaatgaaaatgatgatggtggcgatgatgagaacggcagaggaaacaacagcggaggaagaaacaagaagaagggcggaggaggtgggcagaaagacggaggagggagcaaagacggagcaaatggaggaggaagagaagaggaggagcaaaacgacaacaatggaaagaggggagaaagagagagagaagaggaaagaagagaagaggaggaggaggaggagcaaaacggaaacaatgaagagaggggagaaaaaaagagaagggaagaagggagaggaaaagaaggaggagaacaagacagaagagaagatgaggaggacgaaggaagaggcgaagaagaaacaagagagagaggagacgaaaaggaaacggaagaagcaagagaaaaattgaagagaggtgaagaaaaaggaggaggagagaaaggaggaggaaaagccaaagaaggacgaagcgaaggaggaggaaaagccaaagaaggacgaagcgaaagtggaggaaaagccaaagaaggacgaggaggaggagcaggcgagaagaaacagccgccgcccgggtcaaaaatggtgggacatttgttattttgtgaaatacgaaaacgcaaatgtgtattggccatcggaggtcaatctttatga

SEQ ID NO: 81487 - DNA, 344 bp, Heterodera glycines
attagaagaggtacaacagtgatgagaagaggtacaacagtgattagaagaggtacaaaagtgattagaagaggtacaaatctgatcagaagaggtacaacattattagaaggggtaaaaactgattagaagaggtacaacagtgatgagaagaggtacaaaagtgattagaagaggtacaaaagtgattagaagaggtacaaatctgatcagaagaggtacaacattattagaaggggtaaaaactgattagaagaggtacaacagtgatgagaagaggtacaacagtgattagaagaggtacaaaaattgaatgcaatttattataaattttaaaaaataaa

SEQ ID NO: 81488 - DNA, 411 bp, Heterodera glycines
atggtgtgtacgttcgtcttcgagattttcttcaacaattcgttgctgaaaaaccggcccgtgaatgcttcagtcgccgcagccgatcagaaattgcgcaaagatgtcgccacggaatgtgccaatgtcgtcattcatcgccagcagcagaagaacggaagtgccatcatgcagacttaagcagaggacgagtggaatgaatgatgctggtgccaacaaaacagtcaatgcgatgaaacgatatatgtaaagcataatatgtatttctctgctgtattccattgtatattccattatatcgctacatgtgaatgcattgtcttttatgcataaactcacacaggattcggatttatcaatgtttttttgtcagatttggaccatccaaatcagaatatttctgaaattaaa

SEQ ID NO: 81489 - DNA, 411 bp, Heterodera glycines
atggtgatcaacgacagcgatgatgagaacagcggcgatgtgccgttgagtgacgaggcggcacaactgctccgacaggtccttccagggcaatgttcaaagttatgggactggcaaatcagtcctgtcgattgggatggcactttcggctgattagtttgatccgggagtcaatgaattgcgttttcccctcaggttgaactcggctacgctcaaaattcggcaacaaattgcgacaggagttcccaaaagcagcaaacaatggccgacgatcagtgctcaggcctaaaaggcacttaaaagctagagaaagccagcaaaaattcagtataaaagcaacagtgtgcgatatgtttttaatttcagaaatattctgatttggatggtccaaatctgacaaaaaaacattga

SEQ ID NO: 81490 - DNA, 871 bp, Heterodera glycines
atggtaagcgacggaattatggaactgctcgaccggaacgtgatcaacaacagcaagaaaagcatgttcccgggtcgagtcgttgtttgttttgcgatgggctctcacaaattctacgagctaatggacaacaacccattgttttgtaagttgtgacaaataatttaaaataataatttgtgcttttcagtgtttgcgagtgccggatttaccaataaaacgacaacgataatgcaacaaagcaaaatgacagccatcaattcggctatcgaagtcgatttcacgggccaagtggcatccgacacaattggcacttgtttctattcaggtagaaccaaacgaaaggaccaatacgtaaaatcgggcgcaagacaaaagccgccgcaattttttttaattttaagaaaaaatattttttaaattaattagcctacataaatcgaaaatttttttgtttttgcggcgatgttttgggggagtgcccgtaaaatcgtaatgagatgtcaagttttggactaacttttttatttgctggccaaatccaacaataggtacaaaagacttggactgggccgaaacgacaccgcactagtctgcgaattggattttattaattaagaatgaattttctataatttttaatggtgaagtaaggaattaattggcattctattttttaaaattttacttggcggggaaaatttccacaacttggtctcatagcttgaaattttgggtgtaagtcgataaaaaaattagcgctatttttctttttgtttcgctaatttttaatgaagaaaatgattgtgtttttcaatacttttaaggatttgggggccaagtggactttattaatggcgctgctctctaa

SEQ ID NO: 81491 - DNA, 2394 bp, Heterodera glycines
cccccgacttccacaagggtttatttgcgccattttctcgccctctctcaaggcggccatgcacaaagcccggagtcgcacagcaattcaacattctcaaatacttgctgttgagtgctaaaacgggatttggcgttgaggatctgatcacggcataaatcttttttatacgcccaaaataaatgcctattttcagaatatttatcaaaaatgggtcagtccgcggggctcaattcgaagtgacatttacgtggtcgggtcgacaaatgcgggaaaatcgtaagcaaaggaaaacacatgcaattaaacagattgtaatcgaataattttagtacacttttcaacgccttccttcagtccgatttgtgcaaagtgagggccatggatttggtggagagagtgtcggtttctttgttttcatttgtcgtcacctttaccttcccctctttaggaccacttcaatttggcccggcacgactctttcgctgctcaaatttccgataatgaatccgtccacgcaacagctggaagggggaataggcccaaaaatgtcggggatcggggtcggggaccggggagctcggggtcggggcttaaccctacggtaaagcaacagaaaattttatttttcaaccccgaaataaactgtacagcacagtgtgatttttgtccaaaatctcaatcactcatccccccatcatactgtaattccgagtcagtatttgtcgaaagccaagatcacttaagacaacatgtcataatatgtcaacaaatcataccgtttttttttggggggggggtcgtagtgaagggcaaaagaggaaaattctgaaaatttttgcttattttcttaacaatttcattttttggtgaaagcagagattaaaatggatgtaaaagctgcaaaattttccggcggctccttttggcacgtaggaaggaccacaaaatcatattagcttaatgaaaaaaaattggctctaaattagagttgtacgggaccgggactggtactgaaaaaacgtacaactgagtacctaatttatctttcggcaccaaacggacccccaaaattcttaatttctgcataattatcttttgatttacaagtcttgagccccttcgtaaacttaggtgtctaaccatcctccttgacctaatctaaatctacagtaattcatactgactgtaataccgtacctcccaatgcggtatttcgcccgggttgtaagtcatttcgtcaaaatatttctcgtttaatgtttccaccaaaatgtctcggtcccaaatgccaatgatcggtgtgctgatgccaatgtcttcaacaattgtgtttgcgcttgtgaagggattcaaaagggccttaacatttgggcaaaatgaaataattgccaaaaattgatggcattatgccaattcagtcaaattaattgaattaagtcggcaaattgaacagtaattaaaaatagggaagggttgaaattttatgtaagaaaattctagcatttttgtgcctaaggcttaaaatcatctcacgaaaaatttaatttgctaccgaaagaatttttttttattaataaattctttcaaaaaaattccaaaaagtaaaaaattaaaaaacaaaaaaaaatgaaaaaagtcactttttatatagattcctggcgcagcgtttttatgtacacaaaaaaaattaaattttttttataaacctttttgaaaaaaatttagattttattttctaatgaataaagtcgaactttttaaattaaagtcggcagaatatgcccaaaaattgtaaaaaattattaaattttcaaaaatttgacaaaaaaaattcacctcaattaaatgtatgaaaaaatacacatcaattccataatctgctttaaaaacaattcgcttgataaatggtcttccatttttgagtaaatcatcaaattccttcaaatctcttggaccgatttgcattaccaactttctgtctggtcgaattctaattaggaaatattttaaaattaaaagaataaatgatttctatgccggaaattagggtggaatcaagaaaaaaaaaacggggaaattttcccaattttcccactcactccgatttttccaccaatccgtccacgcatgagttcatcattttgcgatacaaatccaactgttttctcttgaatttattcgcattgaccatcctgagaaatgtgcccttcatgctgcgccatggggtcacttcttcggacggtcctgcgccaatgcctcgttcattgatttgggctcgagcgtcctggaaaagggccagagagatcgatcgcatttgtccttatttctatgatctgtctgtccttaaatttccaagatttgtctttattgaagagtttcacccttacaata

SEQ ID NO: 81492 - DNA, 725 bp, Heterodera glycines
atggggcgacggggatactgtaggagcagccaccgtaaaatggggcgaaattggccgacaaagctgtggtggtgcaagcaaattgctgaacaatttacagaccaacgaagaaaccatggccaacggcatcgacaagaagggctcggcggcattcaaattggatggacacaaatgccaacagcgacaaaagcagaaatagtgggagcaacagcaacattcaaccaatccgtgagtgcaaaatggataatttatagctgttcaaattggcaatggaagccggtttattttcaagttttataaaaatggattttaaaaaaataaatatcgtatgcgtgaaaaattttgaaaaaattttgcagactgccggtagtcctttagccaaaatattaccctgctaagtcatgtcattatgaatgacaacattgaacaaagttaaaaaatcatcttgttcaaaccattaaatttttgtacataaaaacttcagctaatattaattaattattaatgctaaatttattttatttttttacgaaatcttgaaattttaaaacatggtcaaatccggaaaaatttggtatcattcaaccatttttaggcaaatgcctaaaatttgatacgtttaggataagcaatggaaaaacgcgtttttagcttggtttgaggcttctacgaatgacttttataatgcatatttttgtcaatttctggatttttattacttttga

SEQ ID NO: 81493 - DNA, 438 bp, Heterodera glycines
atgaaattttctgtacaaattgaccagctcttcctcctcatctttctcttctcgatggttcgcatttgtaagtgtgtcaatgcgatccctttgctcactttattcattttttaaatgaaataaaataatttttttcattttttaaatgaaataagtaattaataataataattttttcgctataaaaattatacctcaaattgagcgaagaatcgtggtggtaatttgttgaaaggtcaatttgtgacgggatttcgaccttttgaatgccaaaaggagtccaacattgatgaggcggtgccaattcttcgcggtgtttattgtccaaatttggggaactgtaataaaaatgataaattcgaacaattagcaaacggcttaaagctgaccttgacgtccaaagatgctgcatcttgtcaagattcgaaattccaataa

SEQ ID NO: 81494 - DNA, 768 bp, Heterodera glycines
  unsure (1)..(768): unsure at all n locations
atgatgatgatgctgacaatgataatgatgtcggaggattcaatgagtttgttggcccgacatgggctcagatggtcaggcgaaaggtaaagcgcaaatgttttgactgtgctttcattcatttgttttgccattgatcagggctcgcaagtgtccttatttctaagatttgtccttattttcaggcttcccctaaactttttaaattttttctttttaatgatttatttcgctgatttttgagaaaaaaaatccttaaatgaatctttttaagtaaaaatttacataaaaatgttaccaaaacttccaattttcaaaaaaaagaggtgggggggggtcatatcgaagggtaaaagagagaaatttctgaaaaataaatttagctgatttcttaacaaaaacgttaaaaattctttaaaaaatttttcccgcggcgcctatcggcaccgccggacccaaaaaatttctcttaaaaattagcccaaaagtgccaatttatattgctcatttgacccccttttcagtcctatttgcgccaaaagtcccattcatcgccagcaatcaacagaaattgttcgacaaaatcggttgccggcggcaatttgtgaagaatttttggcaaaaaatcgcgcccaatgtccaattgatttgattcatttgttacaaagtgtttatgttgagaaaatgtgtaagaaaatgccaagatactggtcatgtttaattgtaatattattccatgttatatgtttnttttatgtatgttgttag

SEQ ID NO: 81495 - DNA, 4433 bp, Heterodera glycines
atgttgcggcaactagaggagaccgatgcacgcgaatggaatgcatttgatcagttgatgtcaggcattcggcgaaaaaatggagaagatttggatgatttggctgatcgcgtaattactttagtcagacgtgcctaccccggattaactgaccatctcgttgatgactatgcaataaagcatttgatcagaacctttgaaagctctgagttagctttaagtttggaaatgggcagaaggccgggaatgacattcgatcaatttgtggggatggctgcgcgcgccgaggcaacgcagaaagcaacgcgtcgcattgcatcaaataatgcttatggaaaaacgaattttggagcaactctaacacggcaaggtcctgaaccgaaaaccaattttcaacattccactggaaaccgtccaaaatgtttttactgtgaaaaagagggtcatattgcgcgaaattgtttccggcgtcaggcggaagaaggcaatcagaatcataattcgcaacaaaatcataatgtgacgggttcaaataaaaccccgttgtccttgtacccaagccaaagtcccgcttataaacccgaaccgaacaacgcaaatccgcaacgcccacaaaatacgcaatcacgaaattttctcaggcaaaattacttagtggaacaaaaagacttaaatcatgagtcagcggatatcaaatgtgctggagtgatcagcaacgattctaagatgttggaatttttccaaaaattttggaaacaaaacgatgagaattttgagccaaattcaaacgaaacttcgttagttgggaaaataatagcgatcacggtcacaatttttgatcaggaagctccgtctatgatggacagtggagcccaaatttcactagtgcaagcgatcttcctcaaagagctgttcgaaaaacaaaattttggaaaggaaaagatgattatttttcctaaaacgagaaatgtcgttgacgttaacggcaagcgcgtcgaatgctacggcataatttctcttccagtcgctcgtagagactgcgagcctattaacattcaattccatataacggatgctcccattggattaccaattctcctcggaacaaatgctttgggcccccttggtttcaaaattcttgattccaaacatggcgagcttatcgaatttgagcttgctagtgaaaaatctgattctgttcgcttaattcacactataatgctcgagccatattctacaaagttggtcgaactttctgtttcaaagtcctttgatcagaaaaatgttttaattgcgtcatccggcgtaataaacgatgtgaaagttgaatcatcagtggacagagtgagaaatggcaaagtgttcgcttcgattacaaatttttcgctaaattcgataattttgaaagagaatgaaagggttgccatagtggaaactgtcgatgaaattgctaatgccgaagactgcttaaccaattcatggctatttgataactttcaacaaaaaatcgactcggaatgcagaaatactaatttctcagaatggaccccaaggatcggtgcccttgacagtgataaagcaaagacacttgaaaaagtgttactggaatctaaggatatttttgcttttaatgacaatgaattgacccaaacggaaatgataaagcatcacattgacacaggagaagagagtcctgtcaaaaagcgaatgagacctgttccttacgcttaccgagaaaaagtggctacaatgatccaagattatttgggccggggaataattcgtccttcgctttcaccttggtctagtccgattgttattgtaccaaaaaaggatgggtcgttaagattctgtgtcgattacagaggtttgaatgcaattaccaagaaagattgctttccattgccaaatattgagcgaacactgctaatgcttgggggtcggaaatttttctccactttggactttatttctggttattggcagattaaaatggacgatgagtcaaccgaaaaaacagcttttgttactgaatttgggttgcatgagttcaccgtcatgccatttggcttatgtaatgcggtagcaactttccaacgcttcatgtcccatttatttggcgataaattaaatgatttcgtttttgtttatatcgacgatgttcttgtggcatcagaaacgttcgaacaacatttagagcacttaaagtttgtttttgagcacataaaggaggctgggctaaaattaaaagtggcgaagtgccaattctgcaccgaggaactccaatttttgggccatgttttaactcgcaacggaataaaaatggacaatgacaaaataaaaccgattttggacatgccaacgccaaaaacaaagaaggaactccattcatttttgggattcatgacctattataggaaattcatttattcattcggttctatggctgcaccactatttaagctgttaaaaaaggacgtaccgtttaaaatggataacgccgaaatggctgcgatttcaaaattgaaagggaaaattctgagtgatgttgttctttattttcccgattttaaagctgctatggaagacccgacacgaaaatttttgattatgacggacgcaagtaagaccggaatatcagctgttctttgccagcctgatcaacaaaatcggattcgaccaatatatttcgcatcaagacaatgtaataaacacgaatcgcgatactgtcccacagaattagaggctttagccgtcagattcggcgtaaaaaaattcgcacaatacattataatgattccgacaagagtattaacagaccacaaagcattaattcctatgttcaaaagtaaaaacgagaccggtaatgcgcgcgtcgacaaatggataatggaattaagctcccggtttattttggaaattgaatataatcccggcaaaacaaacataatcgcggatgttctttctcgttcgggcgcattaaaaccgaatgaaacagcagaagataaaactgtgattggacaaatagccattggaaatgaaccggactgtgttggaaacgaggcggaaataaatgaatggattgccgcgacaaaagaaagcgaatttggtcatatctatgaatttctgcaaaaacggaaattgcctgaagatcctcgggattctcagcgaattttggacacaatccaaaaattcacagtgctgaatggattgctgtattttcacgaatccaattctggaaatctccgtctttttgttccaaaaaaatttcgtacggacttaatagaagaaagacatgagggtaaatgcgcggggcacttaagtgggaaaaaaatatttggacaattagctgaaaattatttttggccaaatatgcgagctgattgtgttaatgcggcgttaaaatgcaggatttgtgctcatacgaggagtccacggtcaaacgtcccacaattaaaaccagtaattacatcagaaccatttgaactggtctgtatggacatactttccattggaatgtcagagagagggaacaaatatgtgcttgtaatggtggatcattttactaaatacctgataacagcagcaattcccgacaaaagcgtcgaaaccgtcgctaaagcatttattcagcaacttatccttattttcggttcccccaaaaggattcattcagacaaaggtactgagtttgtaaacaagacatttgaagaaatcacaaaaattctccgagttgaaagaagcatgactgcggggtacgatccaaatgcaaatggacacgcagaaagggctaaccaaaccattttaaatatgctcaaaaggtccacagaatcaaactggtcatgggacgatcgcctgccatttgtaactttcgcttacaatattgccccatcagaaactactgggttttcaccttttatcttactttttggacgaccggttaaatttccttcggcaaatggtgtgaattttccagttaatccgctctatacagtggatgaagagtcatatttgcaacttttccgtgaaaatttgcagcaaattttaatgaatgccaaagtcaacgcagataaagcacgggaaaaaatggaaaattggtttaattcacagccaaaagtcactgcaaacaagtacaaaaagggcgagcgcgttatggttctttttcctggtgccaatcaaagagtagcacataaaaagctaaaatggaacatttttggcccctacgaaatcatggaaatatctacgtcttcagcaaaagtcgttccggtggataaaaagtctgctgaacagatttctgtgccagtggaacgactaatacacgtcccagagggaataccaaacatttcaacagttccacgtggaaaaaatgcttacaaaaatttgttgaatgcgatgaccatcttgaaacttttggaactaaatgatgttgaggg

SEQ ID NO: 81496 - DNA, 671 bp, Heterodera glycines
atgatcagtcaacctttgttgttgctggttggggccgtacttcaccatattgttcgaatgacagtaagccaggcccaagcaaacaattgatgtacggtcaaatgaaaatcagtgcaccagagaattgtcaaagtgcatcaatcaaatgtaatttaaattgaaaagcaaaaaataaataaattaaaacattggtttagcaaaaagactttcaattgctgatgatgatgataattcttctaatgataatgagcatgaccaaatcatttgtgttcagcctgggccgagcataatcgaaactgtaataaatttaaaaaaaattaaaataatttttacttttagggtgacagtgggagtggattaatgaaaaacacaacaatatttgggttcaagtgggcgtctcaagccaaacgacttgttatcctacagatcctacacgaacagaaggcctcacaggtgataattattattttttaaaaattacttgttatttgttgcaattaaaattgccaacattttcaaatcttcttttatttttttagaacaaggtccatttcacgaggaattaaaaatcaatttttcaaaacattctatgccgaattatatgttatttttttgcatttaaggacgtattcacgctttagaactttttttccccaaaaaatcataataaa

SEQ ID NO: 81497 - DNA, 673 bp, Heterodera glycines
  unsure (1)..(673): unsure at all n locations
atggacgcgcaaaatcgaggcgaattggatgaaagtgctctcctggacagccatggtaattcggtgtttcacgaaaactcccaagaacaaaatttgggtcgagaaaatggtcgaaacatccagcaacaaaatttggggataaatttggaccagcgaatcgcccatttggatctggtagataattgggagttcaaccctcatcttacctcgaccccaaatgttgcggcggcacgtattcgtcagcaagaagagaatttggcgataaatcgtcaactggcatttcaacagcatttctttgcggaagaaaattttgcggcgcatccaaatgttgttgccgaacacctcgaacagcgagggcaaattcatttcgcaccggcgcgtcggccaatgaatgtgcagcaacgccaaaacgccgattatcaaccgcggctaacgcatcaacaaaattatgcgcaatttgaagaacgcgcttaccgtcaacaaaacccgggaaatttgttcgtgagaaaccaacccgcgcgttatgaaaatgcgaacccaaattntgggtatggaacttcgggacatgttatggccgatccagcaggaggngcacaacccccgatcagcattttggagtacgtgctcattctcgatcgacttcccgaactaaaagggaatgaggcgctgacaa

SEQ ID NO: 81498 - DNA, 1793 bp, Heterodera glycines
atggcacccaaaaaattcatgccaatggagttaatcgtggaaattgtcactttcctccaatttcgtcggcgatgggccaatgttcgcgtgtcgagagcatttgatcactttctgcttgaacaaattggcttctttttgaccaaaacgaactcatcggtctgtgacaccaagcaatatcattcttgaatttatatatttttttaatattttgccattaacccgttggatttgactaacaaaattttacagaattctcggaaataactgtaaaaaataaataaataaggtgcaatttacaaaatgtattaagaaaaaaaaaatttgttttttaaattaagattttttgaattttaaagcctcattaatcccctttccttgcgcttacactataaaattttaaattagggcttaacatttaataataaatttcaggccaagcaatgcttaacagagtttggacaaatggtcaacaatttaccatcaaaacacaagagaaatgtttttaatgaaagcgcgcgtgaattaggtgtaaaattattgtttggaagtgagttttattactaacagttttattgtatttttgaggaattcctccccgactttgctcatatttacataatattgaaataaattatttttgaatttgtactgcagagctttacaggaaatttttagctccattcagcattaatcagcttacaaattaaagaactttgctagtacgactcagctgaaaaaaatgcacaaatttcttaaaaattatgaaaattttaatgcaaaatgttcttttaaaaatggaaattggtttaagaaataattaacaaacaaattcaattcgaattttcttatttcatatattaaaaaataaaaatttgctgcccaatttttttgcccaccattctcagcagaacaactgtctattcctggacaattttgaactttttttttacaaatttttcggggttctgaaatggttatggttgccggaggcctgaaaaaaaattgtgtaccaggcccccgaacctgctagagctctattagatatcatatggttcatccagaaatggattccatacattggacaaaaaattgaatggaggccggacaagaccaatacggtattagaatttaatgaattattattattattatattattgttttaattctaaaatttagatgcaatttttgaatgcaaattaagaattattaaaataataaatttaaatattttttggaaattgtcgaaaagccaaaaagagttttatcagcattatttaaaatatttattaaaaataaatatataattcttaaatttaggacgacatttatctagcaacagctgaacaaattgtacaacttttgatgaccaattatgagggaaaaactgccgaattgatgactcatcatattcaagtaaaaaatgaaattgaacttgcagaaatttgaagacaaatatggccaaaataattccaattaatttttaatttaaaaaaagaaaaaaaaaattttttttcctggtttttgggccttagtttaatttaaattcttttggaaaattttccgaagaatttgttgaattgtattaacaattttttgaataaattttgtcattttacactctaaattttaggctttttagagcctattatccattttgtttttattgcctaatttggcgctttttagagccaaaataatcccgacataatgatgtataatattttaaaactttattttcagcattggtcggaacagattgccaagctcagtactaccgtatggattacttaa

SEQ ID NO: 81499 - DNA, 943 bp, Heterodera glycines
atgcccagtggagaggggccgaggaatgtccacaaatttgactttggattcaaggaacaccagcggataaggtaagatttttccaattaataaaaataaaataaaaaatagaaaaaatcaaataaaaatcaaaaaaataaataaacaaagaaatttaaaataattatttctaaaaaatttaatgaagcaaaaaaaaaattttttttttttaaagaataaaatgaaaaaataataatttaatgaaacaaaaaaaaacaataaaattaaaaataaagaaagtaaaaaataaatttaaaataattatttaaaaaaaaaattaatgaaacaaacaaaacagaaaaaactaaaaaaataaagaaatttaaaataaaatgagtttaaaatatttatttttaaataatttaattaggcaaaaaaaaaataaagtaaattttaggattgtgaatactgataaattttgccttttttacgcactggcatcgtcgatgaattatttaattatggaccgttttgaatttaatcgatttatgaaaaatattgtgagacagagggatgcagctattgagcttttacgtaattgtggaattgatggaaacgaaattagttatggtgtggagcaattgccgaatgttcagaaatattgggtgggttaaatgaaaaaatgcaaaattaataaatttttcaggatgagatttaccccggaaagtaccgggttgtggcatttgagaagtcagctgatccgcggaaatcgatccgtgttttgtggaaggcccctatgggacgagagaaggtcgtaccgatatttttggagaatggtcactgggatggtctgaagaattatgtctgctttttcaaccgtgggaggaagttctgcgttgaatgtgaatgtttttacgatcaggatgtttatcatacgatggattgccgggcgagatgttattga

SEQ ID NO: 81500 - DNA, 413 bp, Heterodera glycines
atgccgatcgaggagaaggaggaaaaagatgtctacagaattgtagttagggtaagttctacaaataaaatcaacaaaaataagtctttaactccaggatttggagactttgcaggattctatttacaagggggaccagaaggagcatgttattaattatatttcggtgagagttacgtgtacggaatgctgtgatgacaaacgaattgcaaaatttgtggggaggagaggatcaaggattggagcgaggcggagggacatgagccgaccaaggattttgtggagtggattttaactgcttttacgaattacgatacgtacatatttgcacataacgccggacgttttgacggtaatgaaaaaaaattaatctaaatttttaaatcctaaatttttaggtcattttgttttaa

SEQ ID NO: 81501 - DNA, 779 bp, Heterodera glycines
atgccggtgaagcttgagtcgctgaaggcgacatttaatttggactgtgaggacaagccctttttcccctattattacaacaagaaagaaaattatggaatacgattggaacatctgccaccgatggaggactattcgccgggatatatgaacaaggataaatttataaaattctaaaaatggtaagaaaagaaggacaaaattaacaataaataatttttcaggtacaacgaaaacaaggagacacctttttatttggatgatgaattgaaaaattattgccgaaacgacacggagattttattgctgtcaattattgagtttcgaaggatattgattaacgacattactaagggatttgacccactaccgaggagttgtacgaatgcgggggttgcgatgaatatttttaaggcaatgtttttgttgcggagcagttatcgattgtgccggagaagggatatgagcggtgtgatcgcgccagtgtgatggcaataaagtatttggagtggcggagccagcgggatggaattgagatacggcacacggggaacggacgagaggtcaaagttggaaaatataaattggatggatttattgcgaataacggagctagggacaaatgcatcgaggttatgggatgttacatacatggatgtttgaattgttatgacccggcggcggaactgattggaggaaggacggcccaggaattgaacgatgagactcaggagagattagtggagctacggaagactttggatgtcgaagaagtttgg

SEQ ID NO: 81502 - DNA, 1263 bp, Heterodera glycines
atgttccttgtctttaatagaggttataataaatgataaactaatcttctgttggaaattttacaaaaaaaaaaaaatttgtttttttatgaattttggaatattcattttctataatgctcttttattaaaatatttttcgattcataagttgaaacatttttgtttttattaaaaaatattagatggaaggaaaattcaatatttgtttttcactggtttattgtttatgctgtattcttaggaaattacttatataattgtattatttttattttttattctttatttaaaaagtgcataatagtcaatatattctaattaaatttgtaatttgttatattttatgtttttatcttattttttagttttctttttcggtattgcttatttctctaacgcactgagaagcaacgaaacataaataaacagaacgaagatggtaataatcgttaagagacacaatttgtggtcaagcaaaaaggtgtttttaaaattgaaaaagtcactacaaaaattttaataaattttaaaaaatggattattctataagttttaattttcaataatactttatagtttataaaattaccaagttaatttttgtgtatccggcgccattgattgtagagctcatcgagctttacaaaaatccgctggtaccggcacgcttagcttgggttggccatcgacatggtccggggcgaggctgaggatcctccggcatatgtcccgacacataacgggctccaagtgaatggatcgagaaccggaccgtcactgagtttttttggatcgactcaccacgaaaaaatgctaacgttataaaatttattattatttaaaaattatttattaattgttgatagatttaattttaaaaatttacttttcaattatcttgtcggcattttaaagttttatgaattcttttttttctaaaacagaaaacaaaataaaatccaataaaaaaaaaaattaaaattttgatgtttattagtatttaaagataaagaaatttaataataaaatgtgtattaaattatacaaattttaaaataaatctatttaatttattaaaataattttagacaattgtaaaatatttcaagaacttgtggatgcgaattgcacgaaattggctgatacaaaaataatatttttattctattgtaaaaaaaagataaattggagaattattgagttactttaaattataaaaactaagcaaaattaatgacttttcattccttggtataagaa

SEQ ID NO: 81503 - DNA, 146 bp, Heterodera glycines
ataactatgtctccagggattacccaccattggccgttagctaagttgtctgtcacctttacccccagcggtttgccacccttaccaattttgggaagcgattttattcataaccgttcacatgcggcattggtccccgaatggca

SEQ ID NO: 81504 - DNA, 1125 bp, Heterodera glycines
atggacagttttgttaaaacacccaaaatttcaagaccactcccaactgagctgctattggagcagatcatgtgcatcccacttatgcgtctgtttaactcaaatggtggtaatcagatggtaataatcgcagttaaacacttttttgttatttaggaccaaaatcaatgatcagcgcaattaattggaaatttgaagttttacgcaatgaacgaaaaaatgcacacataaaagctaaaaaaacaattgtaattttgttttgtttttaaattatcattcttatttaaaattaagaacgaaattgtgcagaaatttaacatggcaagcaggacgagaaaagtggaatttgaggggggcaatttggacttcagttcacttcgtgaagaaaatggattgacgaaggatgaattccgaaaaggagtcctactgtatctgtgctatgggggaaatgaaaaggcaatgttggtgaataacgttgcgattaccgttcccattctcaatgtaatttttgaaaattttattttcgtttaaaactttttattttagtacattttcattcgaccacttttggagcaattatttgagttcatcttggagtcaccaaacccattcaccatgcaaaaacgaatatgcgtgggagggcatcatccgattcatttgcccaagtcccttagtctgcctgcacgtgtcatggccaccaaagggattcagccccaggtccgctcggatgacaaagaaatttacaaccttttcaatgtacatctaaaaagagtggttggacgagtcacgattttttatcatattcgatttgatgatacattttcagttatgagtagccatttcgtgttggaatgctaatctatgaaaaatccaccatttgtatttttagtcaggataaataattgcaaaaattcttgtcggaaaattcaaatgaataatttaacatatggtaatcaatcattttgatttgagctgtaaatttttaaaattgtcggcaactttaaaggaattttcttttaataatattcaaatgtgatcaatcatttaatcatattttagtttaggtcgtaaaatatttttaaaatgtcggtatgataaaaagaaatattttgagcattaaataaa

SEQ ID NO: 81505 - DNA, 662 bp, Heterodera glycines
atggcgtcgattgtgttggcagttatttggcgcacgggtacaaaaacatcaccgccatccaataatgcactgctgatcaggcatccaaggtgtgttggttcgctgctcttctcacggctgtcgctttttgcttcatcaatgcagtgtttgaagatcgaggaaagaagactttcgggatcggctggcacatcccggatgacgaagctcgatttgactttcgtgtagttaaatttggcaacatgttcaacgctgcactccagcttttcaacaaattcgctgggtaattttttgttggatgagctctcggccccttcaccctcctgaacggtgagaccaagcagctgattgatgaggaagccttgctgcaatgttttgggtggtggcggggtggtgagaatatcattaatagtgaatgggaatgggcgttttggaggacggctttccattttttttttttgatctaataagagaagagagagatgaaatgcggtttaaatgataaaatagcaaaaaaaaattgaatttatagggggcgaaataatggcgatggcaaatcgataatggaggaagggttggtatacggtaataagtgaggaacggaacgggtatggatacgataatatttatttgagtaggcaaacttttaacaatgtataaataaa

SEQ ID NO: 81506 - DNA, 125 bp, Heterodera glycines
atggaattgtttgttcgccaaactgccactgtgcgcggtcatttccaacacctttctgtgcatgcacggcggtttgccacgacctggcggatgggactttatgatgggaagcgcatttgtggtga

SEQ ID NO: 81507 - DNA, 1143 bp, Heterodera glycines
atgagaaccaaaaatctgccttctaagctttccaatcccgaagttttaacaagtgatgagagttcagcaagttttgaaagccctgcggggaccatttatgaatcattcgaggcgttgagcattgatagctcaaaagtagcttcaaacctcgaggggtacactaatgttggggctgaaatcgttattgaagggactgaatccaatgaaaaccctgcggggtccggatatgaagaagtgagaatcgaatgtagtagcgtcatcattgcctgcaagaagtcgcctaagtcaaagccaaatgttgaaaattcggataatttcatgagtctgtttgaaaatttggaattgacggattctgaaaaattagctaatcaatgggaaattgataaaatattagcggacaccgcaccatcgctagctggttcatcgcaaattgagagctcagtcatagggtttgtgtgcatctcacaccccatattgtgggcattggtacaaccggacattttgggtgaacagaatgagttattggatcgaaaacatttaaatttggaattcgatcaattgatttttcaaagtacaccaagttatgtaacggctattacactaaatccaaacaataactggccacatttcacccaaatttcattgaattggaacaagcaatccctattgggaacccggatcaaaacatcagatctgaggcaattaacttctcctcctaagatgggaccatcagtgaatcaaattgtcccttcgagttgttgtggaataattagggaggtgatacaaaacaaaatcacctcccaaatcatcgccattgatgtctttttatatggggaagaaaataatcaacgcttcttcacacaccaaatcgattcaagtgttaatttgatggaattagaagaaggcacacgggttcaaactacgggattttgggccaaaacttcagcaattgaatggcaaacttcgagtgatggaattcgcgattggtggactgagcagatctatgtcggaacaaacttaaaaatatttggcgctgatgaaggcgaagacaatcatcaatggctccaaaatgaacaatttctattgtcataccgttacctgtgtgccgccatggatttgcaacaatcaccaaaacggagatga

SEQ ID NO: 81508 - DNA, 1083 bp, Heterodera glycines
atcagttccttcatttccccattttcctttgatcaaaaggccaagtcttccccaatcgcctttgaacgaccccattaatccgggatttttcactctaccaattcttcttttattttggtctcttctatttctgttcaacaccatccctcatttcttgtcaacccatctctttcatttctggtcaaccccctttccccatttccctctcatctctcaaaatatttccttttaattaccgatcagttccattttccccatttattttggtcaacttgccccaatcatttcgatcagtgccattccccccatttattgatcaaatggcacaaatttagtttgggtcaatgccattcatcatttttctcaaattgcgcgcaattcttctgagcagcgtatcccttcctctttgatcagtgccattctctcccccattttcttttgatcaattgtccctcattgattaatttcatttattttgatcagttccaccccattttatttgaccaatcagtcccaattaatttgatcaggcccctccctctaattttcaattgattaaattgtgcaaatttcttttaatcagcgccacctcctccgtttttgtgttcgaattgcgcttttccttttgatcagttcccacatttttttgatcttagtgcgaacatttcttttggtcaatgccattctccattttattgtttgatcaaaattgcgcgcaatccttctaattatttacatccattcccaaatttatttaagatcagtccaaccctgaggggcccacaaatggtacctttcggtcaatcagtgccatccctttttctgatcaaatggcgcacattctcttttgatcagtgccatttccccattcttctcttcatcaaattgccccaaattattttggtcaatcgtcttttggctatttcttttgatcagtgtcacccctccccatttatattgatcaattgacgcatatttcggctgatcagtcccatcgccatctttgatcaaattgtgcaaatttatttgatctgtcccattttccccatttctatttgatcatttgtaccatttttcattgct

SEQ ID NO: 81509 - DNA, 783 bp, Heterodera glycines
atggacttaattaggactgaggatggtgtcaatcgcatgacacgtcaccttaacaggaagataaatcaaaccaatagggacttgactgaactcaaggatgatactcaaaccctgataactcaagtaaatactctcgcaaatagttatggtacagtccaagtgttgcaaaaacctaaccaggcaccaaaattcaataaccctcctatcttaaattatgcgactccctctccactcaagaatcagaacaatagctttagcaatgctaatgcttcggttcttgaagccatacctctcaacaacagtgaggaagattcccaagatgaagaatttcaattaaatccttcgggattccatcacattaacatgctttttgctcaaactagtcactctttcacattcacaattttctctggaacctcaccattagaattcgatcgttgggcaagaaagttcactgacttgcttgactgcaatggcagaaagtgggataaatctgaaaagttggcacgtcttaaggcatgccttgatggcagggctggacgtaactgattttcagttacggccatccgtaatccgtcattacggcgattttttcagttacggccatccgtaatccgtcatgacgggggtcaaaaaaggccgtaatttggcgtaatccgtaatacgtaatccgtaattttcaaaaaaaaatttttttttttttaatcacaaatcattcaattgagaaaccggttaaaagtaaattgtgatgaagaaacaaaagttttgcaagattttctggta

SEQ ID NO: 81510 - DNA, 422 bp, Heterodera glycines
atgagattttttggaatttttatgcaaaaatcgcctcccatcgattcgtctactcaacgattcgtctattcaacgattcgtctattatacgattcgtctactcagccaaaatgtgacgattcgtctactcggtcaaatgtcaacgattcgtctattatacgattcgtctactcgacgattcgtctactcagccaaaatgcgacgattcgtctactcctccaaaaaagttcgaaaacccggattcgaactcgaacaaactttaaagccattttccggggtttcctacttaaaaaagcagtttccatagtctgacgactttcttgtgcgttttggtgccttcagtagctgctgttgttcaattagtgttcgaatttatttcatttgcttaaaatgagaaaattgatttaaaataggttgaatta

SEQ ID NO: 81511 - DNA, 540 bp, Heterodera glycines
atgctaaaactattaatttctctattgattctaaatgtccaaagtgattttttatccatataaccaaaatttttagcatttacgaatttgatgttttttgtgtgttagagatgtaaaaatagtacgccaaaaagagagaaaaagtaatgcattttcatgttttatatatatcttttgaaaaattgtataaaacataaaatggctgtattacattatgcagaatttttttctctatcagtatgtaaaatttggtgtggatttaacaagtagaaaaaaagttaaacagaatgaagtaaatgttgttttttacataattaaaatgaagagatagtacgccaaggagagagaaattacaaagaaaaagagaaacgacgagatagtactaggcttttctctgcacagtggggcgtacccataggcgcgcctatgattcgtctactcgacgattcgtctactcagccaaaaagtgacgattcgtctactcagccaaaaagccacgattcgtctattacacgattcgtctactcagccaaaaagtga

SEQ ID NO: 81512 - DNA, 522 bp, Heterodera glycines
atgttcaacaatttgttgccgcagcaccgccattgcctcttcctgatgcgccgtttacatttgaaaacatttttgaggtgagtctcacaaggaatatttgggatgccaagcaaaaatattcgaaaaagggtacttttctgttttcagacccccccctgaaattttcaaagaaagtcagtttctggggttatttgtgacgctgatcacgaatatgacatttgttttgctgaattccgaaacttggacccgaactcgagcaaaaattcaaattcattaatacacaaggaaaatcatattttggtagaagttcagtttgtccctccatttttgaattttttatttttattttaagaccataaaacatgttttaaggggttttagagaaagctgatcacgaatacaacaataattttgagcaattccgaactccgaacatgaactcgaacaaaagtcgaaattttaaactttcgagttacgcattttcggttcaacaaaccagcttaatgcaaggaaacaaataaa

SEQ ID NO: 81513 - DNA, 348 bp, Heterodera glycines
atggtctggtcaaatgagcgggtcattaaatggctggaagaaattggccttggcgcgtttgttgtaaatgccgtcgactcgggcgtccatggcgcactaatggtagcaaaagggaaaattatcctaatttcgcaatattttaaggccctcgatgtaacgtttgatgtgcccgccatggcacacattttacaaattccggacagtgacagcgcacgacggacattggaggaggagttccagaaactggtggccaattgccggggcagaggcgagccgcgagatgaaaacggcaaaggaggaagcggcgagaagcaaccgcaacagcacaagacgcgatctcacaaataa

SEQ ID NO: 81514 - DNA, 1830 bp, Heterodera glycines
atgtccacggccaagaccggcataatcaaaaataccacggccaagaccacgtaagcagaaaatgccatgccacgacgatgactcgcaatgtatgagtttggtctatggatgagttgggggtgactcgatcatttcgtttttttgacaattacatttttcttttactttagaatcaatttgcttgataaattggcaaattcgtccaaaggtaccaacatcgtattcagtgccgcttttcaacagaacatcccgcttggtcaaatttatgttggatttgccggtggttcggcttctcctcaggcgaatgccaacgacggcgtttcgtccgttgcttcagatcagcgactacactttgagaatggcagcgagatcagtttcgatcaatttgtcaacagtgcgctcagaggagagacatcggtcaaaggtggcactgatcaggccaataatcacttggccaattgtgcagcaaatggagtaaaaagagaaatgttggtgccggacgcgacatttatggacaaacttcgggttgcgatacgaaacatcatacaagaatcgccgcccaatagcaaatggaatacattctcgagaatcaggcagaatttgtacttcgatataatttgtcaggttcatctttttcaattgtttctttgccatttggtgttcatcctttgcttttcaggtggtttcggtccatgtgccaattgctggtttgtccgtgacttatctgcgcgtttgtgatggcacaaaagccgatatgtgagtttattgcttattgtcagatcgatgaaaattaattcgaaagctcatgaaatttagggaaaaaaatttactgcattaattttttgtttttgtcccctaattccagtgaagacggacattctttttactccggcgtttcctttcgtgaaactcacgccgtgcaaagtcaattgtttcccgaagaagcgatcaccgacgagtgcaaagaatttatctacttaattggatgttggggtgggtgaacattttgcactttcattccatgtcatttctttttcagatacattttgcactacagccatgggcattgaggtgaaaactacacagtttctaggggtcgtcataaatggcctctgccggacggagggtggcggccatcgtaataatcggggaaatggtcaaagggatagaagggaggagggaaaagagaaaacgaacgcaaaataagacaccaaattctcttaacaaatttcattcaaaatttcgatttttttttcttgcggcgactatttttcgtaagcgctaatgtaaaaactgtgaggcctttttaatctaagccaagtcgaaagaaggggatggccttcttaaccaaagtggggggggggaaggataaattaaatcgcaagtgaagggaaaaaagaaacaattgaaataattaaaaagaattttttaatgttttcaggctggtgacattatcaaaattttcaacgccaaaatgaaaacgcgccaagacaacgttattcatttctcgttgcacgggcacacgccgaacagcgaaggacgatacaaaagggccatcgaatgtgtgaggaaagcgaagcggcgaattggggacgaaatggcaatgaacggagggactgaaaatgagggtgatgggacgggtgggaaaaggacgcgacagagcgaagacagttgagaataatgtgatggatataacgcaattgagccaaattggaacggaattttggacgttttgaatttgcattacccaaaaagtggcgtttttaagtgatgccttttatacattaaaatatatttgttttacatatttatgaattaaacccttcgaga

SEQ ID NO: 81515 - DNA, 523 bp, Heterodera glycines
atagagagagagagaggggtaaaaataaggtttttattcaccttatttttaaggtatttaaaaatgtgccctgaagcgaaagagcgctatcacaagctgaatgggctggacatcgattcgcccgagtgttcagagcccgccttcgagacaattgcctccaattatttgaaagtgagccatagggaaataagctaatgagggggggggggaggaggttaagtcactgaaaatttttgattttcaagaatgacccctcatttgtcaggtgtttgacgaggttatcagtgccgtcgagcaaacgcccgccgacgcgtcctcggcatgccaacgcctttcgtccatcggcaaaatgcaccgctcaaaagtgaatggcattaaatttgacgacttccaacagttggaggcgccctttctgtacatgataggcgaagtcctccaggacagattcaacgaaaaagccgaaatgctcttcaggaaattcttccaattttgtttgcgctttattctcgaagggtttaattca

SEQ ID NO: 81516 - DNA, 1098 bp, Heterodera glycines
atgggcatgcctccggcgcccccgtcactgcacagtccgctggtcggtgtcaggtcaccgtgcgagggcggtgtgcccggtccgttccccggcggtggcggcggcatgccatcagctgcgtcggcactaccgcccggggcaataatgggaatgccatcgccctacggcacaatgccaccgggcatgaccaccaacaacccaaacatgaacatgatgatgctgcaacaacagcaacaactacaactccagcatcagcaacaacaaatgatgtgccatcaacagcagcaacaacaacaccaccaccagcagcagcagatgaacgccgcggcggcgtcggcatgcatgaacacgcaacagcaacaacaactgcagcatcagcaggatgccattttcaaaggtggcccaccgaacaccgactgggatttaagggtggcacaggccgggatttatgggacatacgtagctaactcgctgatcaactcctctgaacaaatgatcattgctgggcatgcgtcggtgtactctctggtcaattacagtcggacgattggccgagtccgagattcagggacatgattagctgatcaattttgggctaatctgatctggccgaagcattatgtttcgatcagccggattattttcggatagttggccgagtccgggattactccggatcagatttttgagctgatcagctctggactgatctgaactggccggagtgtgatgctctgattagccggataaattgttcgggacctggcttccggcccatgagctgatcaattttactgatcgtgccgtggcataattcatctgcaactagttgtaggcatcggcctgatcaaaatgacatttagcctctaatacatttttgacacactattttcatagggaaattggcgattgaagtttttaaaattttttaaaaatctttttgtgttttccagtgcctggccgttcgccctcgtcactgaagcgtgcctcgttgccgcccgcatccgccatgttcacgccgccgtccacgctgatgccgatgccggagcagcgaatccaactcagcgggcagtgccaagcgtgccgcttggaacttag

SEQ ID NO: 81517 - DNA, 1015 bp, Heterodera glycines
atgatctccaggagggcaattattatttgggccattgctttgttggcattagcaggtatactggctgaattggcaccatttgatggcattttaattgatgtgccaccaaattttcagcgatttcgcccaacttttccaccgctgacaaaggagttgacgctgtcgatgcggcggacgaaatcattgacgacccaaaagtggaggtgccgaagaacggcgttggcaaaggcaccgatgaccaaacagtgcagcgggaggaggaggccatcaaactggagggactatcagtggccgagttcaagcagctcagggagagtgcggagaagcatcaattccaagccgaggtccgcgcgaaaatggaccaccaaatggggctgtttggaattggaggatggggcctttttttgacaagtcgacatcgaaaatttctccgaaatgtgaccccaaaaagcctgacattcacttctttccgcgatcgagtctcatgaattgcggactttaactcgagaaaagcattgagggttgaacaaatttgtgagaaaaagtccccaaaaattttaggtcctgaaaacagtgccgattgttttttttaattagcaattttactactttggtttcccgcccccccccccctccatttgcgcttttcaatgttgttttttaattttgttttctattttttttgtcaataggtccaatatttaccaataatatggtaggatagatagagaatcactgttttatagatccatttttttcttggattaaccgcaaaatccaatttttttttttaatttttgatatagcccaaccccattccgttcaggtcaaccggatgatgaagctgatcatcaattcattgtaccggaacaaggagattttcctccgtgagctcatctccaacgcgtcggatgccctggacaaaattcggctcatttcgctgacaaattcgacagcacttgcggccaccgaagaattgtccatcaaaattaaggcaaaaaattttcaaaatttt

SEQ ID NO: 81518 - DNA, 1156 bp, Heterodera glycines
atgcatcgcgaaatccgcgaaacaatgcatatgcaactgcacagatgcagtgacagttggtgtggtcctagcgacccaatttacgggcggtgcaagaaggggttcccagccccttactcaaaatgtacgattttgcgcccggacaggcccgcgatgtatttccggccttcaccaactgatggtggtgcccaattagaggtaaacggcctaatatacgacaactcacatgtcgtgccgtataatccttatattctgctacgttaccgagtacaccataatgtactgtttgcatatggtaacaaagcaaatattaaatacgcactcaagtacccttttaaagggccaggacattgttatgtcgagtgcaaagaagagtccggcaataaaatcaaaattgacgagccggctcaatatgccaagatgaactttcgtggtgcaacggaagcatatgccattgttcattcaatgccatttgcccgtctttcgcatcatgttgtcaaattggcaattcatttgccaaaccaacagcccattgtatatagggctttccagctggtgagcaaagctcaacaaatccagcaaggcgaactgccagaaacgcagtgttcagcctattggaaacaatggcaaaatgagtggaagaatgatccaaagtttaaggacattcttttcgaaaaagtcccagagcggttccgatgggcaaaggacaaatgggtcctgtacaaaaggcagcaaattaaaaggccacctatcggccgaattgttcctgtacccccatcggacccggaaaggttcgcgctctattcacttatgcgtcactttcctggagacccagaccatcttaagatggttaatgggttgctttgtacctcattcactgaggctgcaataatgcatggtcttcttgaagacgacaaaatttgggacaaaactctggcggaggcagctctgtcgcgctggtcagatcagatgagatggctctttgtgagcatcctggtctatggccagccgagtaatgccatagaattgtggaacaagtacaaagaccaaatgtacaatccgcaaggcattattactctggcacagcataaagtagcagagcttgaagccctagccgacattgattggcggctgcacagctgctttaacttaagct

SEQ ID NO: 81519 - DNA, 225 bp, Heterodera glycines; identical to SEQ ID NO: 50965

SEQ ID NO: 81520 - DNA, 1634 bp, Heterodera glycines
atgaattattccaaattggtttttctattaattttctccatttcattaatttcaacagcaaaagaggcaaaaccattggtaaggatttaatttaattcaaattaaattaattttacagtttaatgatgacaatgtgctgctcgcatttgtgaagggatcatcaaaatttgagcattttttggctgatgaaaaattcgattataatcagtcggagaaggaaattttggagcaaaactatgagaaaaaattgggccttatttttttcatgagaaagcattggcattgtgccaaaattgggaccgattttgaggagtatgagcagagggaatgccgaaaattccgcaaatatttggacattctgtacgaatatttgttcagagtgtacgccggacttcccgtggtgaagccacagttttattttggcaaaactttcacaatttgtttggtgacggaagtggtgcaaagtctggcaccaatttggaacttttacttctgcccaaactttgccagcggaaaagggcacaaattggacaaactttttgtgagaaattacgaattgaaactgtacaatgagcagaggctgaattatggagcacatttggacaacaatcatcacaaggaaaagttccagggaatatttgttgaaatggcacttcaaaatgccaactacgcatttcggcacaattttgacacatttttggcggaaatgctcaaaagagcggagaaagggtcactacacttcccaattctgataaccaataatgacggttcattgatgattgaacagctggcgtttgaatcgtactttttggtaatttccaccgacgaaaggaatatttattgaaacgaatattttcagaccggagagcgcctatttgtagaatttgttagaggtcagtcctattttgaacaattttgctgcgatttggaaagagatggtaaattgaaggattttgtcatggcccaagaagccactctcgaagaaaagcaaaattttttggcgaaagaatatgagacttacttaggcattttgtatttgatgcgacacaattggcattgtgacaaaaaaggggaggaaattggggaagaaaaatggcggacaaaatgcgaaagatttcacaaatacacaaacattgtgtacgaatatttattcaaagtctatgcaaaaagtaaggaaggaattacggtagaatataatgttgtttggcatactgtaggtttaaaattaaattattatttttaggaaattaattaattttttcaaatttaaagctgaagagcctttgttgggtcagcaattccccgtatttaaaccaacgtttaatgtctcaacattaataaatgaagtattgctttatctgcacaaatgttcagtgttattttttgacgaggaactcagaaatcaaaattattatatttttaaaatacaattgcaaaatgggcacaaattgcgcaattataaggctaattttggcactttggaagaatcgctgcgcaaaaaatttgacaaaaaactgaaaacgatgcttaaaaaggcgagagaaaacgaaaggaggacgagagaatggagtgccaattacaatgacagcagcaatttgctgtgggaatcgccctttttccatagagtttcgcgg

SEQ ID NO: 81521 - DNA, 103 bp, Heterodera glycines
agcatcatcgggtcgccatagtcacgcgtaaaactattcgacgaattgactccaatgaatggacaatgaaaaagcataattaaattaaaaaaataataataaa

SEQ ID NO: 81522 - DNA, 837 bp, Heterodera glycines
atgagcgccgcacaagtggagtgtcagcgacgtgtgacccagctcaagcggcgtgcagttgagacgtgcgaagcgccggctactattcgtgcgcaagtattgcagaaacagcaacccccgtgttggctgcttttccgaccaaagctgcgacaaaaaaggtcaacgtttgcaaatttttatgccaaaatttgatttttttttttcctttgctttaggttataaaacatgttcgtcatgacgaagatgtaccacctgctgcaccactcagtttggacgcattggaattgccgccctcgtacagaatgtacaatcgaacagagaatgacgaggagaattttttgttggcatataccggcgtttttcaaattcagggacaggctggaccgcaaaggtgaaaaaataaaaaccattaaatttcacaaatttccatattaagaattttgatatttgtcgttcttcaacttcggaatggagcggtattatgaaaaatgtctacgcagatggcactttcagtttggcgccgcctttgttcagccaaatttatgttctcgcaaagtaaaagcctatgttttcacgttttttgttgttgtctttttagacgtgataaatgggtttttccgattgcgtactgccttctcacttcaaaatgtgaaatgatttacacacggatgcttcaactaattgtccaaaaatggccgaattttgcacctgaaactatatcgttgggcttcgagcaggccgtggttgctgctgtccgtacaatgttgccactctgtcgtgtgcagttctgctttttccatttagtgggaaatatgaagaaacgaattgctgccgagg

SEQ ID NO: 81523 - DNA, 57 bp, Heterodera glycines
aatgtttaatttggatgcttcttgaaaaagttatggttcactaaacttgcaaaaaaa

SEQ ID NO: 81524 - DNA, 1516 bp, Heterodera glycines
atgtactcagaagaagagatacggtttaatgctcaggcaatgataagagaaaataatgaaactaatgaagaagaagcattatttcaagatgaaatatcaatgtcaatttcatccggtgaatctccaaagcgacataaaaacgactctgtggactcagaaaaagagatacaatctcggttaaatgatcaagcaatgacaagacaaaataaagaaattaataatgaaaatgcattatcttatggtgaaaaacaaagttcattttcgaaagagattaatgtgcatgatcaatatgaaaagacaatggcctctgatgaattagaagaaggagaaattgagccagaaattagagataaagaattaccttgttggggaaatgagtcggactcaaatgcggcaaattaccattctaaaaacaacactcttccatcaccatctgagaaacggcaagagtataataaagatcatcggcatattgcagtagaaaaacagcgccaaggacgggaatggacagaccgctcaaaacatcgccgaagatcacaatctccagagcgggcagaaaaacagcgccaaggacgggaatggacagaccgctcaaaacatcgccgaagatcacaatctccagaacgcgcagaattcaacgatagctcgaaaaggcaagacctatatctaagaaacacaagcaaagataaggaccttagagtgcgatcagaccatcgtaaattaacaaactcaagaaagaattgcagaagcaattattcaccagaccagcattggcaagaatcgccatcaaagcgtcgtctcatattgcctgaaaataggtataagtttaaccattttcaatagaacaaattatattatagggcacctgttcgttttcaaattaaaaaacaatcaaaaccagtcaataagcatgcattagaccctgaccacaacaagacaaatatacaatcaccaaatgtaaaaccaagaaacaacgaaacatcatgttcacaacaaataagttctgaacaaacacatgcagaaacaaatatagaaaagcatgaagaacaagggaacaagaaagcattagatgcagaactaataaacgacaaatcaccaaatttgcaaccgtcaaacgaaatattatcgggagcagaaaaagctgacaaagaagttccaaatgtagaagcatccaacatggaaataaatagtgaaaacgaacaactacgaatgagaaatcaacaagcaaatatacaggaaacatatgcagatccaatgcaattagaagcaaatatagaaacggtccaagtacaacggaggctcacgaaaaaagcaagcatagatttgccagaatcatcacatcgaggacaaataaataatgaaccaacatattcacaaaggctagaatatataagaacatcgctcgaacatgcaaatattgaatcgagtaattccaaagacaaagaaatcgtagacccgcccgcaactacagcagcaactaatgaccagctgcaatttttattgtcccaaattcaag

SEQ ID NO: 81525 - DNA, 2598 bp, Heterodera glycines
acattctcatccagctgtgctaccagaaatgcgaacaatcggacaccggcaactattccattcgcattgtgaacgacttcggctcggattcggtggacttgcgcctggaggtggtcgatcgccctgcaccgcccgaagggtcattgaaggtgctgaacattgggaatatttttgtaaacagaaaatgctatgagagtgacatatttgtaaaacaattaggagtggatttttttgttttttttagaaatcaatttttaacggagtattttcgtttttctgtattttatttttattcctcgcttaaaacaggtgttatgatgcatatttttgaatattttataaaaattttttaccaaatatattttttttttgttttttctcaagaatttcgcttctgctgatcatgttccagacaaagcatccacattcaaaaattttttttaaattgatcatttttttctttgtaaaatgttggtttaaattgtccccttattcaaaacgaaacttttaaatatttaatgtattacaaaatcatgaacaggagcgaactacgtccggtagcggaaggcgacgcgttggcagcaccgcggcggcccggcaggcacaggcggcagcagcggcttgcgctgcggacgaagaagcaccgaacgaggaggggcgacaggacgtggcggtggtgacaaaaaagatggcaattttggtaaaaaaaatttctaatttattggatatatttttcggggtaaacgcaattgcgaacttttcatcaaaatataatatttttgaccttttttatttatttttccttaatgcatcaaggaatttttgttttctttattttattttttatattatttaaaataaaaaaaatcattcatttcaaaccgatttaaagcatacatgcgaatgcgtcgggcgtaaatattagtgtgtttttttggcatgatgatcaattaataattttccaataattctaatcaggatttttattgaattgtgaaaaatttcgcagaattcgaatgcgaatatttattttatgttatttataaataaaataattatgtttttaatgctttaattaacttcaaaattaaagagaaatttttttaaattattaaattaatatttttaattaatcaatatattacagaatttaaattgcaaatatctttttatttatattttttaaataatgatttttttaatatatttatcataaattgaataaaaaacagtataatttaattgttttattgatttgtgcaaaaaaattgaagtcaacctggcttgagtcagataaattgaattttttctaattgaaatttggagaacaaaatttttctaaaaaaataaaatataaatttcgtcaaaataccactaatttaataaattcgtaaaattaaggcacttcggcgcgccaatgatgagcatgaaactgaatcatcagctgttgatgaagacgaatatgtggtcgaaagcgatgatgacattccggcggttgaggtgggaataaatttgaaagggagggaggggggtcaaaacgaaaactttgcaagagagggggtggctctttttttcgtgcttttttcatggaaaaactttatgactcttattcctgtctattttctattttttgtgcctaataacccaatctatattcatgataattttcatgagtcaagactctcgagcatcacacaaaaacattcatgagtctcgacaaaagaatagagagttgagacgaattttttagcatcgcagcagtgtggacatgcgtcgtgaatcattggctgaaatcctggacctgggcacatccggcacaccggcacggattgggtgagccaaaatacagcttccagcagaaaatctggcaccgaattttggaatggtgccaaaaaaatcggtgccaaattttgcatcactaattttcttttaaatttgactaaaatttttcaatttacaaaaatttggcaccgaattttggaatggtgccaaaaaaaatcggtgctaaatttgtatttaacaaattttcttttaaacttactgaaatttcaaaaaaaaaaaaaatttcagtgcctcgttgttccctggaaagcgtgaagaacgatgggtcgacccattaccagaaaagctgcaatttcagcagcagaagaacaaaattgccgagctgaaatgcaaatactcgcgcgccaatgccaaaggtgaaaagccatgggatttcaatgcttttattaaaattaaatttgaaaaataaatcatttttcattatttaaacaactgataaaatcataatcaattacttttttcatcaataaaatacgaaaaaaaataaatgagaaaattcaggatatattcaaatctaatcaaattctaaaaaaaataaatttttaaaaatttcttaaatttaatgccaaaatgtttttgtttcagtgcattggtacaagggccgcaaggagctgttctcggactgtcttaagtacaaaattctgatcgacaagcagtccatcacgctgatcatcaacaacccggacccggacgacagcggcaagtactcatgcgaagcgaacggagttccgaccaattcatttatcactgtggagg

SEQ ID NO: 81526 - DNA, 2203 bp, Heterodera glycines
cccaaagcaggcgagccgcccaccgaagtgcctcaagaacgatgggtggacccattgccagaaaagttgcaatttcagcagcaggagaataaatttgccgagctcaaatgcaaatactcgcgcgccaatgccaaaggtgattattaaaattaaatttgaaaaattgatcatttttcattatttaaacgactgataaaatcataatcaattacttttttcaatttcaataaaacaccaaaaaataaatgataaaattaaggatatcttcaaatctatttttaggataataaaaatatattaatttttaaaaaaataaattttaaaaatttcttaaatttaatgccaaaatatttcttttcagtgcgctggtataagggccgcaaggagctgttctcggacggtctcaagtacaaaattctgatcgacaagcagtccatcacgctgatcatcaacaacccggacccggacgacagcggcaagtacaaatgcgaagcgaacggagttccgaccaattcatttgtcactgtggagggtatgttttggacgggcggacaaaaaaaagcagttaaacattttccacggacatttttggtttttaatttaaaaaatttacttttttatctaattaatactttcattttatttaaaatatatatatttttttcaattgtgtatatatttataatataaaatttataaaaatgttttaattttttttaaataattatttcatattaaagaaaataaattattgctttttttcaaattagataattatatttttcacataattttatatagaatatgttttattaaaagaatgcattttgtttcagactcaacagaccaacaaccattgtcctacaccgcccgtcgcagcgagtcgcgcagaccgaaaagtgccagaaaggaagccgcagcattgacccccttggacgccatgcagtggttggttaaacaaaaaaaaacgaaaaaaaagtttaattcatttattttattttttagttgcagcagccatttgacgccgccacatcccaaaaacacggtgagcaaattcgggtttttaatttttttttttttttttgtttttttttcaataattccttggtcatagtaaagtttgttccgcaccctttttcgaaaattttttccattggttttcatgtcgttgatcacgaatccggcctccttttcgaccaaatccgaatcccggacccgaattcgaaccaaagtcggaaattgattcttcacaaatgctcctttagtgtccaaaatcgattcaaatacatgaaatggccacgattccctattttctattcaattcagtgcatttggatcgatttggacaataaggatgtattttggtaaaaaaattttgactttggttcgaattcgagtccggggtacgaaattaaattatttctattttctaaagaacctgggcacattcggcacatcggcaccagaccaaccattatcctccaccgcccgtcgccacgagccgcgcagaccgattgacatggcggcggttgaggtgggaaaaatttgaggccggagtgggtggggccaaatgttgcttctcaccactttttttctgtgttttttaaaattttttttggggggtttggcgagatccgatggtgccaatagtgaaattttgaaaatttgaattttgggcttaatttttttattacataaaacccagaaattgaaatttttgctctttgttgaaataatgagttaatattttccaattttttaggtgcgctgcgcggacgaaccgctgctggccaacgcgccattcaatgtgccagggcggccctacccaccggattcactgtacaccacctacaactcaatcatgctccattgggcaccaccgttgcgggacggaggcacgccgatcactgaatacgagctggagaaacgcgagcatggcaccaagctgtgggagaaggccgacaccaatgccgaccccaaagccaacaccaaaaagcagtgggagaaggacgcatttgccaatgtgccggacacacgattcaaggtgggggaaaacaggagccgttcgtcccctccctctcgtttcatcccccccccctcgccgtaaattttttttttaatttacaattagaaatttaaacaaaatcagaaaattttttataagacgtttcagcaattttttgcaaaaacagaaaatcgttag

SEQ ID NO: 81527 - DNA, 1363 bp, Heterodera glycines
atgtttttcaaggtcatcccatttgctgccaacgaggagcattgttcgaagctcgtcaatggcgactacctgaagccagcaaaattcatcttcaacgagctgctcatcaccaaagagcttgcaaagctatccgagaacaccggcattggcgtcacgccaacattcacacaattgctcatgagcaaaatcgtcagaggtagttttttaatggagagacatttaaaatgcacataaaatggtgtaaaaaatgtttggaaaactccaattgctaaaactcatatttccgtttaggctgttttccgcccgaattgctgaccgcctgggatgccttcaagaagagaaagcctgaattggcggagaatgaacgaccggacacttatgccgatgaaggacttcatttcatagtcatcggtctttcctatggcggaaaagacctggaggcgtatacggtagctttcaaaaaaaatgaaaaaaaatgttttcgcagatcaaaaatggccgagaatgttactccatcttccaccaaatcgccttgtccatcgcgatcgccgaagacgtgctcaaactagagcaccgggatctccacgccgggaacattctcgtggaggagtgctcggtcgatgaaaaaattcggtaagtagcaaaaccgatacactgggaaataatgcttattttaaaggtataagtaccttggaaaacaaatcgctgtccgttcaaatggggtgcgtgcctccattatcgactattcaatatcgcgcatagaaaaaagtaagcattaaaatttttctcattaattgtgttttcacaaaaccagaaggcgttgtgttcttcgctgatctcagcgaagaaacgggacttttcgagcaaaatggtgtcagcaaaggtggcgactaccaatacgacgtctacaggatgatgaaggcggcggtcaagttgagagaaacgatttttttacataaaaaattttttttagcgaaaattgggccaaattctggccccaaacaaatgtcctctggatggggtacgcggcaaagaagctgtttaacaaccgcttcatcagagcgaagagaaaacaagcgattgaagaacttttttcaaattttgaaaacaaatttgaaacaattcaccatttgcttgcccatcctgattttttgtctgtgttcacggcacatcaatcagcgacctacaggaagaagatcacgaaaaccggtaaccaattttttacattcccatttttcctgaatttaaaaattccaccaactttgggtgtgttttgttattttcagccaagtttcatcccatttatgagaacttctcttctccaaatagttactcagtttttgtttgttctttagccctttaa

SEQ ID NO: 81528 - DNA, 497 bp, Heterodera glycines
tgacgatcgcccattggacatcgatgagatcgagtccgaagtggcagcataaaacagacgcacagactctgggatgcctcaccactgtctgcaactaaaggtcggaagcgttgttgtcatccttatcaacaaaagtgatagggaagggctgatcaatggcacacgcattgtcctcgaagaacttggcgatgatcaccttgtcggtcgtgtaatcaatcaatagcaatgctattggtggccaagtgaggtgtttccttgaaagatctcgcaatatcttcgaggacaaaacgcctggtgggctaaaatacgcgcgtttgcagttcccaattaagcctgcattcgctatgaccattcaaaaaggtcagggccaaacaatccgcactgtcggcatttaccaggaaagggaagtatttacccatggtcaattatacacggccttctctcgggcaacggacggcaacaatgtccgtgtgcatgctcccaaaagggagatcgat

SEQ ID NO: 81529 - DNA, 490 bp, Heterodera glycines
atggcggtacgaaaacgtcctggcccggagaatccgtgcgtcggcttcgcgatactaaaaagtttcaaatttagagatgtaaaatctaaaatgtttccaaaaaggtaacaaaattaaaccaaatcagtattgagataaataattttaaaatcaaaaattgttgttaaaaaataaataaataaatttggagatgaatttttgagaaatttttgatttctcaggggtgtatttttgaaaattttcgggtcgattcttaggggtgtattttttgaaaaaaatttttaagtcgcttcttaggggtatatttttcgtttttattgcatttttattagacaaattttgggaaaaacccaaaaatagttgaaaaaaaacatggttttcgtgcatttcaggtcacggggagctcaggaaaaaataatgaaaacctataaatcgtatccctaccgttgaattgattttatttttttttgaaaaatgtgcaactaaatta

SEQ ID NO: 81530 - DNA, 1319 bp, Heterodera glycines
atgctgactgacgaagaggaggaggaaaatgaagatttcggagaagagtcgaacggagaagaaatgtcggaaggaaagggggaggaggaggagcgaatggcggagagattcggtggagaagagcagcgacaggacgaggaagaggaggaggtgctttacttgtgactctgcacttttatatatgtgtttcgttagagagaactaataattgttttctttttaatttataacttatctttaatttattatgttttttgtttttgttctgacatttcgtattaaaattttgatttttttattctgtccgataaatgaggttttacaattctaaatgatactatgttccccaaatgccaccgggaatattacttaaaaacctagaaatatcccctgaaaggatctgaaattttttgacaaataaatccggttagaaggttcatgtccatatttattaacaatcgaaaggaaaattaacggcctatcaaagtaaattcacataacaataattggtgaggtaaaatggcgtagaaacaagcttaacattgtgcggattaagtttattcaacatccaattcaatgtttttattgtcagtcttttgcaaattctcgtagagtcgagcacccaattcgcaggcaaccaacggacccgaattttgacgaacaaagcgcatgagcaacaacccgtccagaccgagcagctcatcctcaaactgtcggacattccatccctcttaaaaagggataataattcaaaattgaggaaaaaactgaccaatttcggtcgggacaagtttaaggaatgatttggcactgtaaagttggaacggacgcataagacgggcgatgaaaaggaaggaattgaagacagtcaggaagatcaaagcgaggtaccaaaagtaaaggaacaggaaaaccttcaacgaccaaaggaaaattgaatgattgtgaaaaattgtacaacaccttttcattgatcatattcacgctcaacacacatcgaacttcgctaaaattcataaattttaattcaaattctaagacattttagagaacctgagaagaccgccgtccgtatgtcccaaaaaatcccttccaaattcgcagtaggaaatgcggggaaagtaagtgaattcctcttgccatccgttgttacgccaaatggattcgatcagcttttgcgagggaatcaattattattttacaaatctttcaaaattactgtaatgccccatcgccaattttcataaccgacgaaatgagtgaggaaaaacaactgggcaccattgacaaagatgttcataagctttaaacaatggcaa

SEQ ID NO: 81531 - DNA, 331 bp, Heterodera glycines
atgccaaaaatggagaaaatcccaaaaagtgaaatcaaaaagtgtctcatctgtggcggattgtcttctttcaaatattacagcattcctagttgtgaaggtattgttatggcacaagcactttttgacgaaagaaatttgatttttaaattagtatttgtttaatattttatttcaaaatttatcttttaattattttcagcgtgtaaacagttttttcgtcgcacagttatgctacagatactatacgtgtgcaaaaaaagcggaaattgcgaactgttacctgcacacaacagtaattgttttagaataattatgaaatttaaataaa

SEQ ID NO: 81532 - DNA, 1446 bp, Heterodera glycines
atgccaaaaacgtcgacaccactcaaccaacgggatcagcatggtcagagaaaagaagctgtgcttcaagtgcatgaagccaaaccaccgcgcatcaaatgcgctcgaccatctaagtgctatcactgcaaacgtcggcatcccacggcactctgccgagatcagtacaaagccaagaatggcatcaacacgcctagcacctcttgcagtgaagagaagccaaatgccaacgatggcaagcgatcaacagtgatcgaacaacaacaaatgtgtaatgccatccaaagcaaggaaaccagagcgttgctaatgacgacaaaggcagcgatcttcaatccgtcacggccatccctcagcatgatgggaaccatcttcattgacccgggaagccaccgatcattcatctcgagcagtgcagctgaacaattggatatgaacgtcctcagcacggaagaatgctacttgtccagcttcggtgaacgagaaccgaagcgatacataagcgaccgcgttgcaatcggcattttatgccccgaccaggacaggttcattttcaacctgaacgctttgaagttcctgctgaatgatttgccggtactacaactaaacgcattggataatgacgaacttcaacaaaagaagctttccctgccgaatgagtcacggcaaccggacattctcctcggaatggacgtttggcaccagctgaatgttcaaccaattgaacaactgccaagcggatttacgatttgccaatcgaaaatcggcaatatcatcagtggaacagggcgaatcaagctcaagcaaccgtccaacatctctttcgtgctaatggtcaacaacgatgaatcgccacaaagcagtaaaacggctcagaggcagaaaaacattcaacaaaaagaaaaggacgaactgagacggcatcaacgcaacaaactcttgtccagcattgcaacattgcgatcaagacggaagagagaatcggctcccatcagctcaaaatcaatcgtgattgatctttcatcagacagcgacgcatccggcattgagatcatacaaaatccagtcagggatagacaagccaaatcaccaaatgagcattcaacggcaccaattcctatggcagtgcaacggctaacaccaacaaggaagagttcatcagttgccaagcgaccagcattttcttccagcaaacaaccaaaaggaaaagcagcgaatcccgcacaaacaagccaaacaaatgaactcaacagaaaaatgaaagccttgtcgccaaccgcaagtggatcaggcgccaaccatcattgcgtcgctacattggccagaagctcggactcaacaacagtaattgataagggcagtcaacagaattgcctaaacatgagctcggcaacaatcagtaagacaccatgccaacagcactcgtccgagaagacgttaaactaa

SEQ ID NO: 81533 - DNA, 1268 bp, Heterodera glycines
atggtagtctctcgagcgacccgcttcacttatgttgaacaacaacacacaaaacaccaaaacaattgccagaattggcacaacagcgacttgcgagttcattttgtggttctaatgatggtgatggtgtgtaagttagttggttagggtttggaaaattttttaacacaaaatgtatctgtaaaaatttattgaaaaatttattcgcctatgaatcagggctgggcgtaattacggcttacggaaatgcgacattttttgtccctcgtaaatacggatgtgggttatatttttgcgatttttgattacataattgaaaaaaaccattaaattacggttttcgttattgaaagcccagccctgctgccaacaaagagaaatattaaaattaataattttaagatttttcgaaaaaagatataatgtatgaattggtattttcattgggtcgaaatttatttttatgcaaataatttgtcatttttttacaacatatcgtatgattgcacaatgccaggtcattgttgctaaatgaaatgtactgattttttagatctgccctaatttggaagtgagcaatttgaaaaagaaaatattcagacttttaagatcttttggtgttcggcatcctaacatttggatggagcctaacatggacatcccccataggccttcgaatttgtctcagacgtgattaacgcctaccgtggaaagtgttactgaatgtgatacggtatcggcgttaaatttcttttttcaattttaattatttattttggagtactaaatgttctcttaacctttttgtataacagcaaattaacatgttttccaaacaacaaaaaattgaaaatattaaatataaaactcaaattttaatcaaaaaacttgtgaatttttaaattaattcattcatttttttgtgcgaaaattgcctcagtaaatttttattttggtttttcctgaattccctagcaatagttattatcacttttttaaaatctcatttttttcttccgaaaactccaccacaaaaattcgccacttcgaaaaatccgacctcatattaaagtttatcaaatttttggccaaaattaaaacaattttgtttggccaatttcttcccaatttcattaaaattaaaaatcataaccgcaaaatttggcattcatttgagaaataattttttcgacagcgcacataaaattaaaaaatatatttaaaaaatgataaactaaaaaacatggatgtaagtaatcaaaaataaa

SEQ ID NO: 81534 - DNA, 213 bp, Heterodera glycines
atgccaacaaacttgttcatggaaactgaatggccaaagaatacgaaaaatggtggtcagcagtgagtgccaaaacaggtcggaaattaattgccaccattggtgaagccaatatttatagatatttgttttccgattagtttaattagtgtagtccaacaattgagtaccatttcgtgatatttttggaaaaagaaaaatgtttggtcgaat

SEQ ID NO: 81535 - DNA, 1471 bp, Heterodera glycines
attttaagtaaaaaaaatccgcagaatagttacttaaaaaggtaaaaaaatatatcaaaattaggcatcaaattaggtataaaaatttcaaaataggtaccaaaataggtaaataaaaatttttattaacgatttttagtgaaaaaagcaaacaaagagggaaaatcttggttctacatatctctttgtaaacgaaaatttaaatatattaatattttattagataatattgacattttaaattaaaaattttgtcaatagaaaaaaaaaataaattttgggataaatttttgagaaaattttccaattcttagggtgcatttttgaaaattattttggtcgattcttatgggtatatttttgattttattgcatttttgttaagcattttttgaaaatccttaaaataggtagcaaaaatgccgaaataggtaaaaataggtattataaaagtgggtgtagaagctccaaaccaagctaaaaactcgttttttatgcttatctcaacgttacaagtgcgcaaaaattttaggtatttaactaaaaatcgcatccctacttgtcacacaccaatttcctattttcgtctcagtaaaaattcactatataaaatgctatcacggatcaaaatcacggaaaatttgaaaaaatcagtgatccgagatcacagcaccccaaaaaccccgtgagccgtgatcacggccagccctgctaccaacctttaactgactgatttataatcataaaatttcaattttcgaggcccttccctgggaagttgctatcggcatttaaaatggcatataaacttatgcattttccgagttacacttcgcgaggtttccttgtcaattcactgttttaggtattcgtggattttaccggtcggtttttctttcttcttttttcctttccctctaattgagtttttcaagtggctttttctcctctctgatgctttacatcccttctgctatggtcttttggtttacctattacacttttctcactcggcttaaaagtctccgtggcgagtggaaaatcagtgcgaaaagctcgggaaaaaacactgtcaatattcggggggacagcgagaatttgttggtgttgcaagcattttccggagcgttgggcggaatttgtgcgtcgctttttacaaatccgttggaagttcttcgggtgaggatacaggtaaaaactgctgaacgaatgaatagtcgtccacttctgtttttaggttcacaggacgaattattgggaaaccattcggcgtctttaccatttcgaggggtttcgcgtgttcacgaagggactggcgccgagaatgattagcagcggtcacttttagcaattgccgttgcctatgttatttttaattaatttaggcataaattcctgtttaattctgaccgggtacgaagtgataaaacgcctttgtgtgctgcctgaattccgagatgccatcgtctgg

SEQ ID NO: 81536 - DNA, 199 bp, Heterodera glycines
atgcgcacacaactttttactatttggtttttttttttgtaagatgtcctttcggcctaaaaatcaatgtattttttccaaaatcggttaataaactttaataaaaatttccaggattttacccgacttcgcctatcggcactacaaagaccacaaaccccctcaatttatttaaaagacggaatgccaaaatttttga

SEQ ID NO: 81537 - DNA, 135 bp, Heterodera glycines
tgacaggacggagatagagagaaagacgacagacaaattaccgattgattttttaatgtattgattgaccagttttgtaccaaaaatcttctcttttttctggattgatgcacaacgatgggaattgttcaaaaa

SEQ ID NO: 81538 - DNA, 1144 bp, Heterodera glycines
gatgtcatggaggaaggcctgaaaagcatggaacaataaattaaattcaaatgaattgtcaaagcaaaagcaacacctttggagagacaaaagtgccgcagaattggtgaagggaaagaagttgccacacgaaggccaaactgagcacaatttgcaacagtttgaagtagacgatcttccgcataatagaagaattaaaatttgacgggctcaatgaatgagagcaaattttccaatccctccctttatatagacaagcaaaaaaatttcgaaatgaaggggaaaaaagttgtataaaaggcagacatttcctcatttttcctcacaattcttttcatcgccctcatattgtattatattattattattatcgtccatcgtccatcgtctacaacacttcatcacacacgaagcggacgtgcgtgcccggccacaagcacaatggacgttgacatgtggaggctgccctactatcacggactggtgaggagcagtcaccgtcccccactttccacatttaaatttttttttcaactttaagctgccgcgccaagacgtagtggagctgctgccgaacgacggggacttcctggtgcgcacgacagaagaaccggactgacccacatccactccaagggcatcatccattgcgacgtcgctgccaggaactgcctctacacggacggcgtggtgggtgaaaaaaagaaattttttttttgtcatgaaacgtctaaatttgttcatttttccccacaggtgaaaatctcggacttcggcatggcgaccaaggcactttcaaagcaactcgagagcggcgcaaaactgcccgtcaaatggatgtcgccggatgcactgaccgaccacttcttcacccagaaggacgacacgtgggccttcggcgtgctgtgctgggaagtcttcaccaatggcgagacgccattcgcagaaatgcgcgggagcgtgatcttggcagcagtgagttaaaacccaaaaaatttccatttttaatcgtttccccccttttacaggtgacaaacggataccggctggaatttccgaacgacgcgcctccgaagttcgtcgagttcgtcatgcagcacatctgggacccgaagcgcaacaaccgatactccatgggcgcggt

SEQ ID NO: 81539 - DNA, 262 bp, Heterodera glycines
cataaaaatggcactgatgttgaggcagctctggaggcgcgtctttcatctgccaaggacaatctgatcagatttggcgacgaaatctacataaagctgagcggcgaccatggccagagttgtatgaagattaccgtctcattcagccaggctgctcggtcaaattctccatcaaacaatttcgtgctctgacaaaagaatcggcaaaaaagaatggagagaaaaaatggataattattttcacattaaaaaaaaattaaaa

SEQ ID NO: 81540 - DNA, 155 bp, Heterodera glycines; identical to SEQ ID NO: 51421

SEQ ID NO: 81541 - DNA, 1398 bp, Heterodera glycines
atgattgcacgtaattgccgaaaaaattcgagaccaatttccgaatgttgaccgactaattgcaaaacgaaagccgtctttgtcaaagcgccttaccgagtcaaaaaatttggaaatgtatctcataaaatgtattacaaaaataaaaattcaaaaaaaaccgaaacgatataccgaaaattattcatcggtttttttcggtttcggttttttttcggttttttaaccgaaaccgacctaccgaaaatttttcggtttttttcggtttttataccgaaaccgaccgaccgaccctcttgtccggtctctagttgaattttaattaatggtgaaacagtttttatttatattattattattataaaattattaatttcgatcattcagtagagagaaaaattcactttacaatttaatggatatagtgatcctgtcaatattttaccattaatgtaaatttataagaaagagaaaaattcatttttgagaaatatttttattattatttatttctttttttcatatcgaataaaatataaattttaatttttaagaaaaagaaaaattgtcaacaatgaaattatgcctattttcaattttaattgtatttttaattgctcaaattgaaattgtagcggaaaagaaaaaattggaacaaaaaacatttgaagaaatatttggggaaaaatgggaagaaaaagaaaatgaacagaaaaaaagagaaattgttcaaaaattcaacaaaattaaagaaaaaatcaaacaaaaagagagaaaatattcaacaaaagaatggaataaaattaatgataaaattttgaaaaaattgggcacaaatcgaaagataatttaccaatggatcaaagaattaagaatatacaaataccaatgcaaattgaaaacggatgaacaaaaaattgaaattgttcaaaaatttaatgcaatgaaaaatgaatataagcaaaaaggaagaaaatattcgacaaaagaatggagtcaaaattatgaagaaatttgtaagaaaattggagtaagttatggaacaattcaaaaatggaagaaacaatttggaatgggtgaaagaatgacggagaaagaaaaaatggaaaaagtgaaaatgtattggcaaataaaaagagaaaatccaaaaattagtgccgagaaaattgcaaaaatattgaaaattaatcgacggaccattgacaaatggaagaaacaatttggagaagaataaatgtaaacttacaaatgaaataggaatttttacaaatttcaactttgttttgagatgttaatttgtgcattttgaattttgttgtttttaaaatgcataaatttgttaaaatttttcgccctgaaacggacttaataatgataatggttttttcgaaaaataaa

SEQ ID NO: 81542 - DNA, 47 bp, Heterodera glycines
ggagtccaattatatggaaatccatatttttttcctggactgtggga

SEQ ID NO: 81543 - DNA, 863 bp, Heterodera glycines
atggccataaaatatgggccaaaaatcgcaaaatatggacataaaatggcaaaaatctcaaaatatggaaataaatggcaaaaatgtcaaaatatggacataaatttttcaaaattgaatgtaaaatttcttcaaatttattggttgaaattgcatatgagatacatttccaaattttttgactcggtaaggcgctttgacaaagacggctttcgttttgcaattagtcggtcaacattcggaaattggtctcgaattttttcggcaattacgtgcaatcattttaaaagaaaaaaaacataaaagctaaaatttattaatttttaagaaaatttaaatttattcaatattctcaagaaattttggcaaaaaaatgattttttgaaaaatttttcgggttttgggctcaaaaaggctaatttagctgctagggcccgttctaatagaggttttttggaaaaatcccagaatatggataaaaatgccaaaatatggaaaaatatggaaatatggacataaatcgcgaaatatggaaaaatatggaaaatatggatatagaaatccttcctagaagcttcaaaccaaactaaaaacatgtttttcgtgcgtttcagacctcccacagtccaggaaaaaaatatggatttccatataattggactccctaatcataaacataaacaaactcgcacgcattcagccctgcgtgacaaccgcacgcgttactcattctaacggtgctatgtcgttatataaaaaccctcaaaaagggcgttatataaaaaaccgtcaaaaagggcgttatataaaaaaccatcaaatcttattgttaccgtattaatttagaaaaaacaatcgtgcca

SEQ ID NO: 81544 - DNA, 232 bp, Heterodera glycines; identical to SEQ ID NO: 77097

SEQ ID NO: 81545 - DNA, 824 bp, Heterodera glycines
atgaaattatgcctattttcaattttaattgtatttttaattgctcaaattgaaattgtagcggaaaagaaaaaattggaacaaaaaacatttgaagaaatatttggggaaaaatgggaagaaaaagaaaatgaacagaaaaaaggagaaattgttcaaaaattcaacaaaattaaagaaaaaatcaaacaaaaagagagaaaatattcaacaaaagaatggaataaaattaatgataaaattttgaaaaaattgggcacaaatcgaaagataatttaccaatggatcaaagaattaagaatatacaaataccaatgcaaattgaaaacggatgaacaaaaaattgaaattgttcaaaaatttaatgcaatgaaaaatgaatataagcaaaaaggaagaaaatattcgacaaaagaatggagtcaaaattatgaagaaattggaaagaaaattggagtaagttatggaacaattcaaaaatggaagaaacaatttggaatgggtgaaagaatgacggagaaagaaaaaatggaaaaagtgaaaatgtattggcaaataaaaagagaaaatccaaaaattagtgccgagaaaattgcaaaaatattgaaaattaatcgacggaccattgacaaatggaagaaacgctttggggaagaataaatgtaaacttacaaatgaaataggaatttttacaaatttcaactttgttttgagatgttaatttgtgcattttgaattttgttgtttttaaaatgcataaatttgttaaaatttttcgccctgaaacggacttaataatgataatggttttttcgaaaaataaa

SEQ ID NO: 81546 - DNA, 262 bp, Heterodera glycines; identical to SEQ ID NO: 81539

SEQ ID NO: 81547 - DNA, 1111 bp, Heterodera glycines
atgcacaaattaacatctcaaaacaaagttgaaatttgtaaaaattcctatttcatttgtaagtttacatttattcttccccaaagcgtttcttccatttgtcaatggtccgtcgattaattttcaatatttttgcaattttctcggcactaatttttggattttctctttttatttgccatgctgagtcgatctacaaaaaaactcagtgaataattaaataattaattttaattatatagaacgtgtcactgaattaattataattaaatttattttataccattatatttcaagataaatttaaaaagaacaaataaaaatttgtcatttttgttctaattttttgcataaatatcttttgtcatttatggcaaaaaatgaaaaaaaagggtaaacaaaaggaatggcatgaaatttcatactaaaattgaaaaaagaataaaataaaatggaatggcttgaaatcctaggagcaaaaattgcattcgatgagaatgaaatgttgaataaaacaaaaaaaacatttttcaactttgacttcaagttttgaagcaccgggatttgaagtgtttggaattgaatcatcaagctttgaagcatcattttttgatgcatcatctttttttgtatgcgcggaaacaacaattagcttatgcatgtaacggtttaatgtacaaaaacttatcttaatatctttttgttgcatttgttcatgaagtttttttaatgttttaatttctttattttgatagcttttgacgagttctatagcttcatgattttttataaattcttcaaaaccagaattagtagtaaccgaatactcaaatagagataagaaaaaaataaaaattttattcatttttctaggttagaataatattataaatatatattttttaaataaaattcaatgtatattaattttgcagttacaggcagcgaaaattatttaatattgagtgttattgatttgacacatgaattttgtgaagcgcataatataatacaaaattattattattcactgagatttgttgtggatcgcccacactgagtttttttgtggatcgacctagcaccatttatttcttaccattttatacaa

SEQ ID NO: 81548 - DNA, 1545 bp, Heterodera glycines
atgcccctgattttcctcctctccttctttttgcagattctgctcttttggttcatcgaaggccatgcaggaccgatcgtggcgcgagagttgatgggcgaattgttcgaaacatacaagacggacatggtaatgcaaatgaataaattatttatttttttaataaatattttaataaatttatattttttaaatttaaattaccaaatgaatttaataatttttttctttattaatttaaattttaattatttcttttgataaaattaatttttttttctatctattccatttttaattaaatgcatatatttgtatttaaattcccaagtaaattaaatttaataatattttatttctttaataaatatttatttatttttattaatttaaatcaccattacttattttaattgcctatttttttgttccttttcagcatgaagaggatgacgagcagcccagtgaagtgagcgtggtcaacaagaagggcaagggctcattctcgtcgcaaagcaccggttctctggacgacgacacgtacggtggcattgcgcagcgttttggtaacggtaagagcgcaatgaattaatgtaattaataaccaatttttaaaatgattttttaattataaaaagggggtaaagctattatctatttcattgaattgtttttcaaaaagctcgagaattacggtatttgagaatttttttaccgtacactaaactcactcactcatgaaccactttatctgtttacaaattttccctgtcaccgaatatttgttacagtaactatcgtataattgtttttttaccgtacactgactcattagcctcattattttattgttactttacaacaagttttctcttgggccaattttcaacaagccatacctcaatttttggcaaatttatatacataaactgctcccctcctccccggcaggcatttctccgtccgcaccgcccaaattcctgcccgaggcgtcctccttttctcatcgcaggagcgtgaactgcttgacacggacggcaacagcacggagcagaccgggctgtactcgtcgacgcccaagcagaaattgttgcccaacgacaacaacaacgacataaacccgcaccattatcaccaacagcagcaccacaacaacattggcggacgcaacaacggacggtacccgccgcatgcaggtcggccgggcgaaaaaacgataggtggacagatacttttgaaaaaacaaatcagcaatttttgatcacttttggcactatgaccaaaaacccattgagaatttttttttatttttcgcgtggcgggaaacgaacgacctgctccgtcctgcatctctcccccacccctccgaatttttttataaatagagatttttattttataaattgcttaggggtcttttttagaaattttcaaaaatttttccaaataatttttttcctacaactttataagaaaattttgaaaaaattcacttttttaagaatttgtttttttcatttttaggttttttttattagaaaaaaa

SEQ ID NO: 81549 - DNA, 135 bp, Heterodera glycines
atcggaaggagcaaaaattggaatgatcagagagacaataaaagaagtgatcaaaagcaggaggaggagagaaggtgatcaaaaaagagataaggagaaaaggagaaaaaaaggaatgatcagagagggcaaaaa

SEQ ID NO: 81550 - DNA, 2376 bp, Heterodera glycines
ctgtcagtgtattcattgaagaattcgctgaaggagaccttaatcgaaataaacacggaggtcgagtttgacccgtacatgacagcggacgaaatcatcgccacggggcgactgaaacatttgcggacgcgggcacggagtgagttttggcatttgtgccattggaatgcaaacccattaattttaattaaataaattgaatcggcgagtaggacctcaaaatgcccacatatgttcagttgtcattgtcgaaatgggcatggatttgcacagcgtaaccgcctttatgatcgccgcctatcgctccggcatgaaaacgtgtgccaaaaaatatttaattttattaaaattcaaaaaaaaattgaaacacctttattcaaatttctcaaactgaaaaaataattgtattgtataaaatttaattattccaagtaaaaaatgaataaaggtttttttaatggtccctccatttcagctccgattacgtgtacatcatcccgtggcttgcccacgtccgtgccgaattcaaattaattatttaatttactttaatcattttttgctcagatgaacgaccattacccgtgggagtcgaccaacgtggagaagcaggaggtgaaggctgcttttgatgacgcaattgtgatcactgcgcatggctatgacaagaaattcatcgaagactttgagcggcgcttcaacatggtcagaagccgaaaatttgttcaattgcatttaattaactaattagccaactaattaactggttagtcaatcagttaactaattaccctcttattgaagtctatagttggctttcatttggttattgcatttggacattgatcaggttgataatcagatagcgctgctattatcagtggctcagtcaatttgcccccaatttaataatttatccctaaaatctcatgaatgaatcatccgcgcaaatgattctacccgtcatcaatttcaggtcaccggcgttgtgagtaatcatgtacgtcttggatttgattttaaaaaattcggttggccctaccgtaccacacacccaaatacagtatgccaccctctcgtacatgtcactgtacgacgcgctgttcctttacgggttggccattcgcgacgcgtttgaggagaccaaaaacaaaacgatttatctggacgggaagaccgtttggcgcaaaatgaccggcagacaattcattggtggcacatttcaacattaattaattaattaataattaacccatcagtgaaattaattggcatttaaccaattaattgtaagcgattttaattcaggtgccactggtcaagtgctgatgaacaacaaggcaattcgagtgccaagttacgccacttaccacaccaaaaatggtaaatgttttattttatttttaaatttttaattatttttgttttttcaatgccttcccccccccccttaagggacaatgaaaattgtggtcgaattgaccgctcgccttggtgaccgcctgaagtgtttgaagatggaacatgactgctctgagcatgtaattaattactattaatctatttttaattcagcaattaatgaaaaggttgcccacgaagtgctcagccattattggagcagttcggacggttacatgcccacggatatgccccgttgcggcttcgacgacagtctctgtgactacacggcgatgtacgtgctgggcagtgcgcttctgttcttggcaggtactcctgctgtccaattacaacagatcactctgtgcttgttttctgctgctaatcactcctctgatcagcggatcagtacaacattttttgtccccatttaaatatttggaacatttcttccccagtcactgatttcatttggttgtcactaataaatgttaaatgctcatttatcagtttcacttctgctaattatctctccactactccctctcctgctcacttctttgatcagttcggtttttgtttctgatttttgctttcaaatctctttatttgtccatatttgatcattttttgccctctctgatcattcctttttttctccttttctccttatctcttttttgatcaccttctctcctcctcctgcttttgatcacttcttttattgtctctctgatcattccaatttttgctccttccgatcacttttcgaatttatttccgcctctttcagtggtcattccgttcggctattttctgtacgtgcgcgaaaaggagcgcatgctgtacgacatgacgtggcgcatcccgcgcgagcagatcaaactgttgggcgaaggcggcaaacaccagcgccgctccgacccgtcgctgggcaaatcgatggaaagcgcctccgccggctcaatggtcgcg

SEQ ID NO: 81551 - DNA, 1322 bp, Heterodera glycines
atgcaaaaaagtgatggtcgcccgtgccatttcggtggccgaagtgagcgcaacggagcccaaagtgtcgaacactaacaaaaaaagatcaattttaattaaaattaaataattcgaaaagtttgaccagttctgtccgagagggcgtcgtcgcccgacaaatgcgccacaattggcacattccatcgggacaccaaacggccaatgaccagcatttctgaaaaacgaaacaattagacgcctaactagaacaattagtcttcctaattggctgctgctgaccgttgttgcagccgggcccaaagtaaacgctggcattgcgcaggtaatgcaaataggcggaatgctcaacgccgctgaaacggttgcacgactccatcgtgtacacctgacaaatgaacagagcagctgattttgcttttacatttaattgattgtctatggaattcaactataggcccattaagtgctaattggccattaattgattgacctgtaggttcatcgactccggcaaaatgttgcgctctttcaaatcgctggcgcacaatttgagcaccaacggttcgtggataatgttcgggttgtttggctgcaagtgcgcaattttgatcacactttccaccgtatttttgcagataatgggcgaaaaacggaggaaaaaaagcaatggcaaaaaaggaaacaatgccaacgaaggcggaaacgaaggtatcatctaaataagagaaagaaaatggaataaatgggaaaagaaatgccaaaattcaatttgatatgagagaagaaatgccaaagttaagtgataatcagacatttaatttgaaagttggccgacgaaaggactggacataattggcacattttatagctgcgattctgccggctgatggatgcttccgtggttctgctgctgtatgtaaaccacaacgcgctcacttttctctgtacggctaatccggttgaatttggcacttcaaacggcgcagattaagtgggcgatggacggacagagatattccacttaattggtgctaaatccgcttaattcgggttaatggacgtgaggaagcgaattgccgcgcactaatggaagacggtggtggtggtggacgcggaggcaccgggcgcaattccggcacaaaaacagcgcagaaggcaagtgagaggcattattggcattggcatttcacacccccaaggcggggcagaaacggtggctaatggtaaacggtaggccatttgttgcactaatccatgccaattgtacggtgagtgatctccgatttattggactaattgacagacactcaaaaaacaaa

SEQ ID NO: 81552 - DNA, 1575 bp, Heterodera glycines
  unsure (1)..(1575): unsure at all n locations
atttcaattcattcaatccaattatttttatttattttgttttttgagtgtctgtcaattagtccaataaatcggagatcactcaccgtacaattggcatggattagtgcaacaaatggcctaccgtttaccattagccaccgtttctgccccgccttgggggtgtgaaatgccaatgccaataatgcctctcacttgccttctgcgctgtttttgtgccggaattgcgcccggtgcctccgcgtccaccaccaccaccgtcttccattagtgcgcggcaattcgcttcctcacgtccattaacccgaattaagcggatttagcaccaattaagtggaatatctctgtccgtccatcgcccacttaatctgcgccgtttgaagtgccaaattcaaccggattagccgtacagagaaaagtgagcgcgttgtggtttacatacagcagcagaaccacggaagcatccatcagccggcagaatcgcagctataaaatgtgccaattatgtccagtcctttcgtcggccaactttcaaattaaatgtctgattatcacttaactttggcatttcttctctcatatcaaattgaattttggcatttcttttcccatttattccattttctttctcttatttagatgataccttcgtttccgccttcgttggcattgtttccttttttgccattgctttttttcctccgtttttcgcccattatctgcaaaaatacggtggaaagtgtgatcaaaattgcgcacttgcagccaaacaacccgaacattatccacgaaccgttggtgctcaaattgtgcgccagcgatttgaaagagcgcaacattttgccggagtcgatgaacctacaggtcaatcaattaatggccaattagcacttaatgggcctatagttgaattccatagacaatcaattaaatgtaaaagcaaaatcagctgctctgttcatttgtcaggtgtacacgatggagtcgtgcaaccgtttcagcggcgttgagcattccgcctatttgcattacctgcgcaatgccagcgtttactttgggcccggctgcaacaacggtcagcagcagccaattaggaagactaattgttctagttaggcgtctaattgtttcgtttttcagaaatgctggtcattggccgtttggtgtcccgatggaatgtgccaattgtggcgcatttgtcgggcgacgacgccctctcggacagaactggtcaaacttttcgaattatttaattttaattaaaattgatctttttttgttagtgttcgacactttgggctccgttgcgctcacttcggccaccgaaatggcacgggcgaccatcacttttttgcatttgtacggctggaaacaggtgaatgatggcgaaaaaaatattattaaaatttatttttattattanattcctcctcaggttggcatcgttcgctcaaggtaattttgaaatatccaagtttatttatctattttttctgattatttccttattngtttctaaccgtttctttaacttaataattctctaatttgctaattatacgtaataaccaatta

SEQ ID NO: 81553 - DNA, 422 bp, Heterodera glycines
tgccaagtgcaatgtgttgacgatcctcgaacggcacttggttcacatcgtagctgcagttgtacaattgttgataccggtcggcatggaacagatacaaatccatgttgaaaaaattgtaaaaaaatagttttccctgaatttttaaaagtttttaaatatttacaaaaattcctacgaatcgaatccatccgagttgtgaaatttactgtttttcccaaaccatggctttatgaccctttgtccttttcaattccccgacaattcatacttaatttttgggcactgaaattcatcaccgacttaggtactcagttattgtgaatctctgtatccattcccaaaccgaagaaatttttcgagatttttgtgaaaaatttttggtctaatgtacgaaaatgtcataaaacataatgtaacaa

SEQ ID NO: 81554 - DNA, 751 bp, Heterodera glycines
atgacattatttagaccaatttcgatagctaaattgccacattcatttgatgggtcagaaatttgtataagcaaatttgtttagctaaatttaggtattcaaaaacaaattgggattgaacattactatgtccccctctggtaggatgtcccctccaattaaatgccccttttgggaggggttgaacaatacaatgcccaggcattcaaatagcggatttacggtaagtgactttctaaacaacctaagatgattaaataaaaaattttaattttacgaaccatataggtaagttatagccccccccccctgaattacagcccccggtggctttatttcaataaatacggtaaacaatttctcattgtgtgcagccaacagcgaagtgatcagcaacagaatttgccgccattccttgccgcacaattggacgaaaacaatgatcagccgaagcagaaaaggacgaaaaagaaagctgtcggaatggcaaaaagaacaaagaccggtgcaggaaacaacaaatggaagaggccgggaaaaggggcaacaacaaaatgatgacgaattattgttgcggttttatgcaaaactttttttcacaatttttgttgattaaaatttataaaaattagtatacctaccgtattagctctaattattccccatgggtgattatttttcaaacgcctcgtagactggggataattaaagcaaatactgtaaatgaaggccaaaccgtaaggcaaataaa

SEQ ID NO: 81555 - DNA, 1178 bp, Heterodera glycines
atgatgcacaacagagtagccgaaacattgagcagattttggcattgcgttgtttggcatccgatgactcatccgctgatcagtgatcacaaagggttcgtccgccgtaaaagtggcacattgaagaagcaaatcagaaaagaacaattaattgtatggaaacaaacattgagtttttgccactgttttccgacctctattaaatattcggttaggcaattagttgaatattttcaacaaatattaattaggtatctattttatatctaagtgaacttttctccattttcttttgatcgattgtttttgcccttttctttcattttcctttggtcgtccgtccttcttcatttttatattacttgataaaatatttctctattctttgatttgataaaaaaaaaatttgagattttctcttaaaattccaacgttaattttcccattctccaattttattttatttttttagattgtgccggattaaatatcttatcgaagaaaaaactactaaatatctctaaaactttcactaaagattattcggtttcagcgaacataattatttttaaatggctcaatttttaccattcattaatttttatttataatttttttattcgtaaagactggaattttaaatttaaattagagaccggaattctcaaaaatgccggaccggtctgatgttttcagaagcaaccggtttccgggccaggcctctcaaaaaccggtcaaaccggaaaaccggtcgaaccggtttttccaaaaatcgccggaccggtttgccgggcccggtaaaaaccgataccgggcccggtccggtccgctctctaatttaaataatcagacaaagtagttttgttttttgttaattgtaaaaagaacattaaatattttttataaaattaaatttcatttttaattgattttttcattttaaatttttttattttcacttttcttttttggctcaattttatttgatttgcaaatttttttccgcgttatgcgcctttctctctacaaatggaccctttttctgctgtttttcgcctcccaccaatggtgccaatgtgccaaagtgctttttacggtgtttcacgaccgcggcagtcacttcgcttcgatgtttcctctgatggaaaagtgcggggaattaaatgtgcaaaaataaa

SEQ ID NO: 81556 - DNA, 477 bp, Heterodera glycines
atgcagcagcttttgttttttctgcttttggtggcggacatttcgcacggaaaagggcaaaaagaggaaaaatccgaggcaaaatgcgacgaaaaaaataataatgaagcgataaggtggaaaataagcataactaattgtttaaatatccaaatatattttttaatctttaggcttcacaattggggcggcaatttcaaattttgcacccaaaatgtcgaatatccgcgcaccaccgccgaagtgcaacaaattgtgcggagggcacaaaagctgcgcgtttttggcagtcggcacagctacaacaaaatcgcggacagttgcggcacgcttttgtcaacgctcggaatgaattcgatcattgccatcaatggaagccgaccgaccgtaacggtgcagccggggatcacttacacggacttggcaccgacactttgtcagttgaaaatggaaaataaaagtggaatttaattgcaa

SEQ ID NO: 81557 - DNA, 640 bp, Heterodera glycines
atgcgcgtaagaaataggcaaatttccaatactgttatacaaaagaatttcaaaatttttgaaaaagccaaggtcctgatttaaatatgctaaaacaatagaaaagttcggaaaatgggtagtctaaattgccaaaaaacaaggcgcacttgaatgctcatgactatttttgacttgacactaaagataaatattttttcaaacactttctaaaaatatttgctctatagcatgtttagcaaaaaataacgtgaaaatttaaatctttaaacaacctttcaagaatttgtttctaacacgcaaattcgccttgattctatcaaatccagactatccattttccgaactcctctattgtttgagcatatttaaataaggaccatgtgttttttcaaaaattttgaaattctttggtataacagtattggaaatttgccttatttttacgtacattggtgccatcaagttcccgaaacccattcatttttcagcctaatttaaatcattagccacaacaaattaataattttagaacatgaattcggctttcgctctgctctcgacaaatagcagcccccttgcgcatacatacaactgtttcccgaaacgggtgtattgtacactgatttaaaacataaga

SEQ ID NO: 81558 - DNA, 607 bp, Heterodera glycines
tcatgttgatcaacggtcccaatttgaccatcctggatttatcaatggggcatttttaccaacaattcacggttcgtcttctttccaatcgctgttagaaaatgaacaggaacaaaattgcaacaaagacgacagagaggccgacgaggaatccgatttccttggagaggaagaccttaatctgatcaacaatgaaggtgccttttgattatccatcgaataatcgtattttcattcattctcaaaatttgtttaagatgttccggagtggctcaaattgtattcccaagctccctttaactctgatcacatgctcaatgtaaatgaattaatcctaataataatttaattgtttttttagttcaacttgttcaaattgaaccaattggaggcatatgatcgtaagccaacaaattacagttttttgtttatatacaaattgaaattgcaattcaggaatgatcatgagattgtataaacaggtaaagatccaaactgaataactttaaaatgtcctttttaggatgtgattaacactgtcgtcaaatacgaaggtccaatgtcggagattgacaatgaactcatgcaacgtcataatttaacataa

SEQ ID NO: 81559 - DNA, 1408 bp, Heterodera glycines
atgccccattctcgttctacaactcctaatactaaccgcgaccgttcgcatcgctccaaccggaaacgttcgcgtgaccgaagcagcgaaaagcgtcaaaaggcgtcgcgttcgtctcataaagataggcgaagagatcggtatgtacaatgaagcatttcatttcattctggaatatcccttctaatgactgtccaaatatccttttttgaggtctcgctcctcttcgcggcatcgggattccgctgcagactcagccagaatttatgccccatccgacgtggcggtggaacttggcagtggaaatgtgaatatggcgcgtcttgacaagcgggcagtggaatggttacaatcgaaaataaacgaacaggtgggccagcccgttttggaatggcactgttctgtgtaaaacgcacatcaattaatgatttattgagtgtttaaaccatagcgggcgggcaccgtctggacagaacagaaaatggccataaacgctaagcgatggtaatggcattgcagcgattgatcgctgttcaaatgatttatattcagaatagtaataaaatttagagatcactcattaacggcttttcaggtatcgtccaaaatcagtgacattgaggaaattgtacacgaacgcgtaaaatccgcaaaggtttcacaaagttgaaaagcccccccccataaaaatgaaaaaataatcagatcgaaatggagaaacggctgagacagcaaatagaagccgagctaaaggaggaaatggaaaacattcatcggagggaggtaagcacagcccaagccaactgttgtaaaaccatagaaaagcatatttggaaccgaataaacatttagaaggagtctcaggaacgctgcaatgcgatggagagagcgttggagacgaagatcaaggaattggaaaaggccgaaaggaaattggtatgtctactatttgtataggtactcaattacaccttccaattagcaaaacggataatactgtgctttattctccccccccccttttcattaaaaaaaattttcaaaaattttaatatcaaaaacaagcttcctgggtttttgaagtagctgatcacgaacgaatccggcatccttttcggccaatcccggacccgaattcgaacaaaaagtcgaaattcctaacttcgcatttttggttaaaacgtgtttattggatatttttattttagaacgacgaacgcttggaaatgctggaatcaaagcggaggtacgaggaagaacggatcgaactggagaagcaaagagaaaatgtgaagaagacggaacagcagtcaattctaaacaagggaggattaatgagggagaagatcagactgtcttttggcaaatgattgggagacgaacattctgtgtttaatgtaacaataaa

SEQ ID NO: 81560 - DNA, 1560 bp, Heterodera glycines
atgggaatttcattgacgacacttctctcgcaaacattgagcaaaaatggacaaagagccaacaaaaagggaacaaccgcactcactccattggaaactttgaacagttcacggtttgtattattttgttcctgtatttctataaaaatggatagatttgtgagaatgggacttatgtcgacttgaggggcgaattccacggggaaaactccgcggatggcaactcacagctcaccaaatactgctacgagtgcaaaagggtgctctttttagtccattgtttgttccttcggtacgtcccttttccttctatcttcagacaactcctggtcgctgtcagcactgtccgttgtgcaacatttgcgtgctccgcaaagaccaccactgttttttgctcggcggctgcgccggtttggccaatcaggtcgttttcccctgacccgttggtcataggaatgttgatcgtatcattttacagcgctatttcattgtcttccttttttgggcctcaattggcgctgtctatggctcctctttcaacttttcttacgtactgtatttatttgctaatccccttgaaaaatcggacatttccagctgagaaagcatgcctccccgtgtttcccttttggatggatttgttatttgggaccggtaattttgtgggtttcgcttttttcaccgttttgtctttgggtcgcgttgtgccgctggttttttggctacgactcgctgttcaatgcccttctctctgtgatgttctcaatttcggccgcttcttcgttcgctgcctttggatttttcgttttccaagtcggatctctaataataaccctcgtaacttccgtttttgtccagatgatttacacattgaatggctacacaatgcacgatttccatcgcgcgggtctcaggagaatggagagtgacggcgagttgtttagaacggtttatttttcaggtaacccttttgtcattcaggcgaagatttccgagagcgtcttgccctggtgttcggtaggagatggtggctcaatttcatctttccccaattctggctgcccaaccaaatgaatgagaaaattgccaaaaacattttcctgaatacctcaaaggatctttgaaccgtaaatgcaaagctgaacaaatgttttaaagaataaagcacaaaaaaagaaaccgttattgtattgtatataaaagaaacaatggatgcaaaaagttgaagttgattgtccaaatctcagacaaacaattttttattttgcttaaattttgaattgcatctattgtttcgaaagccaaactacatcaagtgatctcgctgttttttgaaacaacaataaaaaagatcctctaatccgactatcaataagaacaaagaaaacggaaaaaaggcaaactaggcccgtattgggttttaaattcagtgtttcagacatggcagcaaaagaatacatcagaaatgataatatgaataagagaaaaacaaatccaaacaaagaaaaggggaaagcaatgagaatttgggggtggggagggcaagaaatgttcagttag

SEQ ID NO: 81561 - DNA, 1275 bp, Heterodera glycines
atgagaatttctacaggtaaatgtgaagttaaattacaattaacttccccccccccctcataatcactctttcatgtcatttgaccttcacttccagattctgttcttgctttgtgccaccttcccaagaaatctgttctaagatatgtcttcagggttttaccgacgcattgcgttttctaacaacatcttgtaagattaaaattgccagtcttcttttattactacaatttgttgttctgatttttaaagcaattacgccctgtacgaaatgtctaattttgagcacacaaaaattcaattcgcttatgaatgacgaattgaaacgaaggtattaataaataaaatataattatttatttatattttgtatttattttttattttaattttagtcgaagttatttcaacatccaacaagcgactgcaagtgcgaccactccgaagaggaggaaacggttggactcggaatgtggcgtttgcatggcgcggttggagcaacgcctgagcactgacatgaccaccgctctcttcccagaaatacttcataaaagtaggaatacgcaccatttgaagtccttaccactcaaaatcttttaagcactcaaagagccgatcacttgtgcttctctgccggctcagctgtttcgttatgccagaacttttcgtgccgtcgagttcggccttcgtattgccgacccatttttgcgttccctcgactatgtggtctatgtgatgcgaatgtaagttttaaaataatcttggtgtgaataatgtgaaagtcggattgtcccattcatttaggcttaatgagtggcttttgaaacttaaaaaaggcgaccttattctcgaccgactgcagaaatttctcgactttttgcttagtcaaatagaagatcaaaatttgctgtgcactccaaacatttcgtgtcaataccaattcactgcgagtcgcgtcaaagacacacacagcgaagtgaacttttgttgttattagtttatttatttattttcatttaagcattggctgatggatgaaatgttcaatgatatgtatgaaaatatgcacaacgaaagtgttcaacaagaattgatattggccaactattacaatgatgttcaaaatgtaaaatggaaaacaacttagaataagaaaaaaatcattcacttttaggcgacgaattctgttgagattgaggagagctcaggaaatgccttaactgacaatgaaaaaaaaatagacagtaattacgacttaaaaaaaatactattaaa

SEQ ID NO: 81562 - DNA, 1107 bp, Heterodera glycines
agaaaaacaatcgggatttgcagtcaaacttgcggttggttgtttttgatgtgatgactgatgaccatttattttaattatggttctttcagatgccaattttggctgctggggcaaggaaaacagagactgtgtgaagtgccgaaatttcacgatggaacacaatgtgtgcgcggaacaatgccatactgagagggggtaaataaaataaacaaagtcatgcggctcgggattagcgttattctagaccgaaattacgagatttgagacagggatttatttttaaaattttatttaactgttaacaaaaaatcaaaaaccaaaaataattttttaattttgcatagcaaatgtttccatatcaatgtttttatattcaaacattaattatttatattattcaaataatcactttcgattctgacggaacatttaaacctgagaatttgatcaactcaagactctcgatactcaatctatgtctcccatttacagccatttcattgtttcactgtcctccgctgacagtgcccccgttcggcattgccttcggtgccatgagcagtgccacgagtgctacgggccttccgcgcgtcaatgttcaaagtgtcaaaactttcaactttggctcaacaccgcacttccgctggcggacaatccgtacgtcgacgcgggcactgcaggggccgtgaagcaatgcgtggccaaatgtccgaacatgacgtaccccgaaggtacacacagctgaattctcgagtatttcagaacatttggcaacaccaagatcatgtccatgggttttggtctcacatcttggttttttcgttttttcttgagtccttagaaaatttgactccgcggaggggaggagtggtgataaaatgaacacaatcattttcagacgatgtttgcgtgccgtgccataaggcgtgccgcggcggttgcactgggccgagcgcacgtgttggcaccggcggatgtaatcagtgtaattacgcattggaaggggaacattttggagaggtaaaaaaaaatgtcaaaataattataaatatttattttagtacatttgtctgtttggtgatgagccagaaaaagctgtttgcg

SEQ ID NO: 81563 - DNA, 900 bp, Heterodera glycines
atggtttccaaaactggcattttcaaggcccccaagttacataatgttttaaaagtgggtttggaaattctgaatttaattaaacaaggtaaatcgggtatgttgagttcgaatatggtcttagatttggtctctgggatcgcaacaaacctgtacagctcgaacttcatgcatggagttggagcagtacaagctcaggttgaaaagataggtcgcatttaaggccatattcggattctactggtataaattgtatagaaaaactaagattttattatatcagctttggtttttgaccataaaaaattcgagaaaaattagtgggccaattttcaattttggcatggtcgggaaaaaaggcagaaaaatctatcaatcaaataaaaagtgaaacgatagtaagatataaaagaggaaaccatgaagaacaaaataaaaaaagaattatttaaataggcgcagaaataacggagttatgatttttaaaaattggaaaaaatttgggtatcaaaattatgttccaccctaagtaaaaaattttatttataatattttcattagtcaaaataaaatgccgaaaaaaagaaaaaaagtatcaaaaatatcacacctgccgtaaattaaaatacgaaatgccaagcaataaatcagacagatgccataaaataatgaatgtttcatttttaagagaaaaaatggaaaaaaattggcattccgttggataatgaaaaaaaattaaattaaaatgaaatattattatattaaacatcaacagataaacacaataagacaccaattagcaagatggcatttgatgtttgtttctgtctgttaataaaatggaaaatgccaaaaaacgacggacggaccgttgccaggcaaaattcattttaaaataaa

SEQ ID NO: 81564 - DNA, 2888 bp, Heterodera glycines
gttcattggtggcgacatcagctttatttggtcattgatcggtcactgcggttcagccgttacaacttttccttccccaatttgcacgtgccgagctgatcagatgcttcatgagcaatgctgccaacacaggacaattgatcaaacagtggaactcgcggaacaataccgcgcagcattgcaaaatggcgacaaggcgactgcagcggttcgatcggcatcaatgggcatcacgaaaccgcctcttctccgttcaattaactttgatcggatcatccctgccccttttcacgtctttcaaggcattggaaatgccattgttcgagaacttgagaggcaggagggatgtgcgccgattgttcaacagttcttcagaaggatcggggcccgaagggaacaatttcgaaaaagggatttgaccggcaactcaataagaaaaattttggttcgcgctaaagaaatggccgaacttttcacaatggaatggcccaaagctatttgtaggacactcgaacacctcggcaaaattcaaaacttttcaaaagtgttttgtccgattttattgaaataaaatcataaattttaggcacaaatgttgtccccaaatgacctggacggacttgagcgatcaattgacaatttcaaagtgtttttggcagagcaggaccggatgagtgcctttctctcaaagaaacccaaggcccatcttctactcttccactttgtgccatttgcacgaaaacatcaattcattggccttctggatgagcagggtgttttaatattttcaaggtgatgaagcgcttcattcggtgtggcgaagactcgaacaatggtggaaatgtatgcctgacgcggaacaaattttgcaacaattggagcaccatttcgtcaacaattggctgctggacaccggaaggattgacgaattgaagcgggtttgttttttcaaaaggtttcccttttctgaattctcatctttagaattatgaagaaaggaagggcgaggatgacacggatgaagaagtggcggaagaaattgatgacgaatgccaaattgatgtaatttaacaaatttggattaagggatgattttcaaaaaaaaagtgaagaaacaaaatattttatcatttttgtttatttttcagaatatttatttgtcatttataagtcgttttttgcttaaaatcaccaaaaacgtccgttaacatgcatcggattcgaacctggaacccccttttggtgactagcacatataccactgagacaaaaattcaaatctttttggaactgggaggcaaaaactgaaacggtgtgtctataaataattttaatttactaataatatttattcataatatctcaaaacaaatatttaaatgtagaaaaatgaactaaatgattaagcatcaggtaaattattcttacaagaattttaatatgaaaattttatgaaatatgtaataaaaaaaatttaaaaaaatctagttaaaataaattcatatggaaaactatttaaaaaatattattaataaaaagacgaaatgttttttccaataaatataaaggcaatcaacaaaataagaggatattaatgaataaaaagggtgaaattaacactcaaaattactaattaatttgaataaaattttttaataagttttggtccaattccaactaaataatattatttaattgattttattagtttttttattttgcttatttaaaaatattaaattcgccgaccctcatttagatatttttattaaatatttccaaatatttaattttcaaatcatgcatacctatagtatgttatataatttaagctattttttaacaattttaactctttattcagtatattttaacccaatgtaaattggaaaatattcttatctaatcatatgatatggtgatatgacgaagttacaaaagtaataaagtttgtaataagtacattaattattatttaattttatttgctaaacaaagaatgatatcttagcttaaacatagatcctttactacttatgtaatttataaaaatctagcaaaaattttaaaaagttttagcttggtaggataagttttataaaaaaagaagtaatattcgttgtttctaaaaaagtaattaattaacaaatttaataaactagcggggtcagcgccttcggcgcatcccccgctaggtagtacgattgtagtgtaagattatgtttgataaaatcgactggctcggccgcttcgcggcctcgcatcctttttttgctttttctccaatcgtcggactcaactcaccagcatttcaatcaccgggactcaattctctaggagttcaatcactgggactttattctcctgcgtttcaatcactgggactaaaccctccagcatttcaatcactgggactcaaccctccagcatttcaatcactgggactcaaccctccagcattgcagtcactgggactcaacacaccagcatttcaatcaccgggactcaattctccaggacttcaatcactgggactctattctcctgcgtttcaatcacccggactcagtttttatgcattccaatcaccgggactcattctcctgcatttcaattactgggactcaaccctccagcatttcaatcactgggactcaattctcttgcatttcaatcactgggactcaaccctccagcatttcaatcactgggactcaattctcttgcattccaatcactgggacctaacctcacctggtccttcggcatcgcaatcatcgagactcaattctgcgaaattccaatcaccggaactcaattctgcgacattccaatcactgggactcaactcaccatcattccaatcgctgggaccgaacctcacctga

SEQ ID NO: 81565 - DNA, 572 bp, Heterodera glycines
  unsure (1)..(572): unsure at all n locations
atgtttcttggcatcgatctcggcacttccgcggttaaagttctgctgatcagtgctgatcagagtgtcgttggttcggcgagtgttccgctgaaagtgtcgcgtccgtttgacggatggtccgagcagtgcccttccgattggctccgtgccacccgcgaggccattgaccaattgcggcattcgaaccctaaggcaaatagtcctttattcaaatatggtggaaagaaattttaatttacttttaatttgactttgattcaaatatggaaagaaattttaatttacttttaatctgactttgaggcgttttgtgccctccgcggcatcggtctttcaggccaaatgcacggcgccgtgctgctcgatgcggccggcgtgacgcttcgcccgtgcattttatggaacgacatgcgaagtcaccgcgaggcggacgaattgaacgcggacgcgcgcttccggtcgatcactggcaacgcggtgttcccncgggttcactgcgccaaaattggcctgggttcgccgaaacgaaccaaagatttttgcaaaaatgcaaaggtggaaaaaaggaa

SEQ ID NO: 81566 - DNA, 905 bp, Heterodera glycines
atgggcgtcattctgtccgcgaccgattcgttaaattggcttaccaaagcgaccggggcgtcgccagatgaattgacggcggaactcggcggcgatttgaatgctcccggcgcagtcatttttttgccatatctttccggggagcgaacgccgcataatgacgcgatcattcgcggaagtttcaccggactatcgcaccaaactgatcggaaagcactcactcaggtcaattttgaattgggtaaaggatttatgggaaaatgacacaaaaaggaaaaacggaaacggagaaaatcgaaaaattaattaattaaacaatattatttcaatttcacaattaaataataaacaaaaagataagcaaattaatttgatttcggatttctgctccagagaaatgagggcattcatttgccaattttttcagcaaatcttctttatcttttttaaataataaattttgcatttcaaatccaagtggctttaggctgttctcgaaggagtggctttcgcttttcgcgattcgcttgaggcactttgcaaaagtggcaccaaaatgccttcgcggatcatcgcgactggcggtggcgttcgctgtgcttattggatgaagctaattgccactgtccttggagtccaaatagaagtgccgacagaggaaagtggaaatttaggtaattttcggacgcatttcaagttcattagcaaatcctaattaaggtgccgcttttggtgctgcaagacttggaataattgccgctgaagggattgaccctttgagtgtttgtgagccgccaacgattggccaaagcttttccccgaatgagcagctgagagaggcatttgagcggaactatcggcgctattgcgcactttatccggcactgagagcgattgatcagtga

SEQ ID NO: 81567 - DNA, 232 bp, Heterodera glycines
ctaatctggacatgtaaatcaacgacctttttccgctctttttttgttgcgcgcttttcaaaaaaattttgggggacagatggtgtgggggggggcatgccgacaggcgccacagtggaaatttttaagtattttgttaagaaattattattaatttcattccaactttctgatcattgacgactctcttactacgaaacgtaattcagatgcaaagattcgtcttatattt

SEQ ID NO: 81568 - DNA, 90 bp, Heterodera glycines
tgctttgcccgagtacaccactttcaaattcaacatggacccagtgagccatacagcaggaaaaccggttcccgtgaaccccttaaaggt

SEQ ID NO: 81569 - DNA, 679 bp, Heterodera glycines
atgcagataagagaaaaagggaaaggtaaatcggcgaatcagcctttttaaatttcaaaacataaggccatacaattaattatttattcaaaatttctctgcatttcattttcttcccaaataaatctacttatatatccgcccttccaatgtttgcagttacagaaattactaaatttttaattcatatttttttaattactgactttgaaaaacaactgcttaatttatctcttatcattgaaataaatcaaattaagattcaataaaaaattttaatgcatttgtcagtttgttcattattgctaaaaaggcttccttctacacgcttggccactacgcttgctaatgttagggcaaaaaatgtgaagcagccgtcgactgagcggataaatgcaatttctctggatgatttcccgtggggaagaaattaaaacgctttattctttagtaatttagaattgcttatcctgattttcttcgctccgaagttcttgatcgtagagacccgttgtttgaacaactcgtccaagcagacatgtttgaaagacgtatggtaattgacatccccgaattctatgttggttggtgtttttaaatttaattttcatttttattcaaataataaattcgttctccaggttctgtgttagctgtcacaatgtctgaccctaacacc

SEQ ID NO: 81570 - DNA, 1116 bp, Heterodera glycines
atggctgctaatgaaaatatgcaaacagaagacaataaaaaaggaaaagtgaccaatgatgagcgtaacttggtcgtctcatttattcagtttttgcgtcacaaagtctcatcgaaccaatgcactgatgaacagattgaaggccttgaaggttttctttttgactaattgttggtggtatataaaaaacgctgcttgaattttttaatcatttcatggctttttatttattgtctataattttaatgcatagaattaatcagccaggtttctaagcaaaatctcaaatttatttcatccagtggtgaaagcatgaccggcaaattgttggaatgaataatagaacatttcgaaactggccattaaaattcaaatagcaattctatagagtacgagtcgaaaaaaatcggattcgggctcgaaaacttaaaaagcagtttttaaaatagaattgttttattctttctatcttatttttagttgctattcaatgccttgagaccgccttctttgtttctgacagaaactatgcgttccaaccgtccaaacctctcatcgaaattttcaaagcagctgaaggacttcccgatggggttgattttcagttttcccttacgtttaattgaatttttattgaaggatcaagagtttcctaagccgactcaaacggacgttgagaagtcaaacgcattgaaggaagaaggcaacgaactcgtgaagtcgaacaagttcgaagaagccatcctcaaatacaacgaagcaattaagttgaatcgcgaccctattttcttctgcaacaggtgtccattgaattcacacaatgcactattgaaatgagttttacaaatactttagagcggctgcttattgtcgtctggagcaatatgatctcgcaatccaagactgccgtacggcattggcattggacccgaaatatgcgaaggcttacgggagaatggggtaatggacattaattagtattcgttatgtttacaaccaaatccgttttagcgttgcactttcatgtcagaatcgttacgatcacgcggttgaagcgtacaaaaaggcattggaattggatcctggaaacgaaaggtatcatgaataaaatgacaa

SEQ ID NO: 81571 - DNA, 817 bp, Heterodera glycines
atgacaaaatgttatccatggtcccgtatacaatattatcgccattcggtaagctaaggattacagtatcgtcacattatttaatgcatttccaccaatgtatgcgttcagatcaaaaaagtgcagctgtattagtggaagtgatgatgtcaatccataaaaagtagaaaattatttctaaatattaaattgtttttaatatagagtgaaataaattattaaaaaattaaatttaaatatttttaaatgtttaaaatgatctcatgaaaaatctaaagaaacaattaaaaagaaattttttaagttaaattaaaaattcataacaacaaaaaattaaatgaataaaaaaatttaaaaaaaaaatttaaataaaataatcaatatttttaaaaatctttaaaaattcataataataaaaaatattaaattataatataaaataattattaaaaaatgaatatttaattcttatttttttcaaatatttttcccctctttagcacttgcattcgttttggtatgtatgtaaattattttgttaatttttctgttcattatgctcacccttttccgaccgtatcaacacgccggcaaagcaacagtactaccgtaatgatgattacattggcattataaacgaccgggggtaaagcaaaaaatatgccaaaattgtgtatcaattttttttgttgtttttgctatttttcaggtgccattccgtcattgggcgacacagtggcaaaaatttgttgacccttcaggttggggaggctggcaaagtgccaaaatttgatttgttttttacaacaattcgaaa

SEQ ID NO: 81572 - DNA, 1263 bp, Heterodera glycines
gctctgaactgttacatttgtgctgagaatggcttggacgagttcggcgagtgcaaaacgtcctttccgttcagctgcgatgggtacgccaaacgctttccaaaggacgagaaaatattttgtcgcacgacgcgacacaaaacggcgaatggtgcggcactttttggcaattaaattttgtttaaaatgtttttcattgcttcccccccccttttttaggcactttcactgtggtgaaggaatgcatcgcggacagtgcgcaccacgtcactttcccgcgcaaaccgtaccaattggcggaggagtgcgacgtggtcgaccttaatggggtcgaagtggcctattgcctttgtggggaccaaaatttgtgcaacggcgaggcaattgtgggccaattcagcgcatttgaggaggtgaaaagtcaaaatcagagaatgttattctttatccattgcttatttgaacatttgcatattttaagtttttcttttaattagtaaaggaaaacccaaattaattatccgaaattacactgtctatttcaagtgaaatgtttaatttataattcaaaagttcaattgaggaagagttcggcatgccaatatcaacaagcaaaatttgaggatttaatcgatgatttatgtgcgcaattatcacattttcaaaaaataattaaatgtagactcaaaataaggacagatcttaaaaaatatggacgtttgcgagtattgcttttgtttccgtgcccatttccctccaattccctataaaatttaaattcccctaaattcctcagaaataccccgaattgttcgactccgatccgacgaccacggcgtccgaacagttgtctctgtctcagtcctcacaccagcgatcggcggaggaaaagcaaagggagcgaagcggagaagaagcagcagaatctgcggaagaagtgggaaaaatggaaaaaaaataaaattagaaataggagaaattgaattggtaatgggcatttagccaatggaaagcagcacatggcacgggcaaatggttgacggaagtgtccattttggcacttcgggccaattcgaaagtgccggttgggaaacggcggccaccgaacagaaccaaaacaacaataataacaacaacaacccatttgtggcaccaccgacacgaaacgaaggcaaaaagcatttatttaaatttaaataattaataaatatattgtaagtttttaaagataacaacgaaaatgataaagaaaaaatcggcgaa

SEQ ID NO: 81573 - DNA, 356 bp, Heterodera glycines
atgtctttaagcccttaccaaatgaaatctgcaaaacgaaaaaatcttaaaaatgatcaaagtttgcccgtttttgttcaagtcgacgacatttcatcatcggttgatcttggaaatgacgggataaatcctgaacaggtgggaaatgcgtgaatcgaatgcatgagaaaaagctgcttttctttacaataagctaaaaataattaattctgatttcctcagcattctaacacgaactcaatggagagtaactcgaaggaaattgaaatgcgtgaacatttggaggaaattgaaagccaaacgacaaggcggtaattaatggattttgtttgaaaaaaaaatctcttttgtccaca

SEQ ID NO: 81574 - DNA, 1081 bp, Heterodera glycines
atgagatcttcgggcgtacgtgcccgccgccgtgccgcacatccaccgctacgccctccaccaccgtcgccacgccctccaccaccgtcgccacggcctccaccaccgtcgccacgcccaccacccccgccccagaagagccatggacatggcaatggcacgtattggtgctgttggtgacggtggtgatcgccgccgccgcacttggtggtaagaaaatttactattttggttaaatattttatggtaaaatttaacttttcagtgggtttgtggtgtcggtatcgccggtcgcggacggggcctgacgacgtggagtcgcaggcgcctgttgcggtaatcataatttttacaaaaattcttttagaaaaattcttttttgggtgggtaataaaaatgtggggttgaaaacaaaaaatgctaaaaaaagttgctttatttttttttttatttattgtcaataaagaaaaagtcctcaaaagggaaaaatccgcttacattgaggacaaaacattaattaaaatgccctcaagaaagcgcataaacaattaaaaacgagatcgccgccaaaaaataaaatataatgtgaaatcaataaaaaataaaaataatgaccaaatcactttttgtttaatgaattaataattcgacttttatttttccggtcaatcttacagaaatgaaatagttttaattttatttttaaattgatttaatggtcttccagggtctggttttgatcacgtgccgcccgggacaaaaaacaatggggattgaacggatggtggttggacccctgcccctggatcacattcgttgtttaaaaaaatgggtgaaatgtatgattttttaagcgggggcaggggtctggacccccgcccccggggccttatactactgtcaacaaacattttttggcactttacaattactaccctgataataatgtctaattatttcaggcccttgtcgattcaattgttatttctcccccaactgacagtctgcaaattttcaatagccctgacgttcaagcgatgactcgaaaacaatagtacgtgaccagtaaaccaaaaaaata

SEQ ID NO: 81575 - DNA, 852 bp, Heterodera glycines
atgtcttccgaaaatcctccgtcaccgatgcaacgccaacagtcatcggtgcaacgtcaacagtcatcagtgtcggatatgggcgacccggacgagtaagaaaacagcgacaaaccctaaaaacgacgaaattacgcctttttcccttttcagttgcttctcaatgttcctggttttcatgagctatgtgctgctgttcttcacctttccgtgcactatcttctcttgcattaagataacaatttgccttttttccatttggtaattgccattccgttttcttttttagattgtccagcaatacgagcgagcggttggagcaatgtcactttacacaaatccttttccaagttcaggtcatttttcgactgggacgtattcgtcgtaaagcgcaaggacctggtagccaagaaaacgagcaaatatcatttctaatgtttttttttgcaggattgttcttcatccttccatgcgttgatgagtgcgtgtgttttatttatattgtttgattagaattgaagacaaacggtgcgccaccactcaatttgcagatatcgctgcgtggacttgcgcaccgtgacttgtgatgtgccgcctcagcaagtgctttccaaagattcggtcactgtcaccgttgacgcggtcggcttcctgtgttatttttaaatgcccgtttaaaatattcccctattataggtggtcttttaccgtgtgttcaacgcaactcaggctgttatgatggggaatatttcgtcgtccaccactctgctggcacagacaactcttcgccatgtgttagacacaaagactctgagcgaaatactcggcaacttcctcgtggagcaaccgtga

SEQ ID NO: 81576 - DNA, 76 bp, Heterodera glycines; identical to SEQ ID NO: 51235

SEQ ID NO: 81577 - DNA, 569 bp, Heterodera glycines
gtacaatttgttctcgactcaacgctggacgtgatactttccacaaaactgaagggttgtgggctttactgaaccatttactttacacccatatgtaattcctcacactattataaaacatgcaaaatttttacaccgatttttttgaattgagataaaatgtgacaaatttttaaaaaaataggcctagcgaacccgtgccaatactgtttcctgctgtacttcgttgtgtcaaatgttttgtgaccgatttgccttacaataggtcattagcagctataactattgtatttcatgtgtctctgattataatttttatgctactgtttttgcttgactgtcgctattagagaccgaccgatcgctttatcgatcaacgcctaccaatgtttcgattttatatctttttcgagagcgatcgatcgaatcaattagtcggtctacagcagggacagtcttgtaaaggggaacctacggcttatttatttgctcttcggccgcaaaaaaaaaaaaaaattaaattttgtacaagagaagggctggcggttaaaaattttcaaaaagaccaa

SEQ ID NO: 81578 - DNA, 519 bp, Heterodera glycines
atgaataccaccaataatggaacacttaaatggacagttgtgataggcttctttgatcggaatttgggtttccgaaataaaagttggaaaattttccaaaaaatcatcttctcaaatttaaattttcataaacattataaaaatattttcagaaaaaatttatgcccttttttctcatgaatcaaatttggaaataattaacgcactcatattataataaattataaaatattttaatgtattgtatttttttgacgtttcgatacatgaaaatgtatgaggcagttttatgctaaattcaaaaaattatttatttaaaatttaacttctaatccaatattttttgtcaatatttttaaatgttttcgcaaattttttcctaaattttaaaatttcatatgaaaatccatttatttatttttctgtaaacgagttaattaaccacaattttttaatttgttttttcgttttgaattgtaactcttaaatttaatgaagctggtgatctttagcaataaa

SEQ ID NO: 81579 - DNA, 406 bp, Heterodera glycines
atgaagaacataccgttggaaattgccttttggcaatttgtgctgacttctgtcatatcgttttttgtttttctgcttctttttggactgtcgcaactttggaccggtggaaattttaaattttttttgccacatataaatattttacagttattttaaatgttatttaaatattaaaatctaaatgttaaattaaaaaactaatgcacttcggtctaaaaaaaattgttttttaaaaatttcagcactagggagaaaaaccacgaatatagccgtctgccaaaaaatgactatttttggcaattttgggggtcaaattttcaaaaaatatagtgaaatgggagttcggcggtgccgttaggcgccgctgggaaaaaaaaatttttttttttgaacctttaataaa

SEQ ID NO: 81580 - DNA, 860 bp, Heterodera glycines
atgctaacaaataaaagtttgcctttgttattttattcagaatttgcaaaatgtaagcggtgccgactgaacaaatgccttacggtcggaatgaatcctcgcggtgttaactgcaacaaatcaaatgtccacgaaacattggcatttgcacaacggatgaaacagcaaatggagcagcagcagcagcaggaaaatgccaatgccaaccaagcggagaaagcagcatcatcagaagcaacggacattggcacggaactgtcggcactgacgaccgaacaaagcagcgaaccaccaaaatgggccttgacggactcggttatcaaacagtgcccacttagacattgcccggaaaattagacacaaaaacaattaaaaacagtgttagtgccggtgccaaatattccaatgtctccaaatttgtgctgctccccattagttatctctattaatttcaaactttcagccaatggtacaaaaaaacttcgcgcgtttcattttgatgaaacatatgatggaggttgagcggaaagtgcaggattcgcgactcgaaaactaagatcccggacatctttttcgcccaatgcgacgcatttgagtcgatttttgaacgaaaattgagtttgattgaatgtgccgacaacttttcggtttccaaaccataaaaatgatgaaaatttgacaaatttaagaccgaaatgccaagcccacccacagaattgtttcaccaaattgtccaacagaatgggccaatgtgcatgatgccgccatatttggccatggatttgttgtttgtgttcgaaattggcagaacgtttcccttctttcagcggcttagcatcagcgataaggtaaaaaataaa

SEQ ID NO: 81581 - DNA, 705 bp, Heterodera glycines
tttattttgatagttttttgagtgacgtcaagcaccaatgaatatgagctataatgacaaagttggcttcatcaacagtgccagcaaacagttgggggacagattgtcggagcagaacaaaaagatgcacgaaatgttgaaggaggacaaaaacgaacggagcagcacatcgcattttgatgagggcaataaaaaggcaaataaaattataaaaaattattaaaactcgaagtattaaatcttaattaaattcgtgttttttaacagggaagttcgtataattttgaaaaattttcttcatccgaaagtcgtcctgctccctattcatattcgggaaagcccgcggattattttcgaggtaaaaataaattatttgtttgtttgtttaatgagtttatttttagccattaaacactaaatgttttttaaatcatgaactaatttttataaaaacaattaaaagaaattaaattttcggcttttgaatgttttattttttagatttaattttgttaattcaaaactctattcccctataaaattaggtcctaccatcagagatgtgccaccatcgaacggttccattggtggcacagtgaccacttgggaatggggaacagtgagcaattgaaaaagcattaataagaaaaagattgtccatcgccagcaggagaagatttagacgattttgatatgatgatatct

SEQ ID NO: 81582 - DNA, 1530 bp, Heterodera glycines
atgccgagggaaatgcttttgagagaattggccgacgcggaggcacttttttgtttgttgagggacaaaatcgacgacgaattgttggcacgagcaccaaaattaaaagtcgtgagcacaatgagtgtcggatatgagcacattgatttggaagcatgcaaaaaacggtgggaaaagcacagaaaaataggacaattttgaaacatttcattcgtttgcttaaagtcaaaatgaattggatccataaagcctccgaaaactaaatgagtcgttttttatcccgttttattattggatttcagtgggattcgcattggatacacgccaggttagtctctccattccatggattgtcatttgatcagcaggtgttttgaccgatgccacggccgagttgggcatggcacttctgctgtccacggcgcggaaaagtatttttcataaatattccttttatatttccttaaatatttacagttcctgaggctgtgagatctgcgcaaaagtgagtcagtcatccgtttggtttatttgtcgtaatatttaagcggtggatggaagacatggtcaccgtattacagtgagtctcactttcgttacgttatttcctctgttacgcttcccttcctttgatgtcatttgttattcattttcagtgtgtggcaaaacactcgttgactccgttgtcggcatttatgggcttggcaaaattggcacttgcatggccaataaaatcgtggcattcaaaccgaaacgcattatttacaacaatcggaagcccgtgactggtgcgttaattaaattggaaatcattcaaacggttattttcattagttggacaatgtttttactacttttagactctccgttcgaatttgtctcgtttgacgagcttcttcaacaaagtgactttgtgattgtgtgcgctgcgccttccaaagaaaatgtcaaaatatttgacaaaggcgcattttccaaaatgaaaaaagattcgattttgatcaacatttcaaggtcctgttcagatgagaagtacactttgcaaatgttcatcaccagaataattcaggggcattttggtggacattgaggcactgacggaagcacttaaaaatggactcattggcgccgctgggctcgacgtcacggacccggagccatttccgactgaccattccctatttcgcatggacaattgtggtaagaagtgcagttaaactaacgcttataacatggacacagaacgtttactattagccaaccaatttgattgcttctgaaagagcatatttaatgaattgtttttaatttagttattctgccccacatcggttccgctacgtatgcgacgagggatttgatggctttgactaccgaacagaacatttgcaattgtctcgaaggaaaggaaatggtggcggaattgaaaattgattaatattttgtgacttgttaatatgtgattgtttttgtgatagtttatgttttttagattttatctttgatcgttttaagcatctaaaaaataaa

SEQ ID NO: 81583 - DNA, 1105 bp, Heterodera glycines
aagaagagaaaagaggctgaggagaagaaggctcagaacccccaccgaggctaaagccaagaaagacgcagaagagaaggctaaaaaggatgccgaggctaaagccaagaaagacgcagaagagaaggctaaaaaggatgccgaggctaaagccaagaaagacgcagaagagaaggctaaaacggatgccgaggctaaagccaagaaagacgcagaagagaaggctaaaacggatgccgaggctaaagccaagaaagacgcagaagagaaggctaaaacggatgccgaggttaaagccaagaaagacgcagaagagaaggctaaaacggatgccgaggttaaagccaagaaagacgcagaagagaaggttaaaaaggatgcagaggctaaagccaagaaagacgcagaagagaaggctaaaacggatgccgaggttaaagccaagaaagacgcagaagagaaggctcagaaggatgccgaggctaaagccaagaaagacgcagaagagaaggctaaaacggatgcagaggttaaagccaagaaagacgcagaagagaaggctaaaaaggatgccgaggctaaagccaagaaagacgcagaagagaaggctcagaaggatgccgaggctaaagccaagaaagacgcagaagagaaggctaaaaaggataccgaggctaaagccaagaaaaaggatgccgaggctaaagccaagaaagacgcagaagagaaggctaaaacggatgccgaggctaaagccaagaaagacgcagaagagaaggctcaaaaggatgccgaggctaaagccaagaaagacgcagaagcaaagaaggaggaagaaatgaagaagcaaaaggctaaacccgaagaaaagcctgaggcacctgccgaaggcgtagcggtagtgccggaagcgaagaaggcggaagagacaaaggaaaggctgaagcaggaagagaaaccagtggaagtgccaccatctccagcagaaaagaagagaaaagaggctgaggagaagaaggctcagaaggatgccgaggctaaagccaagaaagacgcagaagagaaggctaaaaaggatgccgaggctaaagccaagaaagacgca

SEQ ID NO: 81584 - DNA, 1961 bp, Heterodera glycines
atgccggaggctaaagccaaagaagaacgcagaaggagaaagcttcaaaagggatggccgaggctaaagccaagaaaggacgcagaaggcaaaggaaaagggaggaaggaaaatgaggaagcaaaaggcttaggcccgaaagaaaagcctgaggcacctgccgaagggggtagccgtagtgcccggagcgaaagaaggcggaagagacaaaggaaaggctgaagcaggaagagaaagcagtggaagtcccaccatctccagcagaaaagaagagaaaagaggctgaggagaagaaggctcagaaggatgccgaggctaaagccaagaaagccgcagaagagaaggctaaaaaggatgccgaggttaaagccaagaaagccgcagaagagaaggctaaaaaggatgccgaggctaaagccaagaaaaaggatgccgaggctaaagccaagaaagacgcagaagagaaggctaaaacggatgccgaggctaaagccaagaaaggcgcagaagagaaggctaaaacggatgccgaggttaaagccatgaaagacgcagaagagaaggctaaaaaggatgccgaggctaaagccaagaaagacgcagaagagaaggctaaaacggatgccgaggttaaagccaagaaagacgcagaagagaaggctaaaaaggatgccgaggttaaagccaagaaagacgcagaagcaaagaaaaaggaggaagaaatgaagaagcaaaaggctaagcccgaagaaaagcctgaggcacctgccgaaggcgtagccgtagtgccggaagcgaagaaggcggaagagacaaaggaaaggctgaagcaggaagagaaaccagtggaagtaccaccatctccagcagaaaagaagagaaaagaggctgaggagaagaaggctcagaaggatgccgaggctaaagccaagaaagacgcagaagagaaggctaaaacggatgccgaggttaaagccaagaaagacgcagaagcaaagaaaaaggaggaagaaatgaagaagcaaaaggctaagcccgaagaaaagcctgaggcacctgccgaaggcgtagccgtagtgccggaagcgaagaaggcggaagagacaaaggaaaggctgaagcaggaagagaaaccagtggaagtaccaccatctccagcagaaaagaagagaaaagaggctgaggagaagaaggctcagaaggatgccgaggctaaagccaagaaagacgcagaagagaaggctaaaaaggatgccgaggctaaagccaagaaagacgcagaagagaaggctaaaaaggatgccgaggctaaagccaagaaaaaggatgccgaggctaaagccaagaaagacgcagaagagaaggctaaaacggatgccgaggctaaagccaagaaaggcgcagaagagaaggctaaaacggatgccgaggttaaagccatgaaagacgcagaagagaaggctaaaaaggatgccgaggctaaagccaagaaagacgcagaagagaaggctaaaacggatgccgaggttaaagccaagaaagacgcagaagagaaggctaaaaaggatgccgaggctaaagccaagaaagacgcagaagagaaggctaaaacggatgccgaggttaaagccaagaaagacgcagaagagaaggctaaaacggatgccgaggttaaagccaagaaagacgcagaagcaaagaaaaaggaggaagaaatgaagaagcaaaaggctaagcccgaagaaaagcctgaggcacctgccgaaggcgtggccgtagtgccggaagcgaagaaagcaggagagaaaaaggaaaagctgaagcaggaagagaaaccagtggaagtaccaccatctccagcagaaaagaagagaaaagaggctgaggagaagaaggctcagaaggatgccgaggctaaagccaggaaagacgcagaagagaaggctaaaaaggatgccccg

SEQ ID NO: 81585 - DNA, 603 bp, Heterodera glycines
atggcaaaagagtgtgcaaacattcgagtcactgtaccaatttgtgtccaaattggtggaacggacgaaggacaaatggactccgaggttacggtggacagaagagcaatcgatgcaaatgaaaacaccgtatgtgactgaagaccacgttgggtttcgagcaccacagtcaaaacagaccttagaaagaaaaagattaaaattaaaaatgggttgagactttgttggatggattcgctcgtagtcttttaaaaatgttctcaatgtccggaggtgtgggagaaattaattcatttgccataataaaacaatattttcgaccttgcctgaatgtttaacaaattatctgtgaaataaaacaaaattataaacaaatgtttgaactggttattccacctttctttcatagacaaaatgaaaagccatcaatctaaacaaaaaaatgagaaaaaactgatccatcttagcaatttgtctgtgcgccaattcagaaagtccgaccaaaattataaattgtcaattacaacgcgcaaataaaatgaacaaattgactaaaggaaatcgctttaataatttaattttcaaaataaaatgcagacataa

SEQ ID NO: 81586 - DNA, 604 bp, Heterodera glycines
atggcaaatgaattaatttctcccacacctccggacattgagaacatttttaaaagactacgagcgaatccatccaacaaagtctcaacccatttttaattttaatctttttctttctaaggtctgttttgactgtggtgctcgaaacccaacgtggtcttcagtcacatacggtgttttcatttgcatcgattgctcttctgtccaccgtaacctcggagtccatttgtccttcgtccgttccaccaatttggacacaaattggtacagtgactcgaatgtttgcacactcttttgccatttcaggtcatggattcagcttcggttcaataacaatttttataatttggtttgttttccaaaatttagtgccatgcaaatcggaggaaatgcaaatgcggtgaatcgctccattttcgaataattgctaaagcatctgacaaacaaattaaggtggctttcttcaagcagcacggatgcgagtcgaatgatgcgcaagtgaaatatcacagcaaagctgctgcgatgtataaagtgagtggggtggataagtgatacggggagatggcaaatgttggccattctttagatgatcaagaaactg

SEQ ID NO: 81587 - DNA, 568 bp, Heterodera glycines
atggctttggttgaatttaaggtaaaaaaatccttttctggaaaactttgtttgtttacaataatgatctttaaggtaaaattggagcttgtggtaggaatttattctgctgatatgaagcttgaattgcgttcgcacgaagggaaatttatttcagaattaattggcgacgaccgtaccttagaagaagtttgtaatttccttttattttattctcgaattttttcaacagttgggagtccgagatcagtgcattgtgaatgtttgcgataccagtgaaacaagaaatgataattccacgaatgaccccaatgcattttatgtaattcccgaagagagatacgccaatagaaaaggttagactttttaaaaaagtgaaaatacaatagtatgataatcaacaagctaatgtaaaacgatgcttattattttagacacagctcgaaaatggaaacaacaacttatgacaactgcaacgacaacaaccgatggtaaacaaacttaatagcctttttagtggaccaatcgctttttagtcgaacgatccgagcagcaagtgccaaataaa

SEQ ID NO: 81588 - DNA, 1117 bp, Heterodera glycines
atgctgaagaaaggaggaacaattggtgctgaaggtgaaacaaatttgccagtttctcttgtgatcagatttctcaaaaaacgtgaagtgatcgaaaagtaatacagttaattattaaatgtaaaccaaattgccgtatttgtttggcctcaggctcatgccggtggtggaatgggaaactccaacaaaaataaagggaataaagaaagagtttggcaaaagataccgtttggttaggtcatcttatcaaaaatttaaaagcggcgaaattttactcgtcggcgtctattttgccaccgccggatcctagcactttaaataatttttgtgaacaaactcaaatcaaaaattaagtgattataaagtgcaaaaaaaaacgctttgaggggaatggtagttagccctccgcccctactccgaaattatctggctatggtactgatccttttttgtacatccccgcccccctccatttactcagtccatgcccgccaatttgttcgccggacgacgatttgactgtgcacatcggcgatcgtcagttgaccatttctgcccattggcttatgtccgtttcgccaatggtcaaacaaatgctcagcgtggagatgcaggagaagcatcagcgggcgatcaacctggacggattgggcatcacaatggagcagttcagcgaatttgctgatgccatttcaatttcgtccttgggtcaaccgttcttcccaaatcgtaaatattttttttttggcaattagcacttatatatttatatatattaatgagatattattattattattataaagttttacaatttcgaaataaaaatgagcacaccaattagtctcctttgggactattattcaaattaatccataattttaaaactataaatttaatttttttcaattttctgtgattttatgtttttttttcactttagcccaaaatgtgctcactttccttttaattgccgattacttccaaattgattggctgaaggagcgttgcggcgtccatttggccaattgtgtggaaattccattcttagaacgacttcttttgattgaacgttataaactcaaaaatttaatggtatgataaatacattaataaa

SEQ ID NO: 81589 - DNA, 244 bp, Heterodera glycines
atgaaaacttataaaaattcattttgcttagtatatttttcataatttcctatgatttttattttgatttaattaattaaaattttcagatttacttctttcttattgtaattttcaccgtgctgacgattgttatttttattccaatattgtagagcgtttttaatatgtttgtttagttttaattagaagtgtcctttttgtatgattttttttaatatttaattttcaacccaataataaa

SEQ ID NO: 81590 - DNA, 1241 bp, Heterodera glycines
atgtcttttaaacgagtgaactctgtcaaacccgccgtgccaatggaaaaaatgggatttccgctcaattgggtaagtttaacaaatcttaatgtataaatagctaatccttttaagaaataatttcctgatggagccctttaaacttattgaccaccaaacttcaaaatgcaaaaaagtttggttttacgaaaaacataacggaatttgtgatcaacccggatgtggagcgccccgatgaaacgctcccgcgaatcatcgagagaaactccacacaggcttgtgaaaaaagttgaaaaaagtggtgaaaaaaggtgaaaaacgcatggataaaggtgaaatttaatggtgaaaacctatggggggaggggggttattgacagccacacgtgcaagggtataaagacgccccgcttcttacccccacctaaacccatatcttggtccatccctttttcatgtaattaattataaataaaaatttgctaatattttcgttatttgtgaaaataattaaacatcttctaatcaattatttggtccctccattttcaaattccattatttttggtctcctcctctctccttctgttccctccctcctctgccgccgcccgccaattatctccgattttgatcaaaaaatttatttcaaattccacatttatttttcgtcatcaaagtattccgtggcgtagtggttatgcgcccggttcgctctctcagtgctggtgttcgagttaagccccctcgggggatggcgtgtttggggttcacgccttcgaacgtcccccatgcgcaccttcgctgagagggacgagcccagctcggacatggtggtaatgcataatgaacccagttgaggaccagtccaagacaaggggtaccactattttttctattttcatatcattattttttatttttatttaaattttcataatgttttttgcagatattatatttctttttatcatattttattttctattttcattgaatatcttattttttgttatatttggcatcactattttcatcattatcattttttacactattttttctattttcatatcattattttttatttttatttaaattttcataatgttttttgcagatattatatttctttttatcatattttattttctattttcattgaatatcttattttttgttatatttggcatcactattttcatcattatcattttttatctacgaattatttttta

SEQ ID NO: 81591 - DNA, 321 bp, Heterodera glycines
atgataaaattgattctgcatgatgctgggccgcttcaaaagcacgaactggttaaaaaaatattggagacctacaaactgaattcgaaaaagcatgtaataatgacattttttgttatatatatatatatatatatatatttaaatattatttaatttgtttaggtcaattcccgagttaaaaaaactctgcggacctacgttgggaatggagctcgcagtcgaagctggaagatattcggtggccgcatcgggcggtggtgataaatgattggtttgacggttccattttgtttttttcatttgttaatttttaataaa

SEQ ID NO: 81592 - DNA, 1702 bp, Heterodera glycines
atgaatccgcagggcgttagcgcaacaaaattcagtggtcaacaaatattggcatttgtacaacaaatgaaacagcaaatggcatcattagcagcagcatcaacatcagcaaatttgacaggatttgaattgtgcgcacaaaccaacaccacaacaaaaaatgggccacaacaattgggatcactaaattcggttgtcaaatcaaagacagaaataagttaaaacgcccggttaccgtaacccgttttcaaactttttatggtaactgatcggtaacggttaataaaattttttaattatttttaagtcaagtccaactcggaatgaactgattgaacgggaaaattttctctttttttaataagccgaacttgcaaaaaaatttagatttataagatcttctgaaaaagtgcatataattgttcttaggccaaacaataaaactccgagggttttgcacaagttctggtcaagtacagttcgaaccgatttttccaagaaaaattattatattttccataattcaaaattttacttctttcttaagtgcaaactttaaataaaagaatatttccccgatgaaaagcaggctagaattgttttaaagttttcttcagtttttgagtttcggcaatagcatcttgaaaaagtaaaattgaaagaatgaaaattatttctttcgggaattttatatttcttgcaaattttataaaatgaaagtattttgttttgatttttttttaattaagcttagcttttcaggtaaacaatcattagcatttgtataataatatgagtatttaggcgctggaacaaaaagattcgatgggtttcattatgttgaaacatttgctggacattgagcagaaagtgcgccgaatacgcttctcaccgacaccgattccggaatttttttataaacaatgcgattcatttgaggcaatttttgcacggaaattaaatttgcttgatttgacgcgtaaattttcggtgagcaaattatttaaaatgggttttaattttaaaatttaagacaaaacagtcgaacgtgcctaaagcaatattttttgaaaaaatacgtcaatttgggcccttctttataaggccagaggaactggtcagagatttgttatttgtattcgaaattggcaaaagttttcctttctttgcgcggcttgacatcaatgataaggtaaaaaatatttttcaaatttattcaattttaatttcaatttaaagattgccctgtgcagtaatattgcgatgccattgtatgtgttatgcaacggtttctactcagtccaacaaaattgtgaagttttttgtaatccagctggtatgaagcccattcagaaattcaaaaattcattctatcatgaagacccaatgtatgcatttatttaataattttcttaaaaaattaaattcagtgccatgggaatgggtgacacattgttgtgcaaagccatagaaccattccgccgtttaaaactgagcaccgaagaatttgtacttattcgagcaatcatttactccaatatgggttagaagttttttataaaaaatttctacaagaaaatttatataattaatgacaaattcaattaaatttttagtttcgccagggcttagtgaccaggcacagaaattgttattatctgaagcggagaaatattcttcactgttaatgagcattttacag

SEQ ID NO: 81593 - DNA, 2284 bp, Heterodera glycines
atgtgggatacccgtggtggggtcattccccaggcggtgcccccgtgcggcttcgatggcaacggttgtaccgtatcggtgtttgagttgtacaaagtacgatatatttctgtaacgttaacaattttatttgctattcaaaaggggtacttcataagcggaattgttctcttcgtgctaatcataggcagcagtttgcttatcatggtctatttaatacagtaagaaaaaagttgctgaagtattactgtagcctaaatgtttaaatttcagttcgaaaattgttgaaaaccgtaaaaccaacttactgtggcaaattccatttgcgatgatgaagcgagtgaagcaacgggtgagttttataattcatcccaaatcattttctaatttttatccccccccctatttaagcatggcgccgagcggagtcaccactccctccgctccaaccaaacgaacgtttccgcgctgacccattcgacgatggacagtttggcccagtccaaaaacttctctctgtacacttacaacggggacaagtgcattgtttgcacgtttgggtcaatgacagccgccgcgccattgtctgtcgctgaaatggccgagtgccgagcggtgaattggcggagggggcggggaaaggatggccaaggggcagggaacatcccaaggggttaatggggtacgtatcccccagcaaggataaagcttcttaagaaaaagacaaaaaatgccattttcgatttaaaattttaattaaaattttcagatgcgcctattcgaccacgagaatatgaaccggtttttggggctgagtttggacgggcccaatgtgttggccgtgtggaacttttgcatgcgcgggtccatcagagacgtgattttgtccgaaaatgccatggtcaaagatgtgatgttcatccaatcggccgtcaaggagctttgcgaagtgagagattgatttattttgttattgagggtaattaaataaattggcatttagtttaaaattggttttattctaaggaactcatgaaaattaaaattattaatttcaaaattataaaagtaaaaagcattttttccccttccagggccttcagttcctgcacaattcgccactccaattccatggtcgactgaaatcctccgcttgtttgatcaacgaacgatggcaagtgaaaatctcatattttgggcttcgatggctgaaaagtccgcaaaaaatgcaagcaaaaggtgaaaaagttacaataattaatcaatgaattaattcttttgtagaccttttatggctgtctcccgaacaattgcgaagagcgacggacggcgccgaaataaatgtggccgaaggctcaaaacagtcggacatttacacaatggcattgattttcacggaagtaaacaaacggacattaactcattgtctaaatttgccaatttatttgctatttacgatggtgaacatggccccgtgttgggaggagggccgcgactcggaggaagacggcggagcgacgcgcgacttggaagaaatggggtggagcagaggcaccgcgacgcggcacgtcgcaggcgcaacgcgcggacgcaacgcggacgaaattgcctatttggtgaagcggggcggattggtgccattgagaccgatgatacggcccgctttggataatttgcacccggaattggtaattaaaggcaattaatgaaatgactaaatgctaaaacaatgaaaatgaaccatgtgcatagaaaatggttgggttttcggtaattaaatcaattactgtttaaactcatcagattcatctgatccgcgactgttggaccgaagccccaaacgaacggccgactattgtaaaagtgcttcaacggttgcggcaaatgaacgccggtcagagcatcaatttgatggaccacgtgttcgaaatgttggagcagtacgccaacaaattggaggaggaagtgcaggaaaggacgcgcgagttggcgggggagaagcgcaagtagggcattttgctctatcggatgatgccacggttagcggggggagctctttcaatattcaactgttttagccaagtggcggaccgagtaaagctcggccaatccgtggagcccgagcagttcgactgtgtgtcggtgttcttctcggacattgtccaattcgcggcactgtccaaccaaatgcggccgctgcaggtggtcaatctgatgaacgacctgtacaccatcttcgacgcaatcattgacgagcacgacgtgtacaaggtggagtccatcg

SEQ ID NO: 81594 - DNA, 1258 bp, Heterodera glycines
accggcgcactcaattttcgaccacctctcagccgttcgcgcagtgtgccacgcctttgttccattgacggggaaaggcacgggccgaggaacaagaggtacggtaaatgcctgcttataccgtaaatatgtctctctctttctcttttcccctctctctctctatccgtctcactctcttaactttcgccatctctcgctttctcactaatctatacccatgtttaagtctctcactctctctctgcttatttctctcgttcatcattttctgtaaaagtgttttctgtccatttctgagatcacgtaactcaaaatacatatgaattattacaggatgactgtgatgagactgtgaaggatgaagacgaagatctgcagctttcatcgtctgatctgtactcattgaacaccgcggttcattaccagccagtgccaaccgctaccacaacgatggcaaacgcaatggtctcccatgcctgtgtcgctgctgatcatcagaccatcaacgattatcactatttttttatttttgctcctcatttccattttttctttcttttgccattaagtatttactgagttaaatactgtacgatgcggtgtatattacgccgctgctgtaaattccaaaatatttccgtatatcatacgggtttttatttatattttttaggcaaaacatatcattgaattcaacctttctgtcatacggttataaagacactaaaaatgtttttcatagaaaaaatttataaaaaggaaattttcaaatgaaaaaacatcaatttgatcaaaattaaaaaatgccagcattaagaattgcaaggcagctccgacaaaaaactttatcaatccctctgaagtcgccttcgtgctgatactcatgccggaggagttcatcacgattaccgtcaggcacgatgaccttgcgcaacccgaagtcactcatgcctacaactttgtccacaattttgctgacatactgcacttggccttcgagtccgattcgtcccgaaaaggcaacgttcattcggacgcaacggttgatcatgagtgaaaaaaaggcggcaaatgcacccgcagacagcgaaggcccttcggtcaagccatgcggagaacgcgacacaaaaatggggtgggtgacgagaatgttctggatggccgggtgtcgctgtgcaaacaatgtccgcgcttgatcagctgcattgctgattgcttgctgtaaacatatcgattgatgataaatccaaaaata

SEQ ID NO: 81595 - DNA, 715 bp, Heterodera glycines
atgcagcggcaggttcaaatgcgatcattctctatattaacaggtaattaattattcgattatttattaatatttaatttattcttatatttataaagaaataaatatttaaaaaaacaatttttagcactgaatatcgccatgaattcagaaaaatattgcgttcgctgaccaaatgtttttgtaaaaataatggtaatggataacttagttgaaaattttcaaatcctcattagcgcaataaaaattattctgtgttttggcattaaaataaacagcaaaatccctatatttcttgcaaaatatctctttatattttttaaattagtatttatgcgatatgtcaagaaattttgacaaaatgccaattttcggccgaatttttgccaaaaaccaatcaaaaaatccctctttaaaatctcaagttggggataaagcctcagaaatggttcagccttattaaatcacatttttatttaaatttgtttttagctgtccacgacatcgccgcaattcaaaatcgcgctgtcaatccgaactttatcagaccaaaccaattaaatgctttcaatccatccgaccgatttagtcgttattaattgtcctcaattgtcatttatgttgcttttttataaatatttttgtaaaaaaaacattataaaatttccccatgaaatcaattgaattgcttatgaattgaaaaaccaaaatttca

SEQ ID NO: 81596 - DNA, 467 bp, Heterodera glycines
atgatcattagtaatgaattaattaattattttgtcggtcagattgagtgcgaaggcaacgcctcattggtcggcatggaaatacggcatgcaaatgtctcacttgggcaggagcatgtgctcaacttcgttgaaattaatgctgacaatggtgtgttacgggccggtgacaaaatcaacgtccgaattcccatcgatggcacaattggcaaaacggaagtgatcaatgtgtcggtgaaccttttcttcgaggcgcttcgaaggcatccacacagtgagtcgaaaatgccaaaattgtcagctttgaattaaaaattgaattttgggggaggaatgccgaaatgtcccctctgctttcagtaggggtcagggctcccggacaatcggacagtggacaattggacagtggacaatcggacagtggacaattcgacagtaaggacattccgacagtggacaatccgaca

SEQ ID NO: 81597 - DNA, 316 bp, Heterodera glycines
atgaatgtgatctacggcccatggcggatatctgtgttccttgacggaatttctagatctaaattcttccggaaatggatatgggcaattcatttcgaagtcgacttcatcaattttgatgacgaaatgttccgccgtacaattaatggacaaattgaatttttggccatatttattaagcaaatgctcaacagggcgcccatttgtgatataatgatcaaaattcttgtgctcctgtaatttaatagggtttttaatcacaaagaaattgattttaacaaaatttgaaaaatgtttgatttaaaattaagaaaaa

SEQ ID NO: 81598 - DNA, 1198 bp, Heterodera glycines
atggattttgtgactttggacacaaattatgtaagaaaaataattaattaattcatcggaaggttaatgatcaattaattaattaatcaagatatttctttacattaaacagaaaccaccgtacatggatttaccatttaacaacactttgagaaaattgcaatacgcgaaaaatattattttccgaattcaactgaacaatgtaaaatcttttggcttcattatctctctgttgcatgatcgcccagagaaaaatgaggacagtaagtttttagagggtcgagagtctcgacaaagttttgccaattaaaacaatcaaaacgcaaaaatgtttagtcggcgctacaataatggaaatgaatgttaggccaacacatatctcaatgacgtcattttcagtggtaattaaaaacaaattatatttactttttttaattttaaaagagtttcttcatttaacaatttttttaaattttaaattccgttaaaggaaaataagtcatcagagcccgtaaaagattcgatcgatctaagcaaagcaggagcattggaaattaacatcactttgttcaaagatgacaagatcacaattcaaataaatgacattttgaagaggaattacacgtcagaaatgccaacttgggccacaaattttgtccgggtaatgccaaaaagtgaaaagtgatgggcaataatttccattagttttctgggaaattcttttttaggaaatatttaaattacaatttttaatgctatatttaaatacaattaatgggtccccggtaataatcaactgcaccggttgcacaaaagttttttctttctgttcagaaagtgtagaacgtgggaaaattctttttacataaaaggctcaatcaaaatggtaatattctaatgaaatgtaataaaaaggaataattaaacataatttttgcctaattattacaggtggaagagatcaacaaatacaaaggcggcatcactttgatggaaaagccgtttattggcattgatacgcaattggcagaggcaaacgagggacagcagcagcagaaagacggattgccattgaccaagcgattaatgacagtgcttaattacggggacgtaattcgcatggaattcctcatcaaaaggcaaatcggcaaattgaccatcgctttgatgcacgaggcaaaatatttcgacaaaagac

SEQ ID NO: 81599 - DNA, 689 bp, Heterodera glycines
atgacttctcactttctcgtcggcgttgcagccttcggggcgggaatggtaagttttttttttgtttttcgctccaaattttacatctcaaacaaatttttttcaaattttcagtgcttcgcgaagacgtacatggagaaaccgaagagcgaagacgacaaagaagcgcccaagaaggaagaagccacgaccggcggcgacgcggaggagaaggcaaagaagaaggacaagaaaggcgacggcgcagctgcggcggacaagaaggaggagaagcgcaaggacaaacacaaatcgaaggaggggaagagcgacgacagcaaccgccgttccaagaaggacaagcacgggaagaaggacaaaaaggacaagaagaaggacgccgccgagccagccgctaacgccggagaacaaagcacagcggagacgacccaagcggacgaatagccagcgatgagaacgacgacggtgcacgacgacctctcccttcacgatcagtcccccctactgcttgctgttgtttgtgtgaagtccgttccccatattttgtacatattccatgtgatcagagcgaccttcctaatgtgatcaaaatatgtatgtatgtataatatccattaatttgctgcttcatattcgttatttgtgtgtatgtacaatgtttgtattcattgttcaatgtgtgtaataaa

SEQ ID NO: 81600 - DNA, 1085 bp, Heterodera glycines
atgtcggagaacacaacggaagcggagaggagacaaatggaaaatgaactgtgtgtctttttctagggatgtacgggtccgagaattggtgcaaaaaccgggtccagatattgccagagggtccagaaaagccgagtttgggtccgagcccaagtttttcaaccgggtccgagtacttaattaaaaaaaattaaatatttcgcgaaatattttgtacataattaacaattattaaaataaaaatttatttttttttgaaattgatagcaaataaaaatctgaataccaattttataattttatagaagataacgtggctatcattttttttttgcttttcatatcttttttcagtctttttaggaaacggcagtgatccggcggtgccgacaggcgccgctggcaagatttttttaaattttggaaagatttattaattgctttttatcaaaaaatgaccattgatggatatttggatcaaatttaagaaaataaggtagtttggttacagcagaaccataaaggcagctctttccatacttaagacaaagtggaagttttacaaaagtcgtaaaaaaaagtaaataaaatccaccggtatgagagtgttttccctttccctcaaccttgatcatcaatttgacgctcacacccattcgtactaatatttttctgggcccggttagacccggacttaggcccgggttttcttgaaaaaaccggttatccggctctggaccgtgtaaccctagttttttaaatgaaattttaaaattaatttgccatttttcagtttcatttgtgccgattgttggctttcagtcttccatttgctgccgccttctcaacttggccttggcattgcactgctcagccaccgatttgactgtttggtggacgaacacttcaaaacgcgcaaatggatgttgggagttattgcgattggaaataaaattggagaaaatggcaaaaaggaaatgaaacttcagcaatgtgcaaatttttgggaatggagaacagtgccaattccgcaaaatccgttgccgaacaaattcatcggatttcgacacattctgattacgtaa

SEQ ID NO: 81601 - DNA, 929 bp, Heterodera glycines
atgtggggagttattgcgattggaaacaaaattggagaaaatggcaaaaaggaaatgaaacttacaaattttcctgaatggagaagaatgccaattccgcaaaatccgttgcccaacaaattcatcggatttcgacacatccggattaggtaaaattgaccgattaaatgatttgcgttaaaattctaccatttagatacattgattctaatgtgattgtttttctccaacgttttcgttctttttttgcttctcatcagacaaatttgtcaattaaaacaaatagtggcgtcagccattttttggaaaatgttgtaaaaaacatttggccaatgatcaaagacaaaatttgtgccattagtttttcgtctcccgacgaattttgccgttttcaacaattggtgccgtccattctcagcgacaattgttgttgttgtcaatctcttcgagcaatgtttttttacactggtgatttgccaaatttttgcattttgccaatttttggcgatttgccaaatttacccgctaatggctgtgccaatatgtcgactgaccaatcggttatcaaatggctattctcgcctcgcgcagacggtgctccgaaggtgctccgatacagtctccaaatgaataataaatttccgagaaaaattgacgcatttaaaagggtgactaatttaatatttactgttttgaaatttccctaattaaggcatttgccaatgccttttctcgtgccaatttcatcgtttacattcgctttcgcttttctttttggagtgttcgggttggtattccgacctttgaattgttcaacaattcaactggggagcgattgacactgaaacagatttatgataagtatgttattaatcttacatatcaatcaattgggttgatgggaccgcattaggccaaaaacccaaaaa

SEQ ID NO: 81602 - DNA, 522 bp, Heterodera glycines
atgagcacaaatgggccaagtgggaaagggaagcgattgaatggatattcgatgatcagtggagccatattaatttgtcagaaagtgatgaagatgatggatatgatctcatcagtacatggttggtactaattattagggatgatatttttatgtttttacctatttttcccctaactcccagtgacctgataagcacgaaaaatatgttttttcagttgttgttaagctacttttgaagtttttaaagcccatttcttggtttttactttttagaatctaacctaaaaatttcgtccctactaatcactacttacatatctatccaatcactttcgtttttttcattagtttggtggacacaacgccaggcccaagtggtcagcagaagtgaattgccgttgctttgtctttatttggatgggcccaatctgagaaaatttcaatccgatttgaaatacttaccctttttcagcctattatctactttatgctttcctttatttgttaaacataataata

SEQ ID NO: 81603 - DNA, 309 bp, Heterodera glycines
atgattgcattgctagcgttaattctaagttcaattgcatttaggacaatgttgaggtatttgtcgaaatctttgtcttcgactcgtagtgccctcgttgatatttcttcagtgcatttttctttttatcatctatttttttatgaattcaaaaattttcaggttggaaagccttcttacccttccaaaacgtctagccctaccggaagtttgcttctcagcgaaggcgagcattccactgcgtctgggtctcttgttaacgtccgaatgccgaacataaaaggtgaagctgtgtcaaaatccgattaa

SEQ ID NO: 81604 - DNA, 632 bp, Heterodera glycines
  unsure (1)..(632): unsure at all n locations
gctggttatccgttgccttttaagcgcccctcgggatgggaggagccctatcggagagataaaatgggggggggggggagggtaaaggccatttccggtcccggccttacacctccggccctccaaaagaccgtccctggtcgttaaaatttaaataatttccaaatttaaatgaagtcctcagactttttctttcttttgattttttttttacggtgagaaatttgttttgattttaaagccaaactgaaaataaaataatttaaatatttatttaattactcnaaataaaaatggaaaatgccgagcctctaatgggaatgaacccattcctccaaccaatccacagaagctctgtcattgagctactaaaagaaatccgccctttttttaaattaattttcttgaaattctgattcaattggatttgaattaaattggcattgcttttcaaattatgagccaagagaaaatctgatgaaatttaaaacttttaaaattgtataaatttaataattgttttatttaatttccaatcgactaaaatttggatttttgatataacccggtgtgactgtatgactatacctccccttcatacctgaggatcgtccctgatacaagaacttaaa

SEQ ID NO: 81605 - DNA, 419 bp, Heterodera glycines
ctaatttgtcatattgtacttttgaccgtaactgagcttctttaatgaccgccgcagcagattcccaagcttttctgagagacttaactaatttctgcttgacattgtcaacttcactggtgttttcgggttcggtgttgggattcagaatttgctcaatgcaaaatattgggtctcgcccaaagaccaaaaagaaaggtgtctcctttgtggaagagtgaattgatgtgttatagcagaagttggcacattcaagaaattcatcaaaatctggttcttcatttgaaatatatttcgcaagtatattgtgaaatgtcctaaaagatcgctcaactactgcattgccttggctccaatggggaatagcataacatttataagtatagagaagcgaacagaaggacttaaaaaaatcagag

SEQ ID NO: 81606 - DNA, 1975 bp, Heterodera glycines
tccttctgttcgcttctctatacttataaatgttatgctattccccattggagccaaggcaatgcagtagttgagcgatcttttaggacatttcacaatatacttgcgaaatatatttcaaatgaagaaccagattttgatgaatttcttgaatgtgccaacttctgctataacacatcaattcactcttccacaaaggagacacctttctttttggtctttgggcgagacccaatattttgcattgagcaaattctgaatcccaacaccgaacccgaaaacaccagtgaagttgacaatgtcaagcagaaattagttaagtctctcagaaaagcttgggaatctgctgcggcggtcattaaagaagctcagttacggtcaaaagtacaatatgacaaattagtacgcaatcaaaccgtccaaataggagatagggttcttttacgcaattacgcaggaaaagtcaaaacatccaagaaatttcaattaccttggaagggactgtatcgagtgatagagattaatggtgtccttatcacaatcgtcagctgcacatcacctcaaacaaacccaagaattgtacacattaatcaagttaaaaagtattttgagtactcaggacccccttgcaccacgaaaaatcttcaaaaagatgaagaacaagcactaaaggaattagaatcaagagaacagaccaatgtacctggctattctcatgattcctatcaaaaaatctctgataacacagtattaatagaaaacgcacctgcactcacccctaatccctcaccctctccacagtccaataatcaggtaaaagaaaaagaattaaatagaaatctttgctcaaaacataatctccgcgaaaaccctaggaaaaagaagcattttggtaacttttctgaggactaatttcatgggatagccaaattcaatcattttttccattttttttttttttttttttaaacatactgtcttttaagaacgtggactggtctcgagaagccatttcaactttaatgccaacaaaaaaaaatttggacagactctcggaattatttaatgaaatttttttttaacaataagtcccgcgggactatttatcgcttcatttttttcagttctgaggaacttaacacatcttaatttataaaatattctaattcaactctttaaattgatcacttataactcagtcttttgacagtccggataattatctttaagtcttaaagaagtgtatttttctcactaaccgttttgtttacatagcaaaatgtcatgcgccgcggcgttcgttaattataatctgggagagatgaggataatttcgcttcctgatggcctttccttaatggcttttcaggggatgcaagacccatttagcaacttctacttttcgccatttgtttatgagggagaaagttactgctgtgtggagcaggcatttgtaatgaagaaagttcgtacatacgaactcaatggagtggcggcggaagtgatgcgatttgtccacaaagacgactccacaccaaactccccgcggtggcccgatggtcacccacgtgaactaaaatggttcggacgcgaagccgaagagagagcctctcccgccactaaaagaaactggtcggagaacgcacaaagaagctccatcgctttctttgtggagctgaagtttcggcaaaatcagcacttggcagctcttctgctagcgacaaacgacatgtggattgcggaagcgtgtaaagatcgaaagtgggctgtcggatactacaaagacgatccattcttgcacaactacacaccagaaaatggggcatttgggcgaaattggatgggcaatatcctcatgagcttgaggatgcgaatgctaaatgagcagcaaagtgttgctggtccttctaggcaaattggtaaacgggaggactcaatagcttataattatgaaaactctgaggagttaatataa

SEQ ID NO: 81607 - DNA, 2777 bp, Heterodera glycines
gagagcatgacatagtaaccacgtctgacactcctgtgtcgtcgaagccacaccgaacaccattcaagtatcgtgatgaactccaaaaacacattgatcaacttttggcatccggagtcatggttgagtcggacactccgtgggtctcaaatatcgtcctagtgcagaagaaggacggtgggttaagaccatgtatagacttccgtaaacttaacgaagtgactgttccggaccattatccacttcctagattggaaacaattatggaacgaataggtaattgccgttactattcaagtttggacctgtcaagtggatacctccaaataagactaacagaaagggcttccagaaaatgtggcttaattactgaaaacaaaattttccagatggttaatcttccttttggtctaagaaatgcaaccagtgcgtttgccagatgcatggcgcatgtcctcacaggtttggacgattgtgtaatcgcatatgtcgatgatattctggtatacaccagggatgataattttggcgagcatctcaatgctttgagaagtgtttttgaaagatttaggaggttcaacctaaaattaagccctaaaaaatgcacattcgctgcggcgaccatgaattttctcggatacttagtcaatgctgacggctacactcctagtctaagcaaagtggaaataattaaaaaccttccagaccctaaaacaactcgagatgtgaaacatgtagtaggaatggcttcattctttcgtaaacatgttcctaatttttctacaatcgtagaaccattgaccagactaaccaaaaaggagagcaatttcgagtggggtacagaacaggctgcggcattcaatgaagtaaaaagaattttgagtgagaaaccaatattggtgtttcccaattatgataaaccctttcacatattcacagatgcctctaatgttggccaaggtggggcactcatgcagtggaatgagttggcggaagcatatgaagttattgcttattgcagcagaacgctgtcagcatctgaacgcaaatggcctgctgtacaagcggaattgggagcaataatttttgctctgcgaaatttcaaaccctatatttttctgacagaaattgaattacattgtgatcataaacccctcgccttcctacttaaaaaggcagaagcgcatccacaccttgcgcgttggttaattgagttacagaattacaatattaaaataattcatgtagcggggaagcagaatcttttagctgacggtttatcacggtacccacatgaaagaacccaagagattgccattagagatttggctgaattggaagacatagcaaattttcccgtctgtcttgcactgaatatgaagccaagaatggttcatgagcattttcttttaaccatcactgctcgtgatatagaaggaaaaacattcgccattgatgttcggaaagaacaaaatgacgattctgaggttaggaaattaattgaatttgtaaattttggttcattccctgaggggaccacagaagttgaaaaggaagatattgcatcaagagcggaaaatttgagtctttcctcaggcatattatatcaacacttaccagatcaaaatgctcgaatgtacattccgctttctcttcgtccactaatttttgaagcttttcatacttcacaaataaatggtggtcatatgaacatcaaaaagacattagggaaatgtagaaaattttattggccaatgatgcaccgcgacatcacaaattggacaagacaatgcatcacatgtcaactaagacattcacccaatccttcatatcgtgcagaaatgcaaatgccaccaaaaaatactctcttcgctcaaattgcacttgatttggcaggtcctcttcccctcacgcagaaaggtaacaaacacatccttaacataatttgcacatttaccaaatatgtaatctctgtacctatccctgatgctaaatcccaaacaatagcactagcattctttaaacactgttatttaaagtttggaggctgtacgagtcttttaactgataatgccacggcattcacctctgatttttttaagtccttctgttcgcttctctatattaataaatgttatgctattccccattggagccaaggcaatgcagtagttgagcgatcttttaggacatttcacaatatacttgcgaaatatatttcaaatgaagaaccagattttgatgaatttcttgaatgtgccaacttctgctataacacatcaattcactcttccacaaaggagacacctttctttttggtctttgggcgagacccaatattttgcattgagcaaattctgaatcccaacaccgaacccgaaaacaccagtgaagttgacaatgtcaagcagaaattagttaagtctctcagaaaagcttgggaatccgctgcggcggtcattaaagaagctcagttacggtcaaaagtacaatatgacaaattagtacgcaatcaaaccgtccaaataggagatagggttcttttacgcaattacgcaggaaaagtcaaaacatccaagaaatttcaattaccttggaagggactttatcgagtcattgagattaatggtgtccttattacaattgtaagctgcacatctcctcaaacgaacccaagaattgtacacattaatcaagttaaaaagtattttgagtgctcaggacccccttggaccacgaaaaatcttcaaaaagatgaagaacaagcactaaaggag

SEQ ID NO: 81608 - DNA, 488 bp, Heterodera glycines
ctaatttgtcatattgtacttttgaccgtaactgagcttctttaatgaccgccgcagcggattcccaagcttttctgagagacttaactaatttctgcttgacattgtcaacttcactggtgttttcgggttcggtgttgggattcagaatttgctcaatgcaaaatattgggtctcgcccaaagaccaaaaagaaaggtgtctcctttgtggaagagtgaattgatgtgttatagcagaagttggcacattcaagaaattcatcaaaatctggttcttcatttgaaatatatttcgcaagtatattgtgaaatgtcctaaaagatcgctcaactactgcattgccttggctccaatggggaatagcataacatttattaatatagagaagcgaacagaaggacttaaaaaaatcagaggtgaatgccgtggcattatcagttaaaagactcgtacagcctccaaactttaaataacagtgtttaaag

SEQ ID NO: 81609 - DNA, 2087 bp, Heterodera glycines
aagcatacatttatttaaaatttcgaagtattaaaagtttttattggaaaattacaatgggaaagcctgtaaaaatgattattgtttcagtgaattctctcgtccactcgtcgaatgatttctttttttgttgataatttctttgtacgtttatcgataagctccgaattacctccttccctctaattagtgtcctacaaaatcgattaactaattgctttttgttggtttgttgctataattcactaattattttcatcggcgtgtaaaaatggcacggagtgaagcgaacggtcaccggcaaaaaagggaaagtccgccgacttacgacgattggcttggcacaattcggcaggagggcggccaattggcatggctttggcggaagagttgcggcgaagtgcacaatttggggaggacgaagcagcaaatggacgaagccgttctgtcctcaaagagaattcgggtgaaatcggaaaaaagcgacttttttgaacgtttcgccaatgtttttcaaattttatttgttaggacgcaattcgaactttggccgcccggggggaaacggtcgacgccgccgtccgagccgaagcacagcaaattctgtcgacgatggcactcgactttcgctttcattccgccgcacaaccaattggctacagtttggccaccgtttttgaagtcatttcattcattgagtcgatgattgtgttctcactttttgactgttcagcgcattttctcccacatttgggtcaattcggcacggatgtgccaaatccgacaaatctcagctgaccgatcagtgcccatcgtttggttgcccacgcatcgaagtagcacaagaagcttttgtcaaactacctctctcccgctttctctttctctctctgctactctctccccacacacacacactctctctctctctctctctctctctctccactctttcttctacttcctttctctctctcctcttctctctcccccactctctctctctctctctcctactttctctctctaacccctttctatatctctccttctctctccccctttctccgcccccactttctccctcaacctcctctccctgttccattaggctatctcgactttttgcttctctctcttctctcctaccattaccgtatccaactcccggccatttgtgccgccgatgacttccgcgcctcgcgccttctcggcgaggctttgcgccgttgcggcgcctttttcatccgtcgctctttcagagaagtgtttacttacttccatggctttgttttgctctcaaatgctttctctcccttttatgatttgctctatcgctctgttttttctgaatatgtccaacaaattctctcccacggcgaccgacccatcgaattttttatcgaagtttcgaatttgtttttggtctcctctaagccaattcctttgtcagggccaacgcagtcggacggccaaaagtgttttcccgcgcgttggactgctccaacttgtcgtggaaccgttcatcagagcgcaagtgtacgacacggtagcgacgaggcaattaagctcattaaggtccacttaagattttggtgcccgttaccatcgattacgaccgaattttggaggaaaaactctttgcctgggaattggtgggcttctcaaagccccgggaaaccacaatgggtcagtgcaaacggagtgaacggctgctttattcctccgatttcctttaggccttttgcgtgcgcattcgattttaagtgacaattttggcgatattcgcgtcacagttggcgagccgatttcccttcgcaaatattttttcgataaatttggccatggcttcgacttccgattggaaatggtgggccaaatgattgcaattggagattaaatcactcactaatttttatgtgcagaacaaatcagattcggacgagagagttcgcgaaatggtgcacaatttggccttggaaattgtccatttgcaaaatgccaatggcactttgattctttggccttttgttgcattggcaattcttcaaactctcaacgaattccccttaaattctcagccaatt

SEQ ID NO: 81610 - DNA, 1959 bp, Heterodera glycines
tccctgacaccaaatctctcactactgcaaaggctctccttcgacatgtttacttaaaattcggtggttgcactgaattaataagtgacaatgccaccacattcacctcagacttctttaaatctttttgttcccttctctatattaataaatcattctccaccccttactggtcccagggcaatggtgcaacagaaaggacatttagaacttttcataatattctgtctaaatatatcaatcccaaagagcccaatttcgatgaatttctagatgcagctaccttctgttacaatacttccattcatgaatcaactggcgaaagccccttctttctcgtgtttggcagagaccctatctttagtattgatcaaattcttgatccctccgtccatctaccactccctcacaatgacttagctgagttcaaaaccctccttgtcctttccctaagaaaagcctggaattctgcagctgactcaattaaagaggctcagaataaatcaaaagtgcaatatgataagaaatttaggaatcctaacatttccattggggaccgtgttctgttacggaattatactggaaaaccgggcacttcccaaaaatttcacaatccatggaagggcgttttcagagttattaacatagaagaactccatgtcaccatcgtcagttgttcctccccacaatccaacccatttaaagtccatattaatcaactgaagaaactttttgagatttccggtcctcccagcacctcccccgtcctctcttctgctgaaaaagctgctttagaagcagcagaagccaccgagataccaaacacgataggcttcaatcatacccctgatatttcaccaaaaaccctccctcctgatacccaaaaatccaatgtaccccaaattttacctacttctattgacaaagaacaagcggttttccctcagcgggatctcttgcataaaagtaaatacaatctccgctctcgcccaaggtctaacagttttaaacaataacaaatgcacttttctccttacccattttcatactcacaattaatttttaacttctcacaccacttttttacaacatttttccccttttttggtttcattccttcacaccgccttgcacccaaaatttttatgattaattcgcgtttccctcccttccccaacagaatgatccccttcctgtccaacatccccgaacacaaatacctctcccaacttctaccccgcccccttcttctaccctccctcctcctgtcacttcctttcgtcagagcaatgttaccaatccacaaaagcaacattcttccaaagatacgacatagacaccgaaatcctgaaaaccacctccccagtcgtagcaaaacgactcggggctcgtgcccaaaatgaagctgaccccgcagcagtaaaagtgtggcacagcacgaagcagtcaaagatggaagagattctcttccacaagttcgaccagaaccccgccctggcagagtgcctcatttcaactggggagaaatttttggttgaagcgagtcacgctgaccgattctggggcgctggtgccaccattgacgacattcgtcaatggaactttactgggcgaaacaccatgggccaactgctaatggaacttcgtgaaaaattaaaaggttttaggattcctcattccccagcgtcccttctcaaataaacatcataagtctcacacctttattccccccccccccatcttcctctttcccttccaaaagtatcgacccctcctttgcactccaagttctccttaaatgctttgttttgtttgtgttactaacaatgctttaccatacttccacattgctgtgttgttttctaatctcgttttgtcctctcctcgaatatctcttcactgccacattaagtatgccgaaacgacaatcgaaaccctggattccaaagacgaaatgcc

SEQ ID NO: 81611 - DNA, 545 bp, Heterodera glycines
ccccaattcgtcccttctctctgccgatgctttcgccttcgtttgcgctgtttctccgtacgctttttcttctccttgcgatgattttcctctccgtcgccttcgaattcgatctccgcgacgatggccaatccgtccgctttggtccttcctcttccggtggcaccagcggcgcatccgttgcctcccaactgttcgtgaactcggaggacaacgcgggtttcattggcggaattccgggcggatccgcgcggcgcagactcatccaaccgccgccgctgaaaagggatggaacggcgctgccgtggggggcggaagaggcgtgggcacggatcagcagaagcggggggagaaggttctgattgaagagcggagagagaaaggaagagtgatcggacgaaaagggactgatcagaagaggaaaagccaccaaagaaaggaatcatctgatcggtggcacccaatgatctttggtccaatgggcaattcgacgtgataattctcatttcggaaaatcaaatataaaattaaattgagtgaatttt

SEQ ID NO: 81612 - DNA, 919 bp, Heterodera glycines
  unsure (1)..(919): unsure at all n locations
atgcacgatgccaagtctcgtttattccagcccggtcgaatttcggcagaacaatcgctttgcccccgcttaattgattgtaaatccgtagaaaaaaatgaaattaaaaaaaattttttaattttcagacattgtaattgtcggccgtcgtcctaatgccaccgttcgacgacgacggcacccgccgtcagccggcggttatgtcaatgtgacagccggcgggggagcgggtccaatggcaatccccggtggcactgttagtcatcccgaattgctgagaaggtctgatggccacggaaaatgaatggacttggccaaaagagtgtgtcaacaatcattgagtgccccaggaagatattttttcggggtgcacgaaacaaagtttaacgaaattttgaatgatttccaactaagcgatgtcatagtatcaatattttgaaaaatttaattaaaaatatatgatttaattaatttttcttttcgaaaaagtttatcatttttgaacataattttttaatgcaaatatattttttcattcttaatttttttttttctttaacgaacacgaacaaaattttcctgggtttcacatgctagataccaataacttcattatctaataatctttgaacgaatgatattaattaattaattattttccaaggtatcccagcgaaaaccatcgtgatttcgagttgccccgtgatgtcacatatttttgccaacccgaagggtgcgtgtcatttaacggttccgcatttcggcagttgaaaaagcggtaagtaaaattatagcatttaatttgttgaaaatttttgatttaaaattattattttttcagcaatgccttccaagaggccacttttttcgtttttacactcactgacaaagattcggccanaagtcgatttggcgtcac

SEQ ID NO: 81613 - DNA, 487 bp, Heterodera glycines
atgttttgcgttcgccgcccacgtcgtcgtcctcaatgctcagagccgatcttgcgcagttatcgtcgtggaaaggtgaaaatgttttcaaaaaaacgtaatttaaacttaattgttttctttccaaattacatttttttttgttctatgagtcaaaatttttaaattatttgtttataaatatttttgtcctttacaggagcacgtggtgctcgaattggggagtccgatggcgatccgagataatgacgaggacggggcaaacaaagaaattatcgatcaggaattggagggtgagtgaaaatgccattataaatttatcgttttttacttactattatttcagtcactctcgaaggcaatgagaaagagtgttaggccaaggcgcacagagtgcaaattttgatatgatgaatttaaaatattaaatttaattatttttggttttaaattttcatttttaaaatcatttctaagctcaaataaa

SEQ ID NO: 81614 - DNA, 433 bp, Heterodera glycines
atgctgcaaattaacttgatgattgttttcttctcatttttattcgtactaattgatggaactgatgaagaattatttgatgatttgtgtgaaaaccttcagccatcgacctcagaaaacttcaaaaaaacaaaactcgaagaaatgaatgccataaagaaagaaattgttgataacaatgaaaataccgaaaaacaaaatgccaatcaaattgaaatggaagacataaagccaaaagaattgcaaaaaattaaaaaggaaaaaatattggaagaacaaaatataaaagtgacgaaaattgaattggacaaattgagcgaagaatcctttgaaaatgagtttgatgaacaagctgatcagaatgtttcgtctgctgatgctgaaggctacaatgatatggtaatataacagataaaataacatcattcctgga

SEQ ID NO: 81615 - DNA, 522 bp, Heterodera glycines
atgaccaaaatatttcaaacgacaaaaattgagaagaaaacatttgacaaaagccaaatggacaaagccatagcaaaagatcaaatgctcaatgacaacaataagcggatgtttaaaaaactatttaacaattcaagcaaaattgttgaaatttatgaaactttattaaaaggtaaataattataattaattatttttgaaaatcccaattaatcaaaatgaacattttgcaacatttttcaaacttttgggaccaaaagatcaaaaaaaaatttgcgtcagactttaaaatttcttgataaaatagtgacattatgcaataaaattttaaaattataaatatatttaagaaatcagaacaattttagtcgctaccccaaaattagaaattcttataaataagaacaatgtataagccctggtttaaaggccagcttctaacgaaatcagattattaaactgacaaaaaggaagatttacgagaatttaaaaagaaaaattggttttttgggttaaaataaa

SEQ ID NO: 81616 - DNA, 473 bp, Heterodera glycines
atggcggaagcagcaacaattattacaacaatttggggtaagccctggatcgaacggaaatataactagagctcggcattttgaaaaaaagccttgacctggattccatgttgaacatggatttccgggacaaaaacccaggcttgtcaagagatagtcctgggttttttgaaatttgttttaaaggcaaacaaatgttcgaaaaaatcaattaattgcttaagaacatctaaaaattttaatttataataataatgtgtttttaaatttattacctaattctttttgatattttaataaaacatagtaagtcacatgaaataacaaataataaaatattaaccaggcctagcctggacctggatttcttggaccaaaacccaaatccaggagaaatccattttgccgaaaaatgggctggacctggatccaagaaaaatccaagctggattcagatccaggtcaagctctaa

SEQ ID NO: 81617 - DNA, 443 bp, Heterodera glycines
atggttaacttagtgagaaaagggtataataataataagctgatcaaagggggctaaattggtctgagtgagtggagtgattaattggtgaaaaaggggaacggaaacgatcaaaagtgatcagaccaaaggagataaaacaaacgatcaaatgacatataaaaggtgccgaattaaacttgacacgcctttttttctctacaacttatttcaagattaattatattaatttgctcattttgcagaccagcaatctgcaggcggcggtgcacaacgacgacttctcggacttccggcgcgcgtacgacgcaccgcctgggcccgccttttcggatgcaaatgccatcgatggacggacttacggggaaccgcgggtggcatacccggcggcgattaaaagtcggaaaaattaaaagaaaattaaaacatttttgaataataaa

SEQ ID NO: 81618 - DNA, 341 bp, Heterodera glycines
atggagggcgaacgccaattcgccttcgattacatcgcaaatgtgcagagacacgtggacgccaaagggtgaaaacgagaagcaaaatcgaaaaataataataaaaaaacaatttcagagttttctacgaagtctctgtcaggcgaatgccgtgcctaccgaggccaaaaagtggcggaaaatgtaagggaggggaggaaaaggaaaagccaactaatttaaaattgaaagtggaagccggagtggacaaagaaatgataaagcgactaatggggacagaagaaggaacggaggagaaaaattaccgaagccaaaccaaagcagggacaaatgtgatcaaa

SEQ ID NO: 81619 - DNA, 228 bp, Heterodera glycines
atgcaacgcgccccacatgttggagcagtaattgtggaacaaacggatgatttgtttctcacaaaaaatggccgtccacggcgtgtgatgtcatgtcagcagctcaggaaactgctgaacggcttggtggccagcgtgtgcaacaacagcgaccaccttgatgaggctgatgagcactacgattacgacgacattccgccaaaatcccaacaacatcagcagttgaag

SEQ ID NO: 81620 - DNA, 967 bp, Heterodera glycines
atggtacactatgcgaaggatgtttctaaaaatgtgtcaaacacttgctcaaataacagaagtgaccgtgaagaagtgtacagtgtgttagaacattacatgggtcagtggggggtcaatggcgcgacatttggggatttataacattggataccagtaatttggggacccaacatttcggggtccggaaaatccgtcagtgaaggacaatccatcagtaatggacaatcttttcacttttcgtgctattttttgcggctttcttaaaaatttcaggggatgggaggggtccggcggtgcctataggcgccaccgggataaataaatacatacaaatcccttttctcttcaacagacattggcactattcggtcaataggcgtggcaaatttcgactcagaccatgtcgaatacttagtcaagaatggcatacattgtgtgccggccgttgtccaatgcgaaatgcacccattcttacagcgtgacgatctgcttgattactgtaaatccgcagggattttcctgcaggtggtcaaatttggaaaaaataaatttaaaaacccctaagcgttgtgatcggaaggttcagtggaaaatgcatcagagaatcagataattttctaacaaaatatcaaacaaatttttaaaattaaattgttaagccgatttaaaattttataatttactttgcggcacaaaatttgcaccaagggcacaaaagcaccttaaattttttctaagtataacctaaatacttaaaatatcgacaatttgcgtttagattgtgagtgtctgtttctcgggtttgtgatatggtgctagatggtcctagaaaagctctctaaaagcttaagaatgcttttctgtgtgcgataaaatcagacaaatttttttaagttaaatttttaattgatttaatattttctctatttcagaaaaagaaaatccattaattgttaacttttaa

SEQ ID NO: 81621 - DNA, 941 bp, Heterodera glycines
  unsure (1)..(941): unsure at all n locations
atggccttaaatgggacctatcttttcaacctgagcttgtactgctccaactccatgcatgaagttcgagctgtacaggtttgttgcgatcccagagactttgtgtaattaaatttagaatgttcacaggcagcaaaaaaggaacaaaacaaaagtaaaaaaagcacatgccaaatgcaataaatatactgtggaatagctatttataaaattgtaacgcattaatgaaagcgaaaacaattagtaaccgattagtaaaaaatggccaattatttgttaattactgaaattaaccaattaattaatcagaagggaaattaacgtaaattggaaccaaaatataaaataaaaaagcatttattcagatatatttcggaaagtaatttaatgatttattttaacaaatttttattggccatttaacttttgggttttggggagagaaaggactttcgtccaatttaaatatttaaatttttttttctttgaaatgccacaaattggccctttttgagttgaagtttaaagcgtgcgntctctttctcccccccccccttttgctcatattttatgtttctgtctccccccgcttttctccgcttttccttccccccattttctttcgccgcttttccccctaaatctccccggagatttacccattccgcccaaattctgtttgtattttggctttatgtagcggagtaacaacaaattcgtgatttatcccattttataattttgcccgactccaaaaatatttctcctgtttctgaattttcatcccatcgatttaaaatttatttttattttttgccgaattgacaacaaaatgccattaatcttttcgtttcaacgaagaaaggtgagcaaaaaatggcacccaaagtacccaattcagagctccattcattcatccatcacaaaaagaaaaagcgaaa

SEQ ID NO: 81622 - DNA, 2586 bp, Heterodera glycines
atgccatcccctgctcagatgtcttccccatccccgccgaccttcgcttcccatttcaaatactccgtcgccgtttgtcacggcattggcaccgccggtggacgacgctcgccgatgcgccgcgtttcgctgccctccgcgctgccgcacccgcgcacgccgaacacgctgagcccaaagctcggcttcctcaaggtacagcccaactgctgctgcttaattatgctcattagtgaattgattattttatttatttgattatttttgccatttcatttggcggcaaatgtcctttttaacacattttcaccgcataaaattacgtttttgcttaaaaggtaaaagtttaaaaagctgtccttttctggcactttttttacgttttttggccctaaaatattttcacaaaaaaaacaatttgtccatttcttatgtggccaaggaatttctacatatattccatgatttgattacgtaaattgggcccatccgtccacaaataaatccgcgcttttctcggatttgtgccaatgtttgatgacttgcaagtcgcttttctcgcattccaataagggtttttgcggtccttctcccatttttgccattttttgatctcacattttgccaatttcaggaaatctccgaatttgacattgacccgccgttcatttcgccggctgcttcttccagttcaaggtcagtcagcagagatcaatctaatgaccctttaattagtcttaattgctgcattaatcacccaattatctgtttaattgtttatctcattttggtttgttttgcttttttcccctccaccgattgttgtgtaatccaaccctaatcccatttttggcggtgtcacacatcgcttggcactcgccgtgggaaaatgagtgaaaaggcatttaattccgcccattttggcatcatcagacggcacagaatgatgatgacgatgatgcaattggcatgtgctctccccccccccccccgctgtttttgtttttcaaaataagcataagcttgcgcatcttttgcggcattgcctttcgtacaatgcaaaattattttgttgggaattggacaccaatcttccgcatgtcggcttttcctcaatgcttttcccccttcctcccactgtctcagcttttcctccctatttttcttcccccctaatggttccttaatggtcgcagctgagtttacgaaatgccgaggggtccttaaccggaggaggggggcagtgccggctaattggattttacaaaatgagtgtaatttgtgagagatcacctcggccgggacgggggggggcgagtgacgtcaaaaatgtgccattggttaatgcaatttggcaaagtgtgtgtggcaccaattttgggagcagctaaaaatatatacataatgatgatggctttgaaagtgacctaactaaaaatttgtcgataataatttgctaatttttatttttattaatttcatttttggatttaaataaaattttaatattttttcctcctttggcattttgataaaaaaagtgccaattatctgtcgacccaagaaacttttagcggcgttttgcttatatataaatttaattttttatcgggcatcagcatcatcattaattattcgcgcttgcctgatcgttttgagccccgcgggtttctttccatggacggaccctcggggcaaaaggaaaggcaaaatgccaaatttgaattgcaaaataatgaagagtacgaaacgaatgactcatttttacgtcatcaaaaaatacaaatgaaaaagaaatgatgatgtgcaaataaacatacataatagaagagggatggtgaagcgcagcagacggacggagcaatgagctcattttggcatggaaaatgccaaatttttcagttttttttacttccttattttttggttttattttttatttattttccttttccgaatttattttccattttgttttaactcttttaaattaaaataattcaatttaatttttttaattttgaatttttcagtgccgacacttcgccaatgcttttgtcgccctctttccaacggccggcttccgcgcgcctttaccgtcgtaatccgcagcatcggcacagtcagcccaactcgccgggctcgcgcaaatcgcgctttttgaaccgccaaccgccgccgatgggcgacggacgaacggcggcagtggcgaaagaggcggaggacgacggattccgctggacggatgtggacggattttatggtaggaatgaaaattgattattatttttaaaaatactaattgctactaatgccataggtaattagctaattagggtacgaatgacataaataaacgtaataaattttgtttaaggccgaaaaaattcgatacctctgcaacaattgttggccaacgatcttctgaacggcgccaatttgtttggcgatagacacgacgagttgaagccgaacagagggaggatgatgatcagcaacggaatggacaacaatgagaacaacgagacggactatgacaacacaatcgacggcagtctgctgaatgttgagcagcaacagaacgaa

SEQ ID NO: 81623 - DNA, 359 bp, Heterodera glycines
atgaagcagcagcagcagaagcagcaagaggacgagaatttccggaaaatgcttgaggtgttgaaaaacccgaggaaattcaatatttctttgacggaatcatcatcgtctgaatcgccgagaagggttcgcaattttaaaaataaataattaattaatttttgtttaattaaggaacaaaagcccgtgccctctcagcaaccgttgaccaccgtaacggctcctcccgcccttcctcctacaggccctactgtaccggcagttactgtgccacaaatgtacacggcaaacagagacagcagcgactcggactcggactttttcaaataataccaaaaaatttaatttcgaaaaataaa

SEQ ID NO: 81624 - DNA, 392 bp, Heterodera glycines
ggcgaacgcacttttgaaggcaaatcgctgcaccatttggacaccaacgaactgaacccataccaacaagtgggcataattagttaattaatgatcgattgcccattgctcaggtgatcgaaattgtcgggaaaacgttgtcctcctttgacgcggatgggatcatccccgtgtacggattcggcgacgaggaatgcactgatcagagctgcttcaacttggtggaccgggacgacgtggactcggcatgtgtcggatttgaaggtcttaatgggctcaatgggtgccgaaccgccaaaatattacaaattgtcaaacagaggtgctccgcgtgtacaacgagcgaatgccgaccattgccatgtcgggaccgacaaattttgtgccattga

SEQ ID NO: 81625 - DNA, 375 bp, Heterodera glycines
cgaaaacaaaaaaatcgattttttcaagtgtccgtttggggtactcaaacaattatggggagcaaaaatccaacgcagaattaaagtacaggctatagggaagctattcccgaaggattcggtctccccataaatctgggcgcatcggttcggggggactgccccgaaaacaaaaataaatcgattttttcaagtgtccgtttggggtactcaaacaattatggggagcaaaaatccaacgcagaattaaagtacaggctatagtgaagctattccggaaggattcggtctccccataaatctgggcgcatcggttcagggggactgccccgaaaacccaaaaaaaaattttttgcataaaaattatttaaatga

SEQ ID NO: 81626 - DNA, 1681 bp, Heterodera glycines
accattatcggcaacattgaaaaggaacggcaaaagtttatggaagagttgcgcaaggagggcaaatgtgttgacgaaattggacttgacggactgctggcggatgttgaggctcaacagcacatcatcgcaatttcttcggtaaattattattattattattttgcaaaaatttattttctaataaatactaacgcggttaaatgtttcccgggaaagggaaaacggaaaaaaattcgattattcatttttagaatcccagaaatttgacggacgagccaccgctcacattcgcactcgactcggacattgcgctggtcaaacagtacgcggatgccctcttccgactggaccctcggctggcagtgctcagatttgaacttgtgccaaaattgtgagtaaaaaacaaaaattccggcattttttttttttgggttatacatcttgaatttgttgttggctcttcctcatcctcttaacccataaccattccctgttttcatttcagagttccggaggacaaattttggcgcaactacgcctaccgaatttcgttggtccgcaaatttgtggccgaaaaaacgacgtctgaacaacgacagggttcagcgaaggaggaggataaaagcaaaaaatgtgtggaaacggagcacaagcagcagcagcagccacaaaaactacaacaaagtgcgtggcgttttgtttcgatttctaattttaaaactagggttgcaaccccgacttttttggccatttttcggggttaaacccgactccgacgcttccaaccccgacatcagggtcgtaaccctatttaaaactgctattgaaatcgagcccccccccccccgcaaaaagcttcagaatttttttaaaaacgaaaagatttagtcataatattttgttaaaatacctagaaaagtttgcaaaaaaattttttctaggtttgaaaattttttttttaattttcgctctgaaataaagtccactccctttttcgaggtgaaaaggttgaaaaacacacacaaagccaccaggggcctgtaattcaataaatatggtaaatttagcaactgctgatgcgacaccggaaaatgatgaggaggaaaagctggagaaggaactgttaaacgatttgcacgagtttgaaatggtggtggacgatggcaaggagtacggtactgacaatgcgaatgatgaggacggacagatgggagacgaattggacaaacatcttgacgaactgttggacaacaacagcaactgacggactgtgtcaaccaacaagaaattgtgtattataactaactaaattcatatagaaagcccaaattttgaaagatagagagccccctggacttggaaacagatcaaattttggaagaaaaaaatgcccttttttactggatttttggattcggattttcaaaatcccggtaaaaatcatggtcctgaatcttggctaaggctgccgttattatacaaaaccacagcgtttctttttgtttgagtgccaaaataacgaattttggaaatgaatttccgtagctacggactttccatggcactcagccaaccctattatgcccggattttcacttccgttcacttatttatctgtcccaatttctttccccacccaattaatgtaacatgtctctatctgtcctcatttaataaa

SEQ ID NO: 81627 - DNA, 877 bp, Heterodera glycines
atgcttctcgagatcgagaaacgcctctatccagatggcctaccggagaatgcgccaaattttgtgcagaaacacttcaatcttgtgggcggaacaagcacaggagcggtgagaaaaaccaaatgttttatcatattcataagatttttcaaaaattcaagaaaagaaaattttgaatttttcttgggttttgatgaaaactgaaaaaattattcattcatcacaaatttccagaaaaaaaactttaaaatttttcaaatttcttttttgaaattttttctttcaaaaatatcgttttttattttatgacttaaaagcaaaagtgttgctgagagaaaattttaaatttggtacttcttaagccgctgccagggatattttttcgtgaaatactttttttcttcgcctttaacctcactccctccctttttcgtgtacaaaaaaattccactaattctttttaattgtttctttattttgctcattaaaattcatgttaattgtagattgtagccttagcacttgcggatggctcgtcattgctcaattgcctgcgactttactttcgtctgaaggacgccgttttttgcggtccaaaaatgcttcttggctgctacgcgcccgaaaatttggaagagttcctcaaagagcaatttgggtccaacaaaaggatgtccaatctgtggtgtggagaaaagatgaagttggttttgagaaataaattttttattatttcagttaaattatcgtcactatcatacattttagggggcggggttggccggggaggggttccccagcgaaggggaaagaggggaatttctgaaagatttcacaaatcttattttaatatggttcgttcagaattcttaataaa

SEQ ID NO: 81628 - DNA, 751 bp, Heterodera glycines
atggccataaaatatggaccaaaaatcgcaaaatatggacataaaatggcaaaaatcgcgaaatatggacataaatggcaaaaatgtcaaaatatggacataaatttttcaaaattgaatgtaaaatttcttcaaatttattggttgaaattgcatatgagatacatttccaaattttttgactcggtaaggcgctttgacaaagacggctttcgttttgcaattagtcggtcaacattcggaaattggtctcgaattttttcggcaattacgtgcaatcattttaaaagaaaaaaaacataaaagctaaaatttattaatttttttagcgcaaaatcaacaacaaaagcgaaattttcgcttttttgcttatttttgacataatttattaatttttaagaaaatttaaatttattcaatattctcgagaaattttggcgaaaaaatgattttttgaaaaatttttcgggttttgggctcaaaaaggctaatttagctgctgggggccattctaatagaggtttttttgaaaaatgccaaaatatggacataaaatatggacaaaatgccaaaatatggaaaaatatggaaatatggacataaatcgcgaaatatggaaaaatatggaaaatatggatatagaaatccttcctagaagcttcaaccaagctaaaaacatgttttccgtgcgtttcaggcctccaataatccaggaaaaaaatatggatttccatataattacacgccctaa

SEQ ID NO: 81629 - DNA, 155 bp, Heterodera glycines; identical to SEQ ID NO: 51421

SEQ ID NO: 81630 - DNA, 441 bp, Heterodera glycines
atgctcgcaccgctgtgcatctacgacaatgtgggaggtgtgagtgtatgccgtgccgaggggttggaatagcaagcaatttttgttggaaattttgcgttttcatgttcatatttcatgcccttccccaataaaaattttagcgccatacattgccgaacccctctctctttttcaaaaatccacaaaattggtcaatttttacatgaaaatctgttacaaaatgataaattcagatttttaccgcgccaagatccccctccgcctaaaagttaaaaaaaagctctcagcaaaaatggcattaaaagaaaaaaaaatggttttcgccacggggcggtattatggagccccgacttttgcggccccgacatttacgcctatgtccaaaatcggactcaaagttgaattttttcaacccctgatagcctaataagcattaaa

SEQ ID NO: 81631 - DNA, 1205 bp, Heterodera glycines
atgcaaaatcgaaaaatgaatgggtttgtccttaaaaaacataaaaagtcgcccagaaaaaaacaaacatcataccattctgggaaaccttttttaaatttaagtacttggaattttaaaaaaaaaatctggatataaagcgcttttggtaaaggttaatttataaaaaatgcattaatcaggaagaaatcggaggcgggtcagtaaattgagaacaaaataaattaaattataattctcatttttgcttttagtcttatcgaggcacttccgacccaagtgatcagtgtgaatgtaactggccagatttcggtacttttcacaaaaatgtaaaatgaaaaaaatgtgattttgaaggcgagttcgcgggtgtcaatgtgcgactcgaacatgcttatggcctgcgcatcgaaggccgattcgcgcggatgaccagggtaaaagtatccgctcactttagcaatagatttttatgaaaaattcaagaagttcagcgattttttttcaatttttgaaaggactaccctgtcgcgtgtatgtacctcccccaccaaaaaacacccctaacccgccgatattttgagaggaaaaggatctttgtcagaaaaaatgtacaattaatcgtgcataacgaattcagagtatatttagaaaatttataaaaagcaaaatatttcaaatttctgtttttcatgaatttttcaagcaataattttcgatgaacaatcttattactctttaaaagtttagataattttttgacctgttatttaaaagtctgttgtctgaaagtttttcttctcagcggtcttcatgactgccttccatcttgtgtgcgattacgccgaagctgaacttggaccggcggaacaaaaattcatgcgaacttaccgctttcgcatttcgataccaccaaaagatgaaaagaagtggggtactagcctcgcttctgccgcctacatcggcatggttgtgttgttgacaggccgagcagtgcgcgccaattggtgtgtcaccggcgcactggatagcgatggagaagtaaatgaagtcgctgggatcccgcaaaaagtggcggcggcaaattttaaacttaagacatacataagaattgaacgggaaatccaagttggatatgttgtgcatgcgataatttaaaaacaaaaatagatgaaatcataaagctaatgtattgttattttaga

SEQ ID NO: 81632 - DNA, 616 bp, Heterodera glycines
atgtctcttccgcatccggaactgagtcaattgttggagggattatttgctgcggtaattacagcaaatgagacgatgaaaaagggtaaaaaacaaaaattgaacaaatttataggctgaactttcaaaatttttcagtccaaattccattggaaagccctggaaagcccccgccgaggggagaaggaaaacgagccaaaagcaattttaattgaactaattgacatttataatgagctgaaattggatgattataaggcaatagaaagttgccgaaaatgtgacaaaaaaggaaaagaaaatgggaaaaatgaaagagaaaatcatgaccataaaaaacggcgctttctccgatttgtcgcgcgatcattggaaattgaatgggactcaaatgcattttgtgctgatggacaaaatgacaacgacgatgctggtaattaagtggatttttctgcacccgaaattttttacgatttttatgacccaaaattcaaaaaaacgaaatttaagtgctttatggtattcccacgtaacactaaaagtaagcaatccacatttgccacattatttatccacattttaaatagagaccggacaggagcgggatcccgcggga

SEQ ID NO: 81633 - DNA, 1743 bp, Heterodera glycines
atgcgcgatacaaacaatggaagtctcaccccaacccgactggaacatccatgctcttgggaacagtgcactttgcgaggccaatttcagctacaacgtcgtgttgcacagctgcggcaacaattggctgagctgcagcgaacaccttcactagtccgtgaaccggagaaaaggcccaacgatgacgacgacaaggaaaataggacgcccagagggaggcccaaaaagcgattcgccgaaaagaaaggaagcgcgcaaagagctgacatatgccaactcacaagcgtactcagtaagagaaaataattttgctaatttcacttttatgcatgtttctgtagaccaacattcgccaaggtccaagcgtttacttgccggtgccattgtccgccgcttgagccgatcgatcagccttgcgtgttcttcctggcaatgcgctcaaattgtgtctcgctggtgattttggtggcaatttcatgaaactgggcttcctaattggaaatgtggcaacccctggggcagcttcaaattttactttgcttgggtgctacaggggtaatttctgagcaagccaattgttaacatttacatgtgcattttataggtgcagaaacaagtgcaggcattcgcgttgcctttgcggacgtggcaagacaattggccgacatatgtgaaattgatggcctttcgacccaatttttcctcaccggcgacctgatgttcatctcaaaaatctttgggcaccgtggagcagccagtgccaatccttgtttttgctgtgaagcaaaaaatttaccatccgagccaggccgtcaacgaacacttgagcgcatgaggcaacaggctgctcaatttcaagaaggcgttcaaaatggggtaaatgtgacacaaatgagcaaacaatgtgcaggaatgcaatttgagtttgtatttattttgaattttttcaaaattttgaatgttttacagcccatttttcaacattgagccttcaatgacaattccaccgtcgctgcacatcgtcgcttgtcaaggagtttttttcgggattttcaaagaattgagacacctttgcacacgccatggaactgagtacgaggaacagctggagatgcggttgcgggcattgggggcttacaaaaatgcgtggtaccaggaatacagcgggtaccatgtgcggtcagttcgaaaattgcttttttgttaaatatcgagaatttttaggaacattttacgcggtggcgggcctatgcatgttaccgagtttttgccacaatcaccacgccgcgacaatattttgatggctcttgaactcttggcaaaactccaatcatttgccgtcgccgatttgctttctgctgatcaaatcgctgatttccgcgccactgctgatcaattccgtgttcacatgttggagcactttcgtcggcactgttcgacttcaaaatttcatcatttggtccaccatgcccctgaatttgctgaaaaccatggattttggggccttctcagtgagcagcctgtggagaaatttcacgcgttgttcaatgacgatctcgcgcgcaaagcaaacaccaaagatctccacgatattttgatgttctgtgctagagaatctgccattcgaaacgccatttttgattcaaatgaactctgatcagtcttttgtagttttttttataagtttattatactttttgttgttatttttcatacatttttcaattttttatatttaataaa

SEQ ID NO: 81634 - DNA, 162 bp, Heterodera glycines
cagtacgctgtgaccgaccagcgcaaggaggaccagaaaactgttgactcgcaggttatggaagtgatccgcaaacatcccgagaagaaattcttgttcggctaccttggctcacgctttcatctcgccaagggaatgcatccccataaaatggtcttctga

SEQ ID NO: 81635 - DNA, 936 bp, Heterodera glycines
tcgcttctcagcgcagcgattgacgaaaaaatgactcaacatgaggtgagtgaataaaataatattttatgaaattggtagaatttcgattttcactccccaaatttttcaaatttcagtcacttctcatcgcaactgatcaaagaattgtccattttttgcttttggcattccttctgatcgccgccgtttgccttacgcttttgctgatcaaagcaattgtcgaccaatttttgaagcagaaatttggacaaaacaacaacaacaccatggataaggaagaggaaaagcggactgaagaagaggaaaagaaagaaaatggaaaaggaggaggaggagagaaaggagaacggaaggaggaggcaattttggggaaaaatgatagggaagaggaggagcaagaagaggaaaaggaggaagaagaagaggaaaaagtgggagatgaacgagaggaatttgttggtgtagggattgaggaagaagaaaaagagaaggatggaatggaagcatttttggaggaattggaaggggcaacggatgaagaggaggaagaagaagagggagaggaggaggagaagcggacgacggaagaggaggaggaggaatttgacagtgaggaggagaaggaagaggaatcagatggaggaaaagaaaggcgggagacggagaacaaattgggcggaaaaagggcattttggtaagtaaagataaaaaaacagtcgaaaaagctggacaatgaaaaatgccaatgcgctaattaatgtgccccattttttccagcatcattcgttggcacaacaaaaaacggtaaaggcaaaacgcttctcgtgcgcacattgtccaaaaagttatggccattcaacaaacacacttaaagagacacttgcgcaaacacacgggcgagaagctttttttggtaaaaataataataataaa

SEQ ID NO: 81636 - DNA, 2530 bp, Heterodera glycines
atgagaacacgcattagtgccttcactgttctctcgcaccttgtcaggtatttactgattgatcaatgaactacatgataatgattgcttgtttcagaactttcccaggaattatgaacgattacttgggcaccattactataaacatcacaaaaactttgactgatagtgcggcggacggaactatgaaaattgaaattttgcgtttcatttcgctgttgttgaacacccacgaacctgaggtagaaagccattcggtggtttgcataaattgatagatgggtcttacaattagtttcgctaaataccctccccttctttttagtgtttcattttcttcaataatttctaggcaattacttaaggtcccaggactactctgctttcgtttattttggggttgtctcattcgcaatattttgtgcttagtattgcaaattttctttagcggctcgttccttttgtcgagacggtgcttcctcatttggctgctgcggtcggtgaccatttctacaaaattgctagcgaagcacttttgactactcaatcgcttttgcgagttttacgcgcccaaaagacggacttttcgaaggcattgcccgttatgtattcagctgttgtctcaaagctaaaaattgctgacattgaccaggtaattttgagttattaaatggaaaatttggatttacgttaaggaggttaaagagaaaaacattgctactgtcggactgctggttgctctgttttctgctgaacttggaaagaaaattgtactaattttggtgttttatgcctttttttctctcgttttcagaccgacgaatgtttgcctcttcttttggaaagactgcgcaacgaaatgactcgacaaggtgcgcatttttgggtgaccgttgtctaaatgtgcccaaattttagtggccctccgtgccatcaatcacattgtgcaaagtccaaccaaattggaccttcagccgatgctgcccgaacttttgtctctttgtgccgattttttgcgtaaaaaccagcgatctttgcgagttagcacattttcttgaaacttacattgatttctcattgtgtttagctgaacactttgactctgttggagtctttggtgtgccgtttttcccacaacggactgcagggaccgaatttgatcaaagtggtcaaggaggttcccgctctgatttgtgaacaggatttacaaattgcattaattgcggtcactttcattacaagtaaggcttttttggtgtgatctttttctctctctctgtttttaactcgtccgtactgattttcagatgtcgttaactcttaccctgaccaaattttggccgactcattgaacaacatgttccagtaataacccatgcttgtattacaatttcacttaatttcccttttcaggtcactaatcactttggttcacagttcactgctgcagggcacgacacttaacgtgagacatgccaaacaaagaacctttcccactttttaattttccgtttaggcgactcttttactgttgtcttctttgataaaatcacctctcccgaacaaaccatcgtttaaggtattctttgctttttggcatttaactatttttccattaaagcaaattttggagcggatctctgagccggtttacaacactggcacttctcaatttctccaccgtcaaacgtacagttccattgccaaggcggtacggagctaataattttctgttaaattttatttatttcctaagactgcgacagtggcacaatcgaatgccgaacaaactgattcgcgcactttggtcctttccttgcgcgacgcctttcggaatgctgggccagtaaatgactcgggtccttgcttttctttaaattagcaaatatgcacttaataaaatatcccaaaatttagttcgtctcttttctgttttggcacttggtgaattaggcagactttgtcgctccgtttttgagtcacttcaacgcgaaataaagtcgtaatttaattttgttattattcagaacttaatttagtattgaatcactgataatcgaagcatttgaatcgcaattggaagaaataaaatcggccgcaagttacgctttgggtcagtgttatggactttgtccttttgaataatcgtttttaagggagtctggccaccggaaatctgcaaaaatatttgccatttttattgaaagaaatttcaagagaggaggggaggcgacaatttttgttccttcatgcgttgaaagaggtcgttattcgaaaataacgctttgaattgcattttttaggtgattaacagcgaatgcggagaatgtggcactgtcggagacgctgacgaaatattcaaaaagggcgttgaacaaatttgggagcttttgatgaaatactgcgactcggctgaggagagcatcagaaatgtcgtcgccgagtgcatcggtcggcttatcatggtcaacccgcaaaattacgtcgaagaacctttttggtttagtcaattgtactgctcgatcgtagc

SEQ ID NO: 81637 - DNA, 386 bp, Heterodera glycines
atggaactgtccgagaagggaggagtcatagtgagtgtctaacatgcgggaaacttccgcatcaattattcattcgacattccttgaatttagtgttccatcggagcgaaggttgaaatggcgatgtcctaaacgcgaacctgcgacgtaagtcactcgtcacattaattgaatttaaacgtggacaaaatattcgatctatttcaggcctccgccacgtcgctaacagaacggaaggatatgaatgagggaagaaagattgtgtttctcaatttgacaacaactttgtttaccattttctaattaattttcgtaatacatccaccaatttacaattattttttcacatcttttgacttgtatttcaatttctcactttacattaa

SEQ ID NO: 81638 - DNA, 259 bp, Heterodera glycines
cagaatttcgattccgtggaggggacaccgcgatgatcaattggagaaagaatcgggcatcgaaggggccatttttgtacacgcaaacggattcattggagggacaaaatcactggaaggggcaatgcgaatggcagaggaaacgttgaaaatgaattaacaatcaaacgcgttaatttttttgttatttttactatttgttgtattcattttatttaatgtaaagtgagaaattgaaatacaagtcaaaagatgtgaa

SEQ ID NO: 81639 - DNA, 373 bp, Heterodera glycines
atgtcagacaatccaaaagaagcggaggaaaaaatggcaaaagcaatgtaaaattaatgccaatttcacaattttaaatttcatttttttcagcttcatctccgccgattgttggctttgtgtcttcgatttgctgcccccttctcaacttggcctcggaattgcactgatcagccaccggtttgacttttacgtcgatgaacacttcaagactcgcaaatggacgctgaaacctattcaaattcgacgcaaaaatggagaaaatggcaccaaggaaatgaaaattgtcaattctcgttggaaaccattgccaattccgcaaattcaattgccacgcaaagtcatcggattcaaacgcatcgatatctcgtaa

SEQ ID NO: 81640 - DNA, 154 bp, Heterodera glycines; identical to SEQ ID NO: 62241

SEQ ID NO: 81641 - DNA, 675 bp, Heterodera glycines
atgccgcccgtctcaattgatttcggagagggaaacggcgaaatttgcgccttccaacagcgatttgaggcattaattggacaacttccggcggaatgtgagccaatcgcagcagcacaaaaaatggaaaagcttcgatttgtgcacgcggttatggtaatggcaaattcggacggagaaaggggggagagaataaaggtgaaaaaccaaagaaaaaagaaagtaaaacactcccaacagaaaaggtacaaggcaccgctgctgaacgaatggacggaaaataatgaaagggcaaagggacagcgaaacgcagcacaaacggaggagccgagttggggggacccaattggggaggcggtgaaagtgctgagggagacgaccaaaatgttggagcaaatgctggacgattggaggggcgaggaacggcggggagggcacgcgactttgtggcacagaaaaaaggacggagcgatggcaccgccgtcgcctaacggaacagtcgaaggacgcacagaggcagcagaagcggtggacactgatcaaacagcatggaaaccaacgacagaaaacacgcgtcaccagcagccgcattcactgctgtcctccaaaatcagttttccaagcgaattgcgcaggtaccgaatgacggaggaacggcacgaggaacgaatctga

SEQ ID NO: 81642 - DNA, 967 bp, Heterodera glycines
ttgttttgttttgattttccaattcgtttttcgttttcttcagtctcttcgttgggcatttgaaaagtgccgggcgaaggaattacagccgactcccgacaatttgcgcctcgtcctcggctccgccctctccaaaattcgttttccgctgatcagtccgtccgactttgccactttcgtcggttcgtccgtctgttttgcttttcatttggcgttgtgtctcattgtcagccccgaccaaattgctcaccgacgccgagatggtcagcgtgttcctctactaccatttgggccctaaacagcccatgcctttcccgtccacttatcgcgggttgtacactcccgagttggtggtgaaacgcttccaacgcattgaatcctcctggggatacaccggcacgcccgaccgagtgaagtgctttttttgtttgtatttgcagtttttgcatttcgattaacatttttcaggtttatggtcgacactccggtgtttatcctcggctttggtctctacggctccaacagggagtcgtgccaatacaccgtcctcattgaggtcgtcgcccctcctccccccattcgtctgtaattgaccatcctttgcctttgtcagattttgaatttcaattcgggcaaatccctagcctccaatgagtgttttttcctctccgatggttcgcccacaacttttcgcgttctctttgacgaacccgtcgaaatctcttcgaacaccacttacgtcgcctccgccaaactcactgtaacccttcgaccaaccattgctctcttaaaagtgtcatcctattttcaggggaatgagtcccactacggcaccaaagggctgcgaaagatcaaattggaacggaacggacggccggacataaattggcacttccaatacgcgcccgggaacaacaacggaacttctgtggaggacggacaaatcccggaaataatattctgcgca

SEQ ID NO: 81643 - DNA, 809 bp, Heterodera glycines
atggcctctcaaaagcaattacgtgataaaaagtgttccgaagtcgaggacaaaacaaacgacggcacagaacgggaaatgacaaattccaccagcaatttttacaaattgaccaaaagtgagccgccgattgcctttgatgtttaaatccctctcattggcagccgattcgcaaagctctgtagaacagaatgttgctaatttggagcgtaatttgtcatcgaatttggtggtcccttcgacgagtggccgatgtgccaatcggagagacgaggaggaaacttccaaccctaaaaatgcccaacttttggagcaaacaaagtgtacaccggaacagcacgaggaaaagacggacgaatgcccgccgaaagagtccaacgttcgactgaccaataaaatctgcaaaaggcgcagtaagcgatgcctagattattttttaaactttttgtaatgtttcagtgaacaaagttgagaatgttgcccatttgaatggccgtgggggcattggggcgctcggttggcaggcgacgcttccgtcggcccgggaaaggctcactttcatgctgatgaacgacactttggccgacattttcttcattttccgtggttcggatgggtccgtccaggttttgttgtccctcccccactggcaatgattggctgtcccttctcagagaatccccgcccacaaatttgtgctttcggttggctcggcggtgttcgaggcgatgttccgtttcggcgactcttccgactgtgccaatggcattcgcgtgggactcctcaacctttgtcatgccattcgcaat

SEQ ID NO: 81644 - DNA, 303 bp, Heterodera glycines
gcaaattgcgcttcattctttccttattttttgtggccttttaaatctcattgcccaattctttctctgaatgattttattggcttgtgaagacttatttttagtttttttaatttctattcattatttttatcttttaacattccttcccatttaaaagtgcaatattttttcattttcattaattgtactgtgattgttggaaaatgtgttaatttggagagataattttgttaaattcaattttgtccattcttttcctttaaattaaaataacagaatgccataaaatgcgtatttgtc

SEQ ID NO: 81645 - DNA, 2116 bp, Heterodera glycines
gctgccatgaccatctcaattggcttcagtgtggacattccggcccacgtgtcctaccattattaccaggcggcagcgcatggcgttgatcagccacaggcgaaactggtcagtcagtgtagaaattttccaaaaaaaaaattgaaaattttttataagaaaatttcaataaaaaaaatatataaagcgatatttgaaaaacttatatattcgtcataaaattttgtaacgctaaaaaaaatttaaaaaaaaattctttccttgaaattttcttataaatatttttaaattagaaaaaaaatttttttttaaatttttgtacgaaatgaatgatctgttccaacaataatgattggagtataaaaaaaaattttttttgggaaaatgaaagtgctctggcgctgacctgacacggcatgaaaattttaaaaaattaatatacatttttaaaaatttattagtgaatttttagtgtaatttaaaaaatgcaaattgattggagattcgtccgtccacctatgccttggaaaattttttttcaacatattacaaaaatttatttttttaaaaaactaaaaattaccaaatttattccaggtgaattgtttgtcctcggtggcttttcctgccctccaggtaaatttttattgaaattgctccagccaaaataattaattaattgatggactaattacataattaattatttgaaactgtaattaattaattaattgatggactaatcgtgtaaattagttgtattgttttgcttataggctgctctttccacctcgctgtgtgtgtcctcacttctgcttgtccatctgcacatggctactgtatttgtgaggactatggtaggtttgattgacaggaccaaatattgaggggttagtacgggttagacttttacaaaattttgttgtcccgaatcacgagccaggaactagaacttaacacgagcacctagactggcgcccacccacccaccctaataaagccgagaaaattagtttaaaacatacattagtgctgtcagagagtctcggtctcgactcgagaaaagtctcgcgttccgctagattacgtgactcgagaattttgattttgaatgaactaaaaatataggccgagaatccaaaccacgagaaaattctcgactcggaaacgccaaactcttgcacagccctacggcgtgccaaaaaaaaaaaaaaatttttttttttgccctcaggttctgtgcgtggtgttgtgcaacctgcacggtctggtgttcctgcccgcctttctgatcctgttcgactccgttgtccaacacatgcgcaaacgcgccgcgcaacgacgcgccgccagcgcggcgaccgacgccaacggtggcggcggcgccgtaaacaagcgctggccgacgcccatcccggaggcgaacagcagccaggaaagctcgttgcgtgtcggcaccgcgccaatgtcgccgccggcgcagcaccgaaacggcgtcggtggccaataccgtaacggacggaccaaagcgccggcggaacagtcccgcgtcacagacaggtagataacaaatgatagttaatttcgtggcacgattaattaggccattatgtgatcgttggcatttccgctgggccaaattgatcactcactgatcagcaatttgggtctctttctgtcgccagtgtaatttttattgtaaaaattttcagcgccgggcaaaaaaatcaggaatttttatccgtttttttttcttccagaaatagttaattttttgtaactttctttaaaattttttgaaatttgctaacccaaattttcaaaatattaatttgcccgtctttcttgaaattttcaaaattttgcatttcgggagggggaggggggttaagctatcccttgaggcgattacaaccaagactgcagtgcccttttagtgtctcaggactcaaatggctgttgttgtttttttttttttggtaatttcgggcacctctgtttttccaggccaatgttggaccgtttcaactcggtggacgagacggacggcggcggcacggaaatggtggcatccaaaccgtcgatgaagtcaattgtgaaagtgccagcaacggag

SEQ ID NO: 81646 - DNA, 1321 bp, Heterodera glycines
atgcgcgaggtgaaaatgatcatgctccggttcgaggcggaacaccagcagaactggacggtggccatggtcaagcagtacgagttggccatgcgcaacacattccaacggtgggaagaaaaaaaattgggcagtgattgatcagaaaatgatcagaggacgaagaagccgatcaaaatttggcaccgattgatcagaaaagtgatcagacaaatacatgagcaaggggtacgccggcgcacgtcccccccccccccctcgttcgtcgtcgaagaggggcggctgtaaaagaggcgggagggggggggggggtgaggggggtcaaaattttataaattgtaaatccgcacggtgccgaacctaatcgaaccgtgccatgccattattgaccaatcaacaagcaattttttttgcatttccagggaatacaaatcggatcgtattgccatgtacgtgctgtccaagtcggtcattgaggatgaaatggtcagtgtttgtagtcaagttgatcaagctgtacttattcgtcagatccgcgccggcctctccatcatcccgtacatgtccattggctttgcggtgatggtgatctgctcggtgttctgtgtgtacatgcgtgccctgtacatgcaccagcacagtgcgccaaaggtgatggcgtaggttttgattgattattcatcgtctgatcagttgggctagcagacaatagccaaaattaagttcatttgagaattgatctgttgattagccgcagatttacagaaatgattcttagcgatacaacgaaatttgatcatgtttggacctacgtgttctagttgatcagagactgatcacttggcgctcgacaacatatttaagtggtcagagatatatggtcaaagattgatcagctggctagccaaaccgtagctcaattcagactgatcgctgtagctgatcagataatttggtaatttcaatttggctaaactaaatctgatctcacttgagaattgatcgctttagctgatcagatatttttcaattagtcagctaacataattgggctgatcaattgattagccacagttagaggttagcaaaagccacaaactgtaattgttcacttatataaacacactgtattctacagatctttctggcgattgccgcctgtgtgctgccgttcatgtccaggtgaaaatcaattgccttgggataacggcgctaaagtttttttgaggaattcaattttttatccacatctgatcagtgatcagtaaaaaaaaatttggaaagcctcaaaagcccataattctggaaaatttaaaataaa

SEQ ID NO: 81647 - DNA, 1614 bp, Heterodera glycines
atgtcgacaaccgatcgggttcgacccgcgtcaccctccgaaaacggcacagcagtgacaatgcgccaacgccggtcaacgcttgcccgacaaggctccatgctcggcggcggctttccggaacggcgacgctcatccattttagttggccaggtcagttggcggcacttaaaaaagtcgctttaaaaacgtacgtacgtacagcaccaaattagtataggggattagtcaccgagatcatcggctggtaatgagatggcaaagtcgagagtctcggcccaaagttaaaatcggggttgccttggtcatggatttggtccaattgtcggcttaattactcaatcaatcaaagcaatcaatcaattttgatctatgccaagattctcgggcctctaatggtttggtaaaaatcgaacatctttaatgatcagaaaaggccagagttctcgaatgtatttttaataataattgaatgattaattgtctgatcaacttattacaaactttttgttcaattgaatgatgaactgttcaaaagaaattacaaactctttagccaaaaaggctacaattaaacaaaactttgatcacttaattactgttagtttgtgtagcgcgacaatttttttttctttgtagttcgagattctcgactacagtgataattactttaaattgaagggtgattaagaattttgactaccattttcagcgttcaatggacttgcaaatggaacaaaccggcaatgtggggccacgctttgtgctgtttatcatccgaatgttccggcgatggggccgttttgtggccaaacacgactggaaggtaggggattgtggcattttgtcaaaatgtataaattgtaggccttggcatgggcaatttatattttaatgaaatttagaaatttttttttgaaaaatatacctttaaaaatcattttctttttattcaaaaaacagaaaccaaaaattatttttaagtatactaaaatgtgattctaagcctatcttagtcatttttatggcattttgtgtctatttcactttttatgaagaatttttttccaaaaaatcacaatttaaaaaattgtatttacatattttattacatatttggaggtttttgtacatatttcatcatattttccgcattttttatacatattttatttacatattttgcgatttttgttacataaaattcccagccctactgatcaataggccttggcacatcgcctaaacctgaaagtgttatgcgtttggtattatgcctattcatatgtttatttggcacaatgccaaaactgattaagaggccttggcattttgccaatttgcatatatatttttttttatcatttaggcaatgctgctgtgcttaatcaccagtctgatcggctttatcgttgtcatgctcactccgtatggcacatttaattaacagaaaactttttttgcgctgaaattttcggtttttcttattggtacctcttccaaaacgtttcaaaaatttggcgaaattttttcacggcaaaatgtctgggaaaaccggattcggggaaaacaaaaaaaaatctcgggtcgaaaaagaatggcaaatttattaaa

SEQ ID NO: 81648 - DNA, 54 bp, Heterodera glycines
atgcacacccgtccgatctggcaagttaagcaacgattgctgactagccaaaag

SEQ ID NO: 81649 - DNA, 929 bp, Heterodera glycines
ctccgcttctccttgccttttctaggctttgtgccgcttttccgctgttcccatcgacaagtgttcattcccggtgatatcattctcgggggccttttcccaatccatgccggcagtcgcaacacttcggacggaactctctgcggccgcataaaggctgaccaaggagtacagagaatggttggcactcgcagcgaaagggcaaatgaaatgaaaattgctttaaggtggcaatgctcttcgcattagaggcagtcaacagaagtccgcgtttgttgcccggactcaaattgggagcacaaatattggacacttggtaaggcacaagggcaatttgccaagcgaaaaaaacgacaaatttgaactgcaaattggcgcccatctcttaatttgaaaatcgaaaagccaaattcgaacagttccgtcgaaacacatgctctcgaacaaagtttggagttcataaagtccgttcggctcgggtgtgcggacgacgaattcgacggcacccaacgaatgtttcttccggtggaaatgcgcgccaacgggccgaaaaatgtgcaaattcaaaggaacggccgacggcaaaaaatcaccgccgtaattggttcagcatcttcacaagtgattaattcatttaaatgttcgatggaaaagtcgtttcaaccctcacatttttcccttaattgaaagtgcctttgtcaggtgtccgttatggtcgcttcgatgcttcagctgtttaaggcattgcttttgccgcttatttgtcttctcattgctttgtcctctttctagatcccgatgctcagttattcttccacgggagttgagctcagtgagaggccaaggtggattttggcatttgactttggtatttttccctcccctttcattccttcgtcagatttgcctatttctcgcgcgttgtccct

SEQ ID NO: 81650 - DNA, 1195 bp, Heterodera glycines
atgacagaagcgaaacggacaaaaagaggagaaagagtttggcaaatggggaaggaagagaaagagagaaagggacagagagaacggcggagggtcagcggatgagtgccgacggaggaggaaaggccaacggaacggtgccgcacgcgcactccccccggaggacggacatggacagcccaatgcgactgattctccggaagatcagcggcgaattcgccactttcctttgatctcttctcaaagtccaacacaaacattcggattgtccctccttttgccttgaatttggccatttattttgatcattgagtcccatcggcccattgcgcccgcggattacgaaaatgttgccataatgaggcaatttcgcatattaattgggtgtgtgtcatcgtcatcagactttcccctcccctcaatgcgaccatttccaaaatcattcaaatccgtccccctgggcaaacaaaacaaagcctttcctttcccttttccgaatttattacgcaacattttcagcagtcatttcgtttctatcattttttgatttgtacctttaaatttaattttaataaataaaaaaataattatagagatttgtttggaaattcacttcaaaggaattgtcagtgaatttggagttgctaatgagcagaacataaagtaactttggatgaatttgaacgatggacaaagaaatgaaatgaaaagaaaagaaaagagggcgaaagtgtgggcttttgaaaaacattgggggaaacgaaacatttaagaaaaacgaaaaccaaaaaaaaaatagtattagcatgctgagaaaccatgaaaatataagttttaaaaaattccaaacaaaagagcaattttatgatcaaaggggggggggtcattttcaagagcccacactttcggccttaatagcagttttctaacttgtcgggtgcaaaaaatgagcattcattgaacgactgtcctcccctcgcccccgttgtccccccatttgccccccttgtggccaaattgtccttttcctaattgtccttttcctaattgtccttttccggtcggtaattcatccccagatcagttgcaacattcgcattctcatccattcattcattcattcaacattcattgagttgatttgtccttctcccatcgcctttcaattcaattggtcaatgaagcattacaacca

SEQ ID NO: 81651 - DNA, 2201 bp, Heterodera glycines; identical to SEQ ID NO: 17192

SEQ ID NO: 81652 - DNA, 223 bp, Heterodera glycines
agaggtgggcaaaccatcgttctgaattcgttcaatggcgcaaatgggggcaatgggatgaggagaagcggaaacggagcgaacggaggggcggaaaggggggcgcaacggcaaacgattgcctcgagaagcattcccgtttagagacagcgcaacggcacaagccaattaaggaattaattaacgaattaattaattaattaatgaacaaattagctaatta

SEQ ID NO: 81653 - DNA, 879 bp, Heterodera glycines
atggtgattaaaagtgctacaacagtgatcagaagaggtacaacagagattagaagaggtacaacagtgattagaagaggtacaacagtgactaaaagaggtaaacagtgatcagaagaggtacaaccgtgattaaaataggtataacagtgatcagaagaggtacaacggtgattagaagaggtacaaagtcattagaagaggtacaactgtgattagtaaattcattaaattaaaatgaaaatattttttaacaaatttaattaaaaaatacatgaaattctatcaattaaaaaataattaatttaaacttataaaatgtattcatcaaaaaaaaaattaatttaaatataattttttatttattaactcaacaaaatattttaaattaattaaaaacagtcaaaataacccaaaaatgcacagaaaaataatgttacaccgtccggattcgaactttgcaccaccccccccccccaaaaaatgatgcctcagaatccccaatcacacagggattctgaggtcttgactatgtctaaagtaaaatctgatcacgtattcgtgatcagcggcccaaataacccctaaagacatgtttttggaagatttttgttgaaaaaaatttttcactcaaaaatcctggtcacccccctttggtcccgattcccaaaatcacttttatttctataacttttttcaaaaaagtgataaaaagctaaaataaaatttataaaatagagcaaaaaattgcggatttttgtattattttacttttccaaaataacttttcagaagcgagttatgaatttttttctgaaaaatcgaaaatttccagaaattctggaataactttttttcttttgaacattataaaaccaa

SEQ ID NO: 81654 - DNA, 65 bp, Heterodera glycines
cacaccgtttcaaaaaacgagacatgaaacaataaatagagagtgcagagaaaaaaacatctctc

SEQ ID NO: 81655 - DNA, 445 bp, Heterodera glycines
atggctggacaactcctcgaaggaagcgcggcaaaaaataatggctatgatagcaaggtttatttaaaggtcagcaatttttggcacccgatcaaagtgccgaacaaatttgtttagtttattagttttgttgttaattctaagtcaaattttattgtcgtctttttagttttcaaaagcatcagttgatagcatcgttggttcactcttaacgacaatggcgagttcggctgtgcctttgcccaagtgtgacaagctatttgttaatagttggtttacagtaacaagttcactttgttcgtttggatagttatatggattttcattcattcaaaccatttcgagcctacggcgaatttggtcatgttctgatatttcggacatttctagaaaattcaacaatttccttaacaaataatgagcttatacatcggtaaacaataaa

SEQ ID NO: 81656 - DNA, 510 bp, Heterodera glycines
atgaacctttttgagctcaaagtaagttaattttgagaaacccgagttctaaatgattgccaaaaagcgaaataaatgttcataaaaaaaaatggaaatccatacaaaatatggtctatcttttatatgaaacaaataactttttcggtgaaatactgaaataaaaaatatataaaaattattttatattgtagtgcgggctctcaaagtgcctggtaggcagagtatttctcattgctctgatgcaaaagggcaattgaaggttgtaaagggcgccttgtgtagcacagcacggaaagctgtggtcgttggttcaattcccaccacaggcttaccttttacacctccgccatcaaccaaattcctacaacatattttttaagcaaattaagatttaaaaatggacgcaaaaaaattaatttaaaattaaaaaattttttttttattaattaaacacaaaactttgcagtttataattttttagtaattgtttataaacttttgaataaa

SEQ ID NO: 81657 - DNA, 326 bp, Heterodera glycines
atgaaaaagcggtgcaaacgtggggctttgcctatggtgaggttaatggataaatttcttattaagtgattttttttttaattttttctcttttttctgaatttattatttgaaaaacatttgcaaattgatttaaagggtaaatttaaaagtgtataatttattgtttacattaatttttaaatctattcttgattacaaggatttatataaagattaagttagaataataatttaaaaattttaggtcttcaaggcataacaatcaaaacaaatcggcatcagaaatgtatttcaagaacgatgatatagctaaatttccataa

SEQ ID NO: 81658 - DNA, 207 bp, Heterodera glycines
atgctgaagttgacccgtgcccagctgaacgacggggtgccggatcaagaacaacccccggttggggagcagcaatcgacacaaaattcggacatatcggtagacgaattgcctcagcgattgaaaatttggattgtgccatccggagcgggcgatgtcagtgccgttggatacttcctggtcaagcgcattgacgcacggatatgg

SEQ ID NO: 81659 - DNA, 407 bp, Heterodera glycines
atgattttcttgaaattttcttctgagaaaatttcccaaggtttttccagcggaaaaatttctgtcagccaaatgattacatttttcatgaaatttttttacttcattggggagggaggtacgtaatccacttaccccttcccactgggccgtacttgcctcaaatttgatttataacagcctaatggcccaacagaccgatgcatcattaatcccgtagagtttggcccaacgtttgacagcaaatcccagcggtgacacgcggtcatcaaaacgggtgtacagtcggagcagctccgtgttgtgcaacgccagcccattctcaacacttatgcttgagaataaagggaatgcataaaataataataatcataaaattaataatttccagacccgtaaccattaaa

SEQ ID NO: 81660 - DNA, 1424 bp, Heterodera glycines
atggtcaccgccttccacgaagccaatcgcctgtctgatgagcgacgaacatccatccagcaatttgttgacgaactgcaacagggctttcgcaccgagaccggcgttgactcgttgcaaattgaactgttcggctccgttctgtccggattcggctccaacgactgtgacattgacctttgcctgatcaacaccggcatcaccaagcaggaaaaagtgcagccgaacgggatcatctctcaagaggtttggattgaaaacaatgatatgagaggggcagaaacgggaagagctcgtttccccatcggctcattttcagtcccccccgttcttttgggaaattatttgaaaaatcttagtaattcgctataaaattttccaaaaaaaattttcttggaatttccaacgatgagggaaggggaacgtagtgcacccggtacaaacaatgaattgttgaaaattttgttgtaatattatgattaacgacagagacattttcataatattttaaaacaaaccatcatctaattttttattcagaagcgtcgagaatggttaaacaaacttgtacaatatttgcgtaaaagtgagctttacacggtgatctctgttgcggatgcgaggacgccaattgtgaagtttgaataccacggagaggaaggcttccatggagagtaagggaagacgtgggctttttttgtacatttacatacactggaaaaaaaaattttgccgaaaaccaaaaaaatttggattgctctttttagagatttttttaatggttacgggtctggaaattattaattttatgattattattattttatgcattccctttattctcaagcataagtgttgagaatgggctggcgttgcacaacacggagctgctccgactgtacacccgttttgatgaccgcgtgtcaccgctgggatttgctgtcaaacgttgggccaaactctacgggattaatgatgcatcggtctgttgggccattaggctgttataaatcaaatttgaggcaagtacggcccagtgggaaggggtaagtggattacgtacctccctccccaatgaagtaaaaaaatttcatgaaaaatgtaatcatttggctgacagaaatttttccgctggaaaaaccttgggaaattttctcagaagaaaatttcaagaaaatcatttctgaaaatttttttaatgaactactactaattgtaagtataagtttttccaaaaaaccactggatttttcttaaaatttcttattaaaataccgaagattttaaaaattattgttaattttttttcagggagcgtgaacgacctgctccgttagattatacccttggagcctcaaaaatccaaattccgggatcatccctaacaattgaaaaaaatgttatctgtgattatttacttgtcg

SEQ ID NO: 81661 - DNA, 1580 bp, Heterodera glycines
atgtctgagaacacagcggaagcggagaggagacaaatgcaaaatgaaatgtgtgtgtcttttttagggttgcacgggtacgagaatttgtgcaaaaaccgggtccagatattgccagagggtccagaaaagccgagtttgggtccgagcccaagtttttcaaccgggtccgagtacttaatttaaaaactaaatattccacgaaatagtttgtacataattaacaattattaaaataaaattttattttttttggaattgatagcaaatcaaaatcagaataccaattttataattttatagaagataacgtggctatcattttttttttgcttttcatatcttttttcagtctttttaggaaacgggagtgatccggcggtgccgacaggcgccgctggcaagatttttttaaattttggaaagatttattaattgctttttatcaaaaaatgaccattgatggatatttggatcaaatttaagaaaataaggtagtttggttacagcagaaccataaaggcagctctttccatacttaagacaaagtggaagttttacaaaagtcgtaaaaaaaagtaaataaaatccaccggtataagagtgttttccctttccctcaaccttgatcatcaatttgacgctcacacccattcgtactaatatttttctgggcccggttagacccggacttaggcccgggttttcttgaaaaaaccggttatccggctctggaccgtgtaactctagttttttaaatgaaattttaaaattaatttgccatttttcagtttcatttgtgccgattgttggctttcagtcttccatttgctgccgccttctcaacttggccttggcattgcactgctcagccaccgatttgactgtttggtggacgagcacttcaaaacgcgcaaatggatgatgggaaatattgaaattctatataaaattggagaaaatggccaaaaggaaatgaaacttcatcaaagtgcaaatttttgggaatggagaaaagtgccaattccgcaaaatccgttgccgaacaaattcatcggatttcgacacattctgattacgtaaaattggccgattaaaatgatttatgataaattactaccattttcagatacattgattccaatgtgattgcttttcttcagcgttttcgttctttttttgcttctcatcagacaaatttgtcaattacaacaaaaagtggcgacagccattttttggaaattgttgtaaaaaacatttggccaatgatcaaagacaaaatttgtgccattggttttttgtctcccgacgaattttgccgttttcaacaattggtgccgtccattctcagcgacaattgttgttgttgttgtccatctcttcgagcaatgtttttttacactggcgttttgccaaatttacccgctaatgactgtgccaatatgtcggctgaccaatcggttgtcaaatggctgttctcgcctcgcgcagacggtgctccaaaggtgctacgatacagtctccaaatgaataataaatttccgagaaaaattgacgcatttaaaagggtgattatttaa

SEQ ID NO: 81662 - DNA, 1102 bp, Heterodera glycines
atgactgcgccgcaaaagttcattatgccaaagacaaaccgaattgtgtgctacaactgcaacaaaacgggacacatttctcgccattgtaggttgtcctttacgcggaagcaatctaactgtgcattaaaaccgccacaacatctaaattttatgaaaaaaggcgccgattttcgaaaaaattcagaaggtgagaagcactcgaaggaacaactagcggcaccacgaacgaagatggaaactgttattaaaccaaagggaaattcgtcgtcgtcatgcaatgtaaaaggaggaaagagcgaggaaaacccgaccgaaattccaaattgtttttaaattaaattgttgctgcgttggttttgttcaccggtgcagtgtcgaagcaaaagtcaaagtgcggacgagtttggaaaagtaaaggctcaatgagtagcaccgatgaagtgcaaggacgcaaaaccgatgtcaaattgagggcaattttttcgccgaaggccggggaggaattcgcggatgtcgcagcagacaatcttgaaaatttgttgaaaatcggcaaaaggaattttctaattgctgatcgcaaatgtgcgcaagaagctgccactgatggaattttaaggccagaaaaaagggcatatctccgttttgtccgttgtttttacaggtcagagcctgcaacgcgacttcaagctgaaccgatccgctgctgaattcacccttgccgcccctttcaacatcgaattagttgatgcagtcgtcatttttccctattgatttgtgttcgccttattttaattggaattaaacgaaaattgtcttcgacactgttttgtttttttgctgtatgctttgggctgttgtctttgccgtgtgctgtgcaacaacaatattaaagccctcgacaacatcccttatttcttttacgactcgtacgaaaacgaccccgaccgttcttttactacgggtcccggcagcacgctgtactgctttgctggtgtggtgactagagaccgacgaaaggcaccaaaaatcgcgaaaaacgcatttaataggcaccaaaaaagtttttggaaaaaggcagaaaatcccgaataagaataaa

SEQ ID NO: 81663 - DNA, 754 bp, Heterodera glycines
atgaatcagacggattatggcccaatggttcttgctcataatggcacatctccgagtgatcaggataaaattcgagatgaagagactgatcactggctaacattaacgcaaactgatcaaacaacaactgatcagaattcaacattgagcatcgattggatgagcaacacaataatgaaagccgatcatgacgcaactttgagcttgggagaagaccatggacagactttggaagccaaaaacgatgatgaacccaatttggaaaatggtcattatggcacaactccgaccgattacgagccaaatgaggagaaaaatgcagtggataatgctgatcataatgatatggcagtggacggcgcgcatgatttatcctcagcagaagattatgacgggaatgattcaattagcgctaaaaatcagcaggagaatgtcgaggtattaaatggagcaaaagccaaattaaacgagaaattaatttaaattatatttgtcaaggaggcactcgatgacagcaaaaatgccgtcgatgaaaaacaacaaaaggtggaatcagacaagcatttggatgagtacacgtgggagcaaaccttgacaaaaaagtgcccgctgaattgcagtgaaaacaatttgcagtgttggcgcttatcagggtaaaaaaaaattattaaaaatctcgggtcagagactagcagtggttaattaggcgaaattttctcattatacaattaatcttggaaattcaaaaaagaaa

SEQ ID NO: 81664 - DNA, 1832 bp, Heterodera glycines
atgaattcatcttcatcaactgctagtttcgatgattttgatcgaaatgaaaacggtaatattttattcttgtaaattatttcgcaaaaattgataaattcattaaagaagaaaaagatgatgtgattattttgaatgacgatggacaaaatgagcaaaatgatcattccgtcgctgacaaacagttgaaaggtaagaaattaatggaaaagttgtaactcattaaactataacacaacttcttttttcaattaacatatgtttaagcttcgatcagtcaaagcaaaaaaatgcaaaatgatcagaaggagaagaagccaaatttggaaaaaggcggtgaattggagaaggagcagaaaaagcaggaagagaagaaaaacggtaagaaaggaatagcattacaactaattagcaatattaattaatcggtattgatgcgattaattcccacggcatcgaattaattaatcactttggtatagctgatgttttatagttagctacctaattggttttcttcattcagaactgtcaaatgccattccgcctggttttcagatgaattccgctgaggtgggaaaataatttaaaaaataaagaatatttaaaaatcaaattaagaaattttcaattccgcaacaaaattattggaattcttgtgcagatcgtcttgaaataacttgtggtggtttgactgtacatcattcaggaaatggaaattgtaaccttcattttaattaagaattaataatgtcttatttatatttttataatattttcataagggtggctttcggcgttcgcaaaatgtgccattccgagcaataatttcggcattgtttattttgagattaaatttgttcacttgaaaaagtaagtggatttttttattataattaaaattttactattttattaatttcaaatattaatttgctttacgtttttagaagtgccgcaattggatttgccaccaaagcgatgccatttgatggacgagtcggactttatggcaacagttacggatacgaaagcaatggcacactttgggttaacggtgcttaccaaactgggcatgcaaccttcaaattttttgatgtcgtcgggtgcggaattattttggaaaatcgacagttattttttaccaaaaatggacgttgtttgggttggtaaatttaaattttaatttatgaattttcattttcagatcacactgatttgttcgcttcttcttcggttgttccgttgtttccgtgcctttctttgcatgacaatggcgacaaaattttgacaaattttgggcctaatttcgagttcgatttgaacacacttttctgctgaaggaagcaacaatatcagaattgataaccaaattatttggtattttttaccacaaatatttctaaaattgtttattccatttttggaatattatttcaaattatttcattttgtatgatttctcttttgtgaggcagaagaaaatatgtcttggtccctttattcccataattttgtggatttttttgccaaaatattatgggacagacgaaatgattatgcgccgcaggtagaaatattaaaatttaaatcggttatccatttctgacaaatcttcatcagattttctcggctgctcctaatctagtatttttatatattttttaaaatgtgatgagtatttattcgagtttacgaaaaattattatagttcattttttacaaaaccgaggtctacaaacctagaaaaataatatgaattctacaaaaagctattgctagtatgtactttgtactttttgtttttctcgggtcctacccgggctttaata

SEQ ID NO: 81665 - DNA, 202 bp, Heterodera glycines
atggaaagcgatgacgctgaagctcacgctgtggacaatgatcagaatgaagttaatgatgtggttgatgccgatggcatgggcaataaaaatgggcaagatcgccaacaggaagatgaccatggcggtggtggaccaatagaagtgtcgatatcagggatggcattccgagccccaaaactttcggaatcggaattcgagg

SEQ ID NO: 81666 - DNA, 928 bp, Heterodera glycines
atgcattggatgaattttttggatcgaaaaatgatcagttttataaaaaggggattgaaatgttgcctgaacgatgggggaggatcattgatcaaaatggtgagtacatcattgattgaacatttgttttttgtgaaataaaaaattgtttaatgttgaagtgcttaaagggtcagaactttttcatcaacccaatattttgttttgataattttaattgaaatttaaaaaagaaaattttcttacattaatttttttcgttattttttaaaacaacattaaacccataaattaacaaatgattggacattttttggacaaaatctgctaacaaatcgaattaaaaatagaaaatttttcccgatggtgcctattggcaccacctgttctgccccctgtactcgaaaagtttttgaaaaacacgccgcaaaaaaaagcgttacctatatggttggtttggtttctttaaaatacttttgtttatttttccagcgattaaattccgttttttgttaaatttaaataaaaaatcggtaatagtttagatggtatgacaccttttttgaaaaatttttcaaaattttcaagtcttaaaaacatgtttctaggggtttataggtacgccacaccgtgaacacatccgacgcgtgtgcagaagccccaattgctcaagccaagcaaaaggcaatcgcttcaaaattggctacatgacatttcgccaactgacatttcgccaactcagccaaaaacattcatttcgccaactcagccaaaatcagacattttgccaactgacatctcaccaactttacatctcgccaacttttcgccaactagtcgaaaattgaattttaactatataatgatattaaatttattataaaagtgcttcaagcaaagaaatcttcataaaatatataaaatatca

SEQ ID NO: 81667 - DNA, 613 bp, Heterodera glycines
ctataaaagggagggccaaacggagcaaagcacacatcgatcagtgaacattcactcatcaaaggaacagcagcaagagcgcaggtgacagactcagcggaagcaccgcttaaccatccgttcagccgcttcacctccccccccccccattcggttcagacttcaacaatgacgaggtgtagtgtgttcgtgcttacccttttgggcgtcggaatggcccactctctgctgatgagcggcggttcggagtgagttggcgcggcacgcgttgcgcaattgcaggcgtaaacttacgcgtttcgctttagccttgctcccagcgccaaccgcgtgagccgtcaatgcggatgtggaggaggatgtggtggaggcggcggcggatgcggaggcggtggatgcggaggaggaggaggcggaggcagtattacgcttggagtcagctgcggtgggccaagcggaggaggtggcggcggtggatgcggaggaggtggcggaggaggttgcggtggaggatgcgggggtggcggtggatgtggcggaggatgcggagggggttgcggcggtggtggaggatgtggaggcggctgcggaggaggatgcggaggcggttgcg

SEQ ID NO: 81668 - DNA, 1386 bp, Heterodera glycines
actttcttcgaccgctggtcctcaaacggtgtcaagtcgggcgccccgaagaaccgtgccggaggcagtgtccatttcccggcaactttctgctataatcctcagtttgcgtttgaaatcagcgaagaagacggaccagcggaagtgatgttggcattgtgccaaagagaagagggatgtgcatttgatggcagaccaaaaaatgccaaaaaattaatgaaaaatggtgaaaaaatgggcaatcggagaagagaaccttttgtggttatcggactgcacgtgatgaaagtggagctaaacagaaagcatcgcattcaccaggtgaaaagaaatgccattttaaagggaaggcaatggaaaacactgaccacttttaattgcataaattgctttttaattactaattgcattaattcccccctcccgtaggccattgagcccgtgtcgaccagtgactatcagtccgtccgttccgttcatttgcatatcgacggactttcgcccggccgttacatcgttctgccgaccacttacgcaccgcgagaagaggccgactttatgctgcgcatttactccccgagtcagctgagtcctgtggaacttcgcgacgatttgcctaccctttcggcactttcccttttgcggtgccgtccccaatttgttatcgctcgagtgcgaattatcgaggttcatctgctgaaactgatcactttcggaggtgtgcctttcttccatttaaatccatttgagagtccatagctcattcggttgggttttcccaatttcatttacaaaaaaattatgagacaccgtatcactgatacttacttaatccaactttgataattaggtgtaaaatctattagcaaataatttaattttttttccggtggcaccgatggactcaaatgaatgccttttgaatatttaaaattagcagccaacaccgaaaatagaataattttcgccttattttttctccctctttcacaatgttcagaatgcgatgtgttctgcgtgttctcctcttcccaagggagtgatcggtgccgcacatttcccgcaaaatttgtgccgggccgacccgtgaagttcaacgcgctctttgttttccatgcttttgcctcgcagcaatggcttctcaattttgaattgattgaactgagaaagcctttccaacgacaaaatcgccttttgggcgttggaaggttggctctaattagcaacaacgaatcaattgagatggaaatggaactgatcagaccaattgaaaagcgaaaggcaccgatcggaggagagggaaaagggcgagggaaagtcggagaagaaacaatcggaaaagcacggattgagatcagtgcttatgatgatccattttatatctga

SEQ ID NO: 81669 - DNA, 652 bp, Heterodera glycines
cgcctccgccaccaccaccgcaaccgcctccgcatcctcctccgcagccgcctccacatcctccaccaccgccgcaaccccctccgcatcctccgccacatccaccgccacccccgcatcctccaccgcaacctcctccgccacctcctccgcatccaccgccgccacctcctccgcttggcccaccgcagctgactccaagcgtaatactgcctccgcctcctcctcctccgcatccaccgcctccgcatccgccgccgcctccaccacatcctcctccacatccgcattgacggctcacgcggttggcgctgggagcaaggctaaagcgaaacgcgtaagtttacgcctgcaattgcgcaacgcgtgccgcgccaactcactccgaaccgccgctcatcagcagagagtgggccattccgacgcccaaaagggtaagcacgaacacactacacctcgtcattgttgaagtctgaaccgaatggggggggggggaggtgaagcggctgaacggatggttaagcggtgcttccgctgagtctgtcacctgcgctcttgctgctgttcctttgatgagtgaatgttcactgatcgatgtgtgctttgctccgtttggccctcccttttatagtgcccccccccccccttggcc

SEQ ID NO: 81670 - DNA, 89 bp, Heterodera glycines
aaatgttatctcaatattttgcacaacaattttatttgtgtccgcataatcgacagcgttttgataagaaactcttatactgtgaaaaa

SEQ ID NO: 81671 - DNA, 1714 bp, Heterodera glycines
atggaggaagaggaggaagatgaagaggaggaagacgaaggatgcgacggggacaatggcccagtgcatccgatgttggccatgatggacgccgcctccaaaggggcggacgaactcgcggaaatgacgcaccatcaaacgcagcaaagaattccagcagcggaacgaacggagacggcaaaaacgcacaaaaatttcggtgagaaaggtcaattactactcattgtgagtcgagagaccaatcccgactcaacaaaaagggggagacgattgctttcatttgcttgttttcctcgagttcagttccaagtcgcgcgggggacccgtcttcctcgtcccatcagcaccaatactcgggaagtgatgcgatggtgggccaaccgcgcacagtccgaccatcgaacggcggacaccaccaacagaaccaacaacagcgggtaaaccgaggatgaatcccgacaaaattacaatgtaatcgaaattcaagcacatcagctatgttggcacagatgagaaagtgccgtgcaaattgtgcggggaaatggtgtggaacaaaatcacgaacagactcaatcacatcaatgttcggtgggcacatcatttgttgttgcttaattacgtaattaccatgcttaattgtccccagtcatctccaactccctctccacgagtgcgccatctgtcacaaatctttcgcgtcgtacagccgttccgcctgttattcgcacgtccaattcgcacataaaacggagatcgaatcgggacagtgcagcagtgtgattgaggaacatatcatttacagaaaagtgatcattggacggacgagtaattaattgggcaattaatcaaagccgtttaggaccgctacaacactcagccgatggaagccgcgagggattatttctaagaattggctctccaccgatctttgattgtttaaacttcgacgctaaacttctaaaatgttatctcaatattttgcacaaaaactttatttgtgtccgcataatcgacagcgttttgataagaaactcttatactgtgaaaaattttgggcttgaactattttgtcttactgctttataagaagtttatttggaatatataataaaattaagtttatgtagaataaatagttggcgaaagagttgcggaaatgtcatttcgtctgttttcgtgtctcaacggacaaacgtcaactcgtttaattaagccattttttaaatggtcactttaatttttgtctgaccgtgacgacctcgaatatcaaatttacaagagagcaattgaatgatacaatggaatattaatttgattgaatttaagccaatttatatatgaatttatatttgttacatttttgttttcctatcccttggcggtttttaggaaaatcccagcatgtttttcatccataattagtagagaccgacttttgaggcaaatgcctttttttctgcattttcgtgcatttttatagtgcctttttcgcgatttttggtgccttttagtcggtctctaataattagtcaatctttgaagcacaatttgaaatattatattatgattttctgaaatttcatcaaaaattccggaattccgttcccatctctgatttacagtatatgccgttttattttattatgtcaaatgaaaatgagtatacatcaagttatagtacattaagaatatagcattcgattagataaataaa

SEQ ID NO: 81672 - DNA, 696 bp, Heterodera glycines
atggcattcgcaattccctacatcgagtcggtgcttaacccatgatcaagaaaaaaatgccgaatcccaaatagtttggatttggtgattatggcactgatcaggctacaaaaaaatgctccacgataaacaaagcgggcacggagtcgatcagatttgaaaattttgaatttcaatttttctcttttttaccattggattccagtgtaaaaacctttcgccgatgggtacagcagcgcgctgcgacggaacagcacgcaatgtagccgcacaaggacaaacagagcagcgcaaggacaccaattagtgctttaattatgtacatgcgtaattaattcatttaaaaatggaatttttaattgggttttaaacgccaattagcgctttaattatgttcatatggtaattaattcatttaaaaatggaatttttaatcctattttaattaggaggcaggccaattagcgctttattaattatgaagggaattgattcatttaaaaatggttatttttaattagaattgaattaactgatataaatcaattcacgatgctgcaatgcaatgttgttgagtctctcggaccacacaaatttgtcggcaaaagatgataatccaccagcacattctgtgtaatattgttacggatcaatttaaagcctattcaataatcagtactgatcatagataataaa

SEQ ID NO: 81673 - DNA, 1137 bp, Heterodera glycines
  unsure (1)..(1137): unsure at all n locations
atgaaatgggcacatgttggtggcggtacagcatcaacaacaacaacaacattggtgacaacgacggacggcgacgaccaaccgttgtttcagttggaggaaatggggggcgacaccaatgaaatggtggtggtcaccagcagcagcagcagcaccaacgaaagtgatgatggtggtggtagggatgaagaagaagaagcagtatttgggaggcatggaggaagacgaagcggaagaaaaatgaggacaaatcaacaacaaaaattggatgatgatgatgatgatgacggattatgattgattgatttagtcatgtctaattcatccaaacccaactcatccacgggagagcattcgtttcaccctcccccgaaaaaattttaagaaaatttcaaaccttgaaatttttcaaaaaaaaaaaatcataaagaattatttcataagaaaatttcaagaaaaaatttttgaaaatttttcagcgattttttcaaaattttacgatgaactactagtttttttaaaaaaatttctagatttaaattttttttgggagaaaacgacgggggaaaataagtgcacccctcatccacacagctcgatgcggtgtcctggaatttcttgaattgcggaatccgtgccgcggcatttattgtggtgcatggatgagttgggtctaccccatatggtcggataatcattttcatttaagagccctaataatttctattatccagcaacaattacgaaaaattgtttttttttgaaatttgcaggataatagaaattgggttaatgaatgttggttgatatatgtagtaggtcagtgtgttcagtgttcaactcacccacttcctttcgaggaggaaaatttcataaaattcaaaaaatattaaaattaacaaattttctaaaaaaatctttaaattttcattttttctgttttgttgaagaaaagcatattatttgtcattcattaaatgtgatattaaaaatttttgctgttttattgaaacatttttattgttatttttgttgtatcaatttcattcatcaaattcacacattttgtaatgttttgctatccaattgtttanatctattcttatgttgaaaaaaaacagctgagaaccctgaaaa

SEQ ID NO: 81674 - DNA, 506 bp, Heterodera glycines
atgcacaaaatctcgcatattttttgtttttcaaaaaattcgcttctgttgttaaatcagtggcaaaatcggttcagtgttggaaaatgtatagcgacaaacaaccacaatgaaataaatgtagaagacataaagcaaaaatgcttaaaaagattatccacatcaatgaagccgaagccgaagccaatgatgatgtgccatcgcttaattccatgggatttgcaaaaaagagccaaatcaaatagacaacaaacaccacacaataaatccgtatatccgaataggccattcgttcttgactaaacattttttcaattaaaatttctcaatgttcttccatttttactatgggattatatttcactaaaaatatgccttaatttatttttcagggttctcagctgttttttttcaacataagaatagatttaaacaattggatagcaaaacattataaaatgtgtgaatttgatgaatgaaattgatacaacaaaaataacaataaa

SEQ ID NO: 81675 - DNA, 1038 bp, Heterodera glycines
atgaaccagaaaatgatcaagccatacgtaataaactgctgtaatgagtgagtgctgtgcacccaacgacggcaaacatcgccaaattccgacctcattagctcattcatttcgacggtcccccgccgccccaattgccccgcaaattgcttcaaactgaaaaagtgggccatacatcgcactttattagccgccgtggcccggccggggggattttggattgtttgtttgtgtttgacgggagaattttgagtgggagggcgaaaaaaggggaagggcgaaggggagaacttcaaaagcaccgggggacaactgctggccaaattgtgggccaaattagccaaatcatcgcatcagtctcgtgacgccgtacggcgggggaggacggagttccgtccgccattcggcagaacttttggaggcggcgctggtgggggcgggaggaggacagatgagctggaatggaacacggagcggaattggaatttgattgggagtaattaactaattaattaattaactaactaattatgacaaaccgcgtggaattaattggggagaggagattaattgatgatacggtacaataattaccgaaactagacaaaggcttcgagaaattcgaatctctgaactggggattcttcgagaaaagcgacaaaaataacttttttaattggggaaatttgctaggggagatacctttcctgtcatttgttgatctcgattttcgagttttaattgttggtctcgggttttgcttctccgatgaaatcatttctcgcaaccaaacggaaaataaaatatacggagaacaaacaaaaaaagggaaatgccaatgggaacaaaaaataattaagaaacaaaaagaaagcgaataaaatgccatcccttggggggggggggaatgaatggcagtaaaaaaataaaaataattgccatttatttcgaataaattacatgtttttttgaattttaattgaaattttcagaatgaaaaaaatgtctccgtgggaattggacaaagaaacgaattga

SEQ ID NO: 81676 - DNA, 327 bp, Heterodera glycines
ttattcatctcccttttcgatagaaaaagcatcagagtgcctaaactaacatgtaaataaaatttggtgcgtttcagagcaatttctgaaaaaatatttatgaaataaaaaaatcgattttttcaagtgtccgtttggggtactcacacaattatggggagcaaaaatccaacgcagaattaaagtacagactatagggaagctattcccgaaggattcggtctccccataaatctgggcgcatcggttcggggggactgccccgaaaacaaaaaaatcgatttaatcaagtgtccgtttggggtactcaaaccagattatggggag

SEQ ID NO: 81677 - DNA, 1556 bp, Heterodera glycines
  unsure (1)..(1556): unsure at all n locations
atgaggaaaagcattcaggagaacacggaagacaaagtgtcctccatttgtgtgatgggctatctgttgaacataatcgacgacctcaacgagtacatccgcgaaactgcagctgatttgagcagagaaagcccggaaaacggtcggtcttactcatcccaagttcctttttcttgcctaacaatcgaaaaattgcagcagagtctgcccggctcatttcgaattcctctctcttggaaacgctcaatttgcgggtcgtcggacgaaagattgagtcgatcgccaacacaatcactttgacaatggaagacgaaatacgcaaattggttggtggtgatgcactaatcattctcccctccgagtgaattggagtgaaacgcttcccaaattaaaaaaaaaatttggatttagattttcaaaaacacgaatctaaatcaaaagttcggttcggccgatttagttttcattgcttttcagaaacaatctgaaaatgagacggaaacgccggagggaatggccgcggacgaactcagccgttcccttcctagctttagcgttgcccctcacaattacgcgaccggcgttggccacggtcttttgtcccaaatgagcacaatcggcgcctacggaaacgaccgaaacttcgttcgatcgatcgcttccgctgcttctgaaataaattcatctttcaatggtaagtgtgaagcagtggtgggccaatatatttcattaataattccaattccaaccttgcgctttctccaataaacgaaatataaccaattttggaaattcatttctttaattaacctaaaataagaactgggtttttttgacgatttgttaacaaattcgtcaaattttaagaagttttcctattgaattttaaaattatttattttcttttgacctactcttatatagaaaacattacctaattgtaagtcaaattattacaaataattttatgcagatgatgaagcggatttgtggcttttgacggaagtgagtgccgngagtaaattggcatttgccgcttcaccatgtcttcttcattaaactctttttaaggtcgctaaactcgtccaaaatgtcttttgtactcaagtgggaaatgttgttaatttgtcgttgaaactgaggcgtcaattcaatgctgacatttgtttgtttttttattttatttgctagaatgcacaaaaacgaggaatttcaaaataatttttcagtgtttttgatggaggctttggcggaccttcgcctgcagcccaccaaacaaatgtcaaaattggcagagaaacttaaagagaattgttgaaatttgtgatttttcagtctaaaattacatgtgatttttgatccaatgtctttcatcttactaatcatttattggtacaatatagtaaaataatcaattagccttttaattctgaaaaaagattacattttagcttggggtgaaacaatcgttttgtatttgttctgtacgattcctttaatcaatatcattcaggattttcattaaactattaacattttgaatggattttaataaa

SEQ ID NO: 81678 - DNA, 54 bp, Heterodera glycines
aacaccttcctggactggctgaattcctttgaaaagacgccaattgtacgaatt

SEQ ID NO: 81679 - DNA, 1209 bp, Heterodera glycines; identical to SEQ ID NO: 17211

SEQ ID NO: 81680 - DNA, 1523 bp, Heterodera glycines
atggtgctcttcgcattgctccccgtccagctgatgctcgtcgtcgccgccgtctgcctggtcatcatcactcaatgctgcggcggtggacagaaggtagcgatgcttctgtcgtgactgattttttaaaataatttccctttttcattttcagaacacggaagagccgcaaatgccggcgggaccggaaggggcggaggccagcgccaaaccgacaggacagagcgcagcacctggtggaacttcagcagctggtggaacttccgcggtgggacagcagccagccgaagcctccaagaaatcattggctccagcggggaccgcatcggccggtgagaggagagggacgggcgggcggggaagcgtttttggttcactctaatactttcattcccatttttagcagttccttcgacgtacgcggcgcccggcacggggacgactttgtgcaccgcatcgcagaagacggcaccggctggaggaacatcgacactgggcaccgcatcgcagaagacggcaccggctggaggaacatcgacactgggcaccgcatcgcagaagacggcaccggctggaggaacatcgacactgggcaccgcatcgcagaagacggcaccggctggaggaacatcggcactgggcaccgcatcgcagaagaccgcagcggcaccggctggaggaacatcggcactgggcaccgcatcgcagaagtcggcagcagcaccggctggaggaacatcggcactgggcaccgcatcgcagaagaccgcagcggcaccagctggaggaacatcggcactgggcaccgcatcgcagaagtcggccgccggaggaaccaccctgaagtcggcaccggttggaggagcgtcggcattgggcactgcatcgcagaagtcggcagctggaggagccgcgtcgcagaaggcctgaacaaccaccggacagcacaagaacaagatgctctacaacccgcttcaatgatgttcatcgacagtgatcagaaatgattttaaatgatcccatattgttcccccatatgtgcctaatgtgctctattgtctgtgatcaattgtcattgtaaaaccgttgtgtgatcattatttgggtatatgtatatatatatgtatgtatgtataatggctaatcaccggatatcgataaacgtgataattcaagtatacatttccaaaattcaaattttatgtccagttcaaaagcacgaaatggctatttttcttttggaaaaaacgtattttgctgtgttattttcaagccgtaattgatcgtttgtcttcaaaaatttgattatgagcctaggagtaaatgaattggagctgctacatttgcgcccctacatttgcgccccgcacatttgcgcccctacatttgcgcccctacatttgcgccccgcacatttgcgcccctacatttgcgcccctacatttgcgcccctacatttgcgcccctacatttgcgccccgcacatttgcgccccgcacatttgcgccccaattgtgaataaa

SEQ ID NO: 81681 - DNA, 210 bp, Heterodera glycines
aacccgcttcaatgatatttatcgacagtgatccgtcatgatgtttaaaagaccccgtattgttcccccacatacctatgcctaattgctctattgtctgtgatcacgtatatcatttgtaaaaccgttgtgtgatcattatttgtgtatatgtatgtatattgtatgtatgtgtttggctgatcagcggatgtcgataaaaggaactaa

SEQ ID NO: 81682 - DNA, 2658 bp, Heterodera glycines
atgcaattttttggtgggctcgtttttttcttcgtgatttttcatgccaatgggaacccaattgtgcttaccacaaccttggccaaggccctaaaggccacgctcacggtgggagcggtcgcagcttataccggatggagggctttaacaaaaacgaacggaattttggacggatttggtgaacagatgaaggaaaaggtgagcagattttcaagccaaaaatgtttagcatttaaccaattcttcagcctcatctgtttgcgccattttttcccctaatttttgcgatcgccggaggggaagtcttagtggagcaagacaaattcgaaatggactacatttttgatttatttgaaaggatgacagaacgcgatcagctcgacaaaatctgctttgatggggccgagggagaaaaaaatgtgatcgaaaaagctgaagggaatctaccgcttttcattttctacgctgcgatgaatgacaaaaaattagatgtttatttatgtgattgaataagcagttttttattttgttcatttattaataaattgaataaaaaataatttaataaattttgaaaataaaattattattttttaaacccaacaaataaatttgaattgatttaaaataatttaaaaaattaatttaattagtaataaatttttgaatggatgaagcatattccgaaatttgaaaatttacttaaaattttgtagcttcattcattaaaatggcataatggtaagaaattcgtcttttctcatcaaaataaggttccgggaaaaatagttttattggcttaatttctcggtaaaaatcatttctcgcacaatccctaccatgggcaggggtctggcggggcgggggtttgtcattttaaataaatttctgctgaatgcaattgtcccacttctgctgttgaagttgcactcaatttgtaatttatgagaaaaacagaaattaaatccggaaatggcgagaaagctaatggcaaaatgtaaaatagaaaataaaacttatattaaactaaatttttataaaaggtgataagatttatgcatttttattgaattgatcagaccaaacatctgctgatcattatggtcatttatcattgtatgtgatcatcatcatcattaataagcgattagagcagcttcatttgttgcaataaaagcaaatacttgtgacaaatttcattattccatgaattgctttttttagcctattgtttttgtttgtttagcccacaatcggaggcgccgccagcagtgcccgctcctgcggttggcaccggcggtgacacttttttccgcttgcgtaccatttttgtgctcggccgtccggcggcggacgacgcagcgcaaatgaacgcgttggaaagcgaggcggccgcgcatggtgacttattggtcggcgactttatggacacctatttcaacaacacgttgaaggtggttttagactggcgcgaaagaccggcgaatgcgacgccaatttaggcgctaaattcaaattgtctctctttctcatcccacctctctattcggcccactatctctttttactaatccaatctcaaaagcacttttaaatattttttctaaatttataaaaaattcctccccaaaaagtttgtccattctgtgcgctttgctcgtcactattgtgcgctgcccaattcggtgccttttgtgcttttgttggacgacgactttctgttgttcccgtggaatttaatcaccgaattgcaaaagtgccacaaaaataaataaacaattattttggcatttttatttttttaaattgtttttggcatgtcccaaatgaacgcctttacatgggctggcgctttgacacttcgccattccgttcacgactgttcaaatggagggtcggagtcaataatcaactaacttattaaataaatttgaatacagtataccaaaaaattgaaccctaaaaaacgtttgaaatttcaatttaattacaaagataaaataaagcaggctcgtcaccagtagaagccggaatcttgaaaaatacagaaaaaggatttgaaaaagctggattgaaaagcagcggaaaaaagtcctaaatttctgagaaaaactgaaatttaaataaattcgggctctaattaattaattaattaatcttcaattaaggtgtcgctggacgagtttccattcgccgcctttcccccgtacatcgccgctggcgcagtgctcttaacgggccaaacaattgccgaattttacgcagccattccgcacgtgcgactgtttcgcctcgacgacatttttgcgggtgggaaatttttcgtcaatagtttttgaaaacaatttttttaaattttacccattttattccgtttttatttttttgatttattatttcgacatcccatacaattgttctattgctgatttccctttccttttaggcattctctcccatttgttggccattacgcctcaacacaatgccaattttgccttctatcgccaatcatttgccgacgattcattggcattggcatcttcagaaacactcaccacattgatcgctgtgcatgactatttgcccgaagaaatgcgcgagacgtacggaaaggcagtgaaacagcaaaatcagcagaaattgaagctgctctga

SEQ ID NO: 81683 - DNA, 1035 bp, Heterodera glycines
atggtgggagagaaacagcgaagcgatcagcaaaggcaccacaacgaaaggcacctgaacgaggggagggaaaagcactcgaacggacggaagagcaaaacgaacggtagtgatcagaagagggaggagaagcaggggaagatgaaagcggacggagaaaagtgccaagagaagagaaaaagcgtaagcggcgaagaaaggcacgaattggtggaccaaaagggagaacggaccatgcaaagcgtaaaggacggagccgtacaccacgttggacaggagaagggccgaaccgatgtactgaaaaaggtggggaaaaggaagataaaaacgatcagagacggagaggaaatacaatttgatgtaaacttggcacaaaagcagatcccagtgaaatgtggaaaatgccatttaaaacgacactttcactacctttggttttctaaaaatattttcagttttttgaaaaataatttattgtttctctaaactcaaatacctccatgtgtttttcaattgataaatttttattgagcaaaatctttcattgcttttagcaaattcttaattttcattttctgtccttggattaaatgcttttctaaaaaccattgctgatatcattaagtgtttctctcttaacaaatgctttttagcatttccccgaatcaaatgccaaactttgcgggcagtgactgaatctgaggcaacagaaggagaaggcttttgaggggtcaaagaaacggcagagaaatgaccatcagaagaagaagcgggcacagaattgaggggaggggaaaaggcacttttaaccattttaagtaaaacagagacttatggggcaaatgaaagggaaaagggaggggaaaagaggggggggggggattaatgggatggaatattcattaagagaccatttaaagacataaaattaattcttcgaagggtgaaatttgagaaggggcggaggagaggaggagaacgaaacgaatgctaagggaagaaacggaaatattggcaattaattagtcaaataaa

SEQ ID NO: 81684 - DNA, 3403 bp, Heterodera glycines
gtcagtgcgcagggcgaccgcacggtggtccaagtgcagcgtcagcttatttctcgcgcggaattggccgacgggcgaatcaccgcctcgggcgatcttttgatgcttttgccatccgctgggagggcacaacagcagcagaaaaacggcactcgaggctattttatggttcgtcgaagcaactgtggagaaatcgccacgggcatcggaaggacggaaatgggcagatttaggcaccgaaattggcaaacgcaacacagagaaagtgccgaattggagttggccatgtgcaggtgaagcaaaggcatccaactgaccgatccttcgaaatgcttcctcttttagtttttgtttcgatcctcgccatttgagccttctctgggcctatgaccccgtccaaatgcgtgtttttgccttatccgacgcttctgagaaaggcgtccattttgatcagaatcggcttttcctcgccaaacatcgtcaaatgattctcagaagtactgagctaatggtgccatcgttaatggaggacgaatgcgaatttgaccagcaaggatcgaccgaaattagccaaggcaaaccaatgaaaatttgatcagtttgacatgctaattcgtcttcgcttttagtccgtttttcggatgcccaaatggccctttttctcctttccatcgtttattccctttgccttgcaattcaccaaatgccgaatggaagtgaacaatgtgccgaagatgaagtgcaatttgatggattgggctcggaaaacgccgatgaaaattcggacggagtgacgcgaagtgcgaacaccgttcggaactgtcgcgtggtccgtcgcttccaaaacttcggcggcagttggggatattcggcccattgtgtggaggctatccaatttatgacaaagtgccaaccaaatccatgcattcagtttcttttgaaattcaaattcggctctttctcagttgcgaaatcactttttgcggcgtcggactgttcggcggacgcggcgaatacaccgcgcggctgaaactgtacagagccattgacaaagacgaagtcggcactgaggcacagcagcagtgcgtggaactgctggccgagacggacgaagtgctttacgaatgcggcacaagggaaacggcgacgctccaattggagcgaccaattgcgatcataaaggacgtgtggcacttgatatgggtgcaaatccagtgagaagggcgtccattttgggactgatcaccgatcagtccaccgttaattcccccaatttgtcaaggggtccgagttcggactgcgggacgggaggacgggagacggtgcgcgttgaaatatgcggcggtgcggaggactcttccgaggcatgctgcgcggaattccgtttccgcaccagcgaactgtctaacaacggaaccaacgtcgaggtgggacagattcccgagctgtacttccttcccattgcgacggacggcgacgaacgctgtcaaaaacaagtcgaaggcgacggaaatgtcgctgcccgagggcaccgtccaaaaaatatgggcgacgctcccttttacggagagagagttcacctcgcgaccgataacaatgaccatcggttggccgagtcgctttgtccgctcttccgtaaattctgtatgtccggcatccatcagctgttgctaatcgttgaatgggctttggacggcgctttccgcgcgggggccgaggaaacggacgaactgatcaattgcgacgccttgtggcgccaggagagggcggcattcgtcgcggtgctgtcaatccgattgatccgtcattttttgtgcattccatcggcgggaaaaaacgcggaggaaatggtcgaattccatcggttgctcaaaggcattttgtgccgaaaaagtcatggacaagtgcgactttctcaaaacattgtttaatccataaataatctcaaaggatcgcatttccgcttttgtaacggcggaggccgctttgacatgcacaattttggccagagaatttgcgccaaattcggcattggtccgaatgcgtctcgtcgaacagctcagacggaacaacgaaaacggagcaaaagccaaaggaaaagccaacgattggtggcttttcgctgttttgtgttcaatgagtcggctggataatgtgagaaaagaataattaaaggactaattggctaattactggtgaactgaccttttaattcctttaaggaccttttgtcaatcattcgaatttcgtccaatgaaaatgaaaatggcgacaaaagacggaaacgaatgaatgaagcggtggagagaatttggcgatttgaagaaaatgcgaattttgccgctgggcaatcggacgacgaaagttcgccgctgagcattttgaaatttatatgtgaaattgcatttggcgaaatgactaatgaaacggaaaatgaaaatgattcaaaaaatgaactgatggacagagacgacggaggatacgacgcgataagcgcagacgaaaatgagcggacgatgcgcgggccgatcacttcgtcggggggagcgcggcatccgacgccgcccctcttcgacggcatttcccttcggttgccttccgtggcacagcgactgattacttcactcgcccatcgtctgatcagccgagctctcccccagccaaaaacgattggcgaagctgcgccgctctttcaaagtccttcccgctttcggcacatttcggcccacgcacaatgggaagtgggcgggaaccggcacgcgtccgcttgggacgcagtcgctttccgcgtcgatgggcccggaatcgcattggcaggcgttggcattttctcgggaagtgcggcgacggggccggaacactttgagttggaggtcggtaaacttggctttgactaatttgtgccaatattttaagttagtaaaaacccaatccatcaacgacattccctcgggccaacaaaacgaatggcattcggtggaacgcgtcacaggacaaaccgacacttttcccactcaaattgtgcattttgcgcacgcgtttcctttgagaccgggcgcgtgttatgcggtcaaagttcgctttgaaggaccgggaaaaacacttttcggagaaggtaaagccggggaaaacgcggggcggggggggggggggggaattaacattgggctatttgatcagttaattaacattgggtcattttgataagtaatcatttgtgcccctctgctctctcaggcggcctcctctccatccaaatccgtgatcagatccgtctccactttttgccgtgcgatttgagtcgaaatggcactaccgtatcccgtggacaattccccttttttctgcttacggtcgccgacccaaaggaaaaatttggcggaacagcaaaagcagaaaagcc

SEQ ID NO: 81685 - DNA, 1815 bp, Heterodera glycines
  unsure (1)..(1815): unsure at all n locations
gcaactggcgattttgactacagtgcaccaccgaatgccatgcatcaaaatcaccaccaccaccacaaccatcattcggcaccctcatataatgttgaacatttggcatcatttgcggtgctttttatacaccaattaaatttaatttttttagtattacccatttttatcaattaaattcaagttttattattacccaactttttatcatttaaatttaatttttttttagtattacctaattttattaatcaaatttattttttattattatccaactttttctattagatttcatttttaattatccatttctatcgattaatttaattcataattaaccaattttttcaattacattttaattttttaatgttaaccaatttgttagcaattaaatttaatttttgatagccaaaatatgaatttgccattggatttcaaaaaatttattcgttattgttgtgaacatattgtcaggttggaagtcatttctcagtgctttcgcctgcggacggtgtgcgtaaacttaagcaaatggagcagaacagtgccatttggtgggttttttatttttaaattaatttatatataatttatgattttggttacggaggcattcaattgggaaggacagagctgggactaaaaatctcttttcaaggacaattggacttcacttgggaagggcaccgggattgtgcccttttcaaggataataaatgcaccgagactatgcccttttcaaggacattttagtcctcttttcaaaactgaatctttttcaaggatatataaatttttaactgatttttcttgagtacaatgctttcattttctactgatcagcgggatttgtatatctaatttcctaaaaccattcaatcgcacagtaattaattaacggcatcaacaaaaatcctaatttttcccgcatattaaaatttcaacaaaatttccagccccgtgccaatgattttctcgcttttccccaaccgaatttcggtgtccgagttgaacggaaatttggtggaggaattccccatggatttggtgtccgacccaaccgcgcacacatcgtccgacccgcgtgacacgttcaataacatgctttgtacacactatcaaattcaacaaattagacaatttgatcattaatcactgatcctgatttacagtatttattgtgctggaacatgttgtttccgatggtggcactgtgcccaccgaacttcacattttccaggtggcattttcggttattattttaattaatgaacattctatactggcacggcactctttgtatgtattaaatttaaatggaaaaattaaaaaccaaagaaaccgattgtctaaaattgacaaataaccaatctggcataaatttcccaattcgtaaaattaggtttagtgtgcatattaggaatttttttcaaaaaaagtcctttattagaacggctcactctaataaaaatttatatcggattttctacttgattttcttcaaaattcatatctatattttagatacattttttttcattttctaataaaatgtttttaatacatatttagccctttagaaaagtttagcttatattttgagaatttgaagaaatttgagaaatttatcaccaatttgattttgcttccctatatacgatttaaaattatttaaaaaaatgaaatttatttaatgatttcatttttgcttaattagtgtatcaatgtgcctgggaggcgaagttgccgaagatttgtataactgtgagtaaaataaccgacgctattngcaaattatataaatttaat

SEQ ID NO: 81686 - DNA, 258 bp, Heterodera glycines
atgaaaaagagaatggaagagaaaatgaatgaaaaacgacaaaaggaagggaagagacgaggggaagggaagagaaaatggaaaaaacgaagggaatggaagaaagacgaggggaagggaagagacgaaaggaagggaagagacgaggggaagggaagagacgaaaggaagcgaagagacgaggggaatggaagagacgaggggaaggaaacgacggaaggatgggacgctgtgttatattatctgttgatggcacag

SEQ ID NO: 81687 - DNA, 405 bp, Heterodera glycines
atgtcctcaaatgcgaacgaaccgattcatagtggtcattttatgacctcaaatccacactcggaaatcccaccagatgacgaggacgaagatgttgaggtttgaattcatcttcggattattcgagtaaacgccaaacccctaaaaaccaaaggaaataatattatttcaatcgtaaccaatttgaagtttcacttcacgattccacttgccattcattttaaggtcgatgttgtcgatgtggacgacgccaattcattgtcagccgcgcaaactgccgacaaaagcacggccaaaggttcgctactaaaagacgaggacagaccggtgaccttctacaaattcggctctcaaaaaacgcaatcgatcgtcatcgaccaatcactgaacaacctgcctcaataa

SEQ ID NO: 81688 - DNA, 572 bp, Heterodera glycines
ctcaaatttcgtctcaatgcgacattaactccgaatttaacgaattccttacttttgagagagcaccaatcaattctgacccgtttgaatggtggaagaagcatggaccaaaacttccaatgttatcaaaattggcgatgaagtatttgtcagcccctgcaacaagcgtgccgagcgaacagactttcaaagtggcgagggatgtttatgattatcgacgttcgagattaaagccgaaaaccgcagaaatgttgatatttttgaacaaggccatcccaatgttggactacaaatactgatttaattttgttggatgataaaaagttcataaaattttccataaaattttggtttagaacaaagaaaagaaattacgcaatttttttatatttataaatgcatttttaaaatttgaaaaaagcccggtcccgtacgggcgcccggtcaaaattttggaccgggcccgggacgcccggtaaaacgggctttttttgaacgggcggcccgccccggtcaattttcgaagcccggtcccgggcccggtcccggtaatttcaaaattccggtctcta

SEQ ID NO: 81689 - DNA, 273 bp, Heterodera glycines; identical to SEQ ID NO: 65910

SEQ ID NO: 81690 - DNA, 496 bp, Heterodera glycines
atgtttctcatttcgattgctttggcattttctattcaattccattcttctgttgccgaccccgaaaatcaacttggctttaaatgcacaaatgtttcaaattcgcaaaattatggctgttctgcggagggaaatgttttgcgcttttttgtcatcggtgacatcggtggggaggagtatacggtagagggcaaacagcagcagtgtacggtggaaggacacggtaagttgaagagggagaacaaaatgcatcaattgacttttgctcacatcgaattgtgttgatgaagtggaagacacttggatgggtacaatcaaatgcctgttgaagttttctatggaatgcttctgcgtaattgttggttctgtctcctccatccaacgtccgttgatgcacactccattcttccggtgcgaaccgtggcactgtcaaaccaccattgaaccacggccttccggtgtaattgtccatgaacttttgaggacattaccatga

SEQ ID NO: 81691 - DNA, 730 bp, Heterodera glycines
atgccacccgaatttccgactgtcccaaatggtaataaatccgtcgtaatattttttatttttccaattgattcaaaggatcggtgtggaggacagagtgcacgaattcacgtcggatttgagtgaaatggtcgcttggttggccccggaagtgctaatgcaggtgggcacagtgaaattgtggggaaacattggcgattctttctttcgttgattgcttactgtaaggacctcaacggatacggtgccgattccgacatttacagcgttgggatatgcctttgcggtaatccttcgcaaaatcattagaatgattgtgtgtcatgtttttgaatttgagaattggccaatggcgtcgtgcccttccaagaaatggaaccccttcgcattttgtacgaaaagctcagcggatcggcgcccgttttgttggactcgacacactgtgaggggacggagtgcttcgggcggcggacattttcaaaggaattgcacgaattattgggcgaagtgttggaacagaggcggtgagtgaagaaaacgcaaaacaaaataatacaaaagggaggggcaattagtttagttaattaggagtagttaataaatgaattccagcccttctgccaccgaacttcttcacaaatatgagaattctctgttcgcttttggccccgacttttcacttcgtaaggcattggccgattatttgccactggcaaaaccgatcgtctga

SEQ ID NO: 81692 - DNA, 1510 bp, Heterodera glycines
atggccaagatcggcacggaaggagcagcggaggaaggtgcgttcggcatggacaaaggggtcgcagaaaaggagcagagactcgtgggacatggacaaatgggcgacgattttggcccgtttcttcaatttttcagttccgagcgttccatggaatttgcgtccacctttgctacgacggtggatgcgctggcggggcccaactcagccaaaagtacgcgacgccccgttgcagcggaaacgccccaaaggaaagtgccgagccgcgcttaaaacgacagagactccaagacggaatgaacaaatgccgcattagggcactttacccgggttcttcggaacagagacagtgccagacgctgaagagttgcccatcgttacggcatcagtgtatggcatttatggggccacagaaaaaagaggggaaaaatcgcaattggccaaatgtaacaaaggaagccttaacggttaattatcattttattttctcgaaaatcaattttataaaattaaatgatacacaaacaaaataaaaaaatctatgaaattcgtaagcaaaaaaattgaacgccaaatcagccataacaaatttacgaacaaaatcaaaatgtctctcagagacgagcattggaattgtaaaaatggcacccaaagaaagggcaacacacaattttattaactcattcagtgaaaatgttcataaatctctcaattcaaagaatctccatatttgaagaatttgtaatggtgcaaatttttggtttttctttgtgcgccgattctttggaaataacacaaaaaaggaaaatgaaagattagcttcgtaaaccggtagaaaggagcgcaattttggctgaatgggctacaaaataaaagtaaatgaaatcaaaattcatctagaaaatactataaaaatatgcaaaaatggaaattttgcagaaaaagagacagtgaagtcacaaggaggaaagaagacaatatgaaccagtggaagacaatgacagctaatttagccattcttttaatgagtaatcacttatcaatggattcattccccgccccccgcaatttgtcacgagacggggacgtccttcagcttggcatccgtcaccaattcctgcataaggggcaatgccgagactgtatgggcgaggagttgagccggagcattggcggcgttggacggtcgaatgattgtgcaaagattgggctttgccgagtcacacgcgacggtgtaagtgacattggaaggcgatctgagcaaagggaagtcaaaagcaaaaggaatttggaagggcacaaagggatcggaatgttcagttgtccgacgggcaacggcggcagctccaaattccatccgacggagccgaaactgtgctccgactcgtcatggccatgcagcacagaagtggccacggtgaaggagacatggctgaaaaaggagagaatttggaggaggtgagaagaaaagtggaagaaaagcaatgggaccaaagggggggggaaggaa

SEQ ID NO: 81693 - DNA, 1324 bp, Heterodera glycines
tccgaccaacactcgtttggtggccacctccgcagcctttccaatcccagtccaacctcagccggtctttctttacggctcgacaccgccgtttggttctccaccgcttctgatctcccaatttacaaattggttactgtttatcttgggtgtgacttatttgcacaattcccttttaggacttctccaatggaatccggtggctttatgagtggggccggcttctacaatatcaacgcctttaacaccgccaacgccacggcttcatctgaaggcaaatctccccaaaaacagtccgaaacgtcctttgaatcagaggaggagcacagcaaaaggtgtgtccggtggtagcctttggttggtcacaaatttacgtttcattcgaatgatggttcaattgtcagtgacaaaaagtgtcgtcactcttccagaacgaccgctgaagaggacgattcggaatggtaagccttcgttcgtaagggttctcagtctcacaatcgtttgttcatattgtatttgttgttcatggtctttacttgaacaattttagaaaaccgtgagaatgttattcaatgaagtcaaagcctcgagcagaaatgtctttcccactgactttttcatctccacaattgcttttctctatttattcatttttgcttttctctatttattcatcttttcatttttatcaaattattcatttattttcgcttttctcaaattatccattcttttcattttcctccatttgtatcaaattgtcccccccccaatttttccattattattttctttttactctattaacttttctgttatgctttgtattatccgtttatttttggactcccatctgcgttattcgtatcgaataaactcagtttggatggacttctttagagtgtgtgttctttcctttatttccttccccccccctttggtcccattgcttttcttccacttttcttctcacctcctccaaattctctcctttttcagccatgtctccttcaccgtggccacttctgtgctgcatggccatgacgagtcggagcacagtttcggctccgtcggatggaatttggagctgccgccgttgcccgtcggacaactgaacattccgatccctttgtgcccttccaaattccttttgcttttgacttccctttgctcagatcgccttccaatgtcacttacaccgtcgcgtgtgactcggcaaagcccaatctttgcacaatcattcgaccgtccaacgccgccaatgctccggctcaactcctcgcccatacagtctcggcattgccccttatgcaggaattggtga

SEQ ID NO: 81694 - DNA, 1072 bp, Heterodera glycines
atgagaagaggtacaagagcgattagaagaggtacaacagcgtttagaagagtgattagaagaggttcaacagtgattagaagtggtacaacagcgattagaagaggtacaacaggaaatagaagaggtacaacagcgtttagaagagtgattagaagaggttcaacagtgattagaagtggtacaacagcgattagaagaggtacaacaggaaatagaagaggtacaacagtgattaaaagaggtacaaaagtctaactttttatgagatgtacaaaaataatttcataattttaaatataattttatagaattaggtttatttaaaaatttaaaaaaaactaaataataaaaaatgtaaaagtttatttttaattaataaacggaataatttattttactttgttttgaaatgaattattatgcaaccaaatttttaaatctaattttgcttaaaaataaatctattcatcaaaagaaaaattaaatttaattaaaattattttgttattaataaaaacaaaaaataatttttttaatttaaaaaaaaataaatttaaataaattaaaacgaatcttcaaattaattaaaaaatgtaaaagtaagcaaaaaatgcatagtaaattaatgtacaccgtccggatccgaacctgcccccccccccctcaaaatgatgcctcagaatccccaatcacacagggattctgaggtcttgactatgtcaaaagtaaaatctgatcacgtattcgtgatcagcggcccaaataacccctaaagacatatttttggaagaattttgtgaaaaaaaaattttccactcaaaaatcctgtcacccccctttggtcccgaatcccaaaatcacttttatttttgtatctttttttaaaaatgtgataaaaatgtaaaataaaatttatattatagagaaaaaaattgcggatttttgtagtattttacttttcccgaatagcttttcagaaggcagctacaaatttttttctgaaaaatcgaaaatttccagaaattctggaataacttttttcttttttgtgataaaaaactcaaataaa

SEQ ID NO: 81695 - DNA, 476 bp, Heterodera glycines
atgtatttgtttaatttttacagtaagcagtacacctcaggtggtcccaggcacatttggacaccagcatgtttttggactataactaattttctttgtccacctaatacaaaatgttgctatttgagagctttcagatattagccagaaaattcaaaaaagccattaattgttaacaaaatagtgaccaaaaacctgaaaatcttttttttgtgttcttctggtcataactcttttgcaacacaaataaaaattaataattttgcaggcctaatagaccacatttacatgtaccgaatgataccaacaatgtcggattaggatgataaaaaaagttataaccaaaaaacggctggggtccaaatgtgccggaacccaactgagcaactcagataatcacaccacaaagtcttatttgaagaagaaaggctataaaatactctgcaagttaattttcgcacataatttttgtgaaa

SEQ ID NO: 81696 - DNA, 980 bp, Heterodera glycines
atgcctgttcgtaagagcaaatggacaacgctcggaagcgtaagtccatacgatgcctgttcgtaagagcaaatggacaacgctcggcagcgtaatgtccatacgatgcctgttcgtaagatcaaaagtgcaacacttggaatcgtaatgtccatgcgatagctgttcgtaagagcgaaagtgcaacgctcggcaaaaaaaagcaaagtcaaagtgaaaaccttaaaaatcacaggtgcgtggacccgggcaaaaaattgccttaagaccaacatgccttcgcgaagaaaagtttatgtcttgtgttttaccagccacgcaccacgacactcccttaacttcagcatgagggtcacgggacatactgtgtgcaggcaggagctcccttgcctgagccggccgctgccagtccacctcgctcggctcccttgccttcgccggccgctgctcgctcggctcccttgcctgcgccggccgctgccagcactcaacacaagggagccatcgctgccttcgcgggccgctgccagtccacctcgctcggctcccttgcctgcgccggccgctgccagtccacctcgctcggctcccttgcctgcgccggccgctgccagtccacctcgctcggctcccttgcctgagccgtccgctgccagcactcagcccaagggagccatcgctgccttcgccggccgctgccagtccacctcgctcggctcccttgcctgcgccggccgctgccagtccacctcgctcggctcccttgcctgcgccggccgctgccagtccacctcgctcggctcccttgcctgcgccggccgctgccagtccacctcgctcggctcccttgcctgagccggccgctgtcggctcccttgcctgcgccgatagctcccatcgccgtccgctgccagtccacctcgctcggctcccttgcctgagccgtaccatttcaacacgcgcgcgcgcgcgcgtagaaa

SEQ ID NO: 81697 - DNA, 2023 bp, Heterodera glycines
ccggcggaggagacacgttcgtggtgcgaaagaaaatcttcaccattcgctcgtatgtgagtaccctgactgcgcagcaggcgaaagcgtatgcttgagtgttatggatggactcaatgttgaactagcgaggcaccaccacatgcccgtccgccgcttgcggacgccaggcccgttcgatggggtctgtggcgctggtgctgatacattgttacatacggttcacagtatgtcccgtgaccctcatgctgaagttaagggagtgtcgtggtgcgtggctggtaaaacacaagacacaaacttttcttcgcgaaggcatgttggtcttaaggcaagattttgcccgggtccacgcacctgtgattgaatgaattagatttcccaaatttccatgcccaaccacttcaaaaagccttttaaataccgaacactaccaccacgcccctcccccacccatcttatttttaccatccaccatacccattcccctttccacgcccatcatcacccgtaaccatctcatttttaagcctattttttgcctattggctcaatttattttctacgcgcgcgcgcgcgtgttgaaacggtaatgagctcaatttattttctacgcgcgcgcgcgcgcgtgttgaaatggtacggctcaggcaagggagccgagcgaggtggactggcagcggacggcgatgggagctatcggcgcaggcaagggagccgacagcggccggctcaggcaagggagccgagcgaggtggactggcagcggccggcgcaggcaagggagccgagcgaggtggactggcagcggccggcgcaggcaagggagccgagcgaggtggactggcagcggccggcgcaggcaagggagccgagcgaggtggactggcagcggccggcgaaggcagcgatggctcccttgggctgagtgctggcagcggacggctcaggcaagggagccgagcgaggtggactggcagcggccggcgcaggcaagggagccgagcgaggtggactggcagcggccggcgcaggcaagggagccgagcgaggtggactggcagcggcccgcgaaggcagcgatggctcccttgtgttgagtgctggcagcggccggcgcaggcaagggagccgagcgagcagcggccggcgaaggcaagggagccgagcgaggtggactggcagcggccggctcaggcaagggagctcctgcctgcacacagtatgtcccgtgaccctcatgctgaagttaagggagtgtcgtggtgcgtggctggtaaaacacaagacataaacttttcttcgcgaaggcatgttggtcttaaggcaattttttgcccgggtccacgcacctgtgatttttaaggttttcactttgactttgcttttttttgccgagcgttgcactttcgctcttacgaacagctatcgcatggacattacgattccaagtgttgcacttttgatcttacgaacaggcatcgtatggacattacgctgccgagcgttgtccatttgctcttacgaacaggcatcgtatggacttacgcttccgagcgttgtccatttgctcttacgaacaggcatcgtatagacattacgctgccgagcgttgtccttttgctcttacgaacaggcatcgtatggacattgagattccgagtgttgtactttcgctcttacgaacagctatcgtatggacttacgcttccgagcgttgtcctttttctcttacgaacaggcataacatagacattacgctgccgagcgttgcactttcgctcttacgaacagctatcgtatggacttacgctgccgagtgccgagcgttgtccttttgctcttacgagcagtcatcgcatagacattacgctgctgctcttaggaacaggcatcgtatggacttacgcttccgagcgttgtccatttgctcttacgaacaggcatcgtatggacattacgctgccgagcgttgcactttcgctcttacgaacagctatcgcatggacattacgattccgag

SEQ ID NO: 81698 - DNA, 196 bp, Heterodera glycines
ttgaacggtgatggctgctgctggggtgccacctttgtcgtggcctcagtttctccagcgtttggcagctgtcgaaatgaataaaacatgcagctcgtctgtgtgttaaagaaatttggcgagttaattgacttgtgtaaatgtggcctaaggcacaaatgctgtggggaactcagcactatggatcctgtgattg

SEQ ID NO: 81699 - DNA, 2291 bp, Heterodera glycines
atgcgaaagtttagggcggaattctgcacaatgttaaaggaaattctgctgatcggaatcgcattgaaaaatgatcagacaaataagataaaaagtgatcgaaaagtaaataatatggtaattacaaatgatggcaaaatgccaattaatcggatctatcatgaaaatttaattgataatcagcaaaatcatacagtaactgatctaagtgaccggaaagaaaatgggaaaagtgatgaaaaaatgcataaacaaagtgatcagaagttaaggaaaagtcatcggaaaaagaaaacaccactgcctctaattacgttaaattatcaacagcagaatacagttggtgagcaacgaaatgatacagtaaccgatgcaaatgatcagaaaacgactgtgccagcaactgaccaaaaaatgaatgggcaaagtgatcaaatcgaaagcgagccgcaactgatcgcaattcgtgatcaattgcacaggaacaactttgcccgactgatcagtggggatgacgaaacggcacgcgcagcgtggcacaatttgacggacgaggtgcaatttggcgtcattacggtactgttgggacgaagaggtggcagagacggtggcaaaaagtacagtaacactcgggcacagttcctcaaatatttggccaaatggaagaagttgcgcgaccagactgagttgggtcagtgttcggttattttctttaattaattaaataaataaataaaaataaataattttttaaataaatttacaatttttgtggccttttttaatatttgttggcacattgtaaataaaataattattaaattaattaattttagatgaacgtttatttgatgaatataacaaacaaaattcagaacaaattttggacagaaattacgtacaaaatatgcagcaaatcaaatataacactcaaacggacatttacacaaatttggtgacgaaaaaaaatcttaataattaatgattaaattaatttttgttattttattagctcatcaagattctgcgggcaaatggctttgatggcattgaaatgcataagcaaaaacaaattgaagaagaattggaaaaaatcagagacactgtcgccaaatgggtgagatttccaaaacccattccttcgtggcttaattcggttttaaaatgccagaaattcccaccaactactcgcccttcccccattaaaatgccaattaaattttaatttaaaatgctgaataaacagtgaactgtttttgtagtcaaatggcaccggtgccctgctgttgggcggctcctctctgatgggcgtccaaacggcggactcggacattgacaccgtttgcattgtgccggcgcacattcatttggacgccttttttggcactttgcactgtttgagcagcggcgaagaaaaggaagggcaaaagtgtgaagatgactcattgttttacatgcttggtcaggtaatatatttccggcaattgatcattttgcttttgttgggtgaggggattttcgtttgttttgctcattttcgctcgcctaaagacaagcttcaccttcactgtattgcaaatcgagacttacatctgttgccaaatcgtgcctgaatcaaaaggccgtaaaatacggttcagattttccgcttccctccgtcgtttcccccaccatttccgccccctccccacgaaaaatttttaaaaaatttaaaaaagatttacaaaaaaattcacagggaatttttcataagaaaatccaaaaaaaaattttttaattcataacgatttttcagagaactactaagatttttcaaaaatttttttccaaaaaatagaaattaaaaaaatttcttgaaattttcttatgaaaaatttcccttagttttttttgaaaaataatagtttaataatcccgaggggttctcctcgcttaaaagcatgcttcatctttgcttcatcctgcccgttcttcagcttgccgactttggctctgtccgtgccattgccaacacttcggtccctttgatccgtctcatttcccgctccggccaccaatttgacatcgttttcgcttcagttgcgcagatggaaagcatttcgatggcacaactgctgaacggaaatgccgagacatttggccaattagcgcaaaaaatggccacagaattgatggaagagggcgatggcattttggagagggaggaggaggaaacggtgaaaattgcaagaatggcacggtcattgtccggtgattaggggggggggcaaaaataattttaaaaaaataaa

SEQ ID NO: 81700 - DNA, 493 bp, Heterodera glycines
acgttggactgttggccgtagacgaggctcatttcatttcccaatggggccacgagttcaggccgggctatcgccaaattgccgatattcgcaatgttttgaccggtgttcctgtcattgctttaactgctacagccaccgacccggtgagaaatgacatcgtccaaaatttgcgactgagaaacccaaaagtgactttgtccgcatttgacaggcaattttcgaattctttttttttgtgttttattagagaattataggaagaatttgttcattgaagtgcaaaaacgaactcaatcgctgaggtggcgtttatcatcattaatttctaatatgaggtcgaattcgaactttagtttcgaaaaatgcgtacagaatgacttggaacgtcttctcgaggatgacccgaaaaccgggccgaattttggtggtccaacaattatttattgccaaactcgggaactcgtcaaccaactgacccagcaactcagaa

SEQ ID NO: 81701 - DNA, 1159 bp, Heterodera glycines
atggaaatggtgccatttgaattggtgaacgaatgcacaaaggaaaagctgacattggccaaagcaaatgaaaatgaattggacaaaagttggataatgaaacgctgcaaaattggagagacagcggcggtcaattgggaagacggaaattgggacaacaattgcaacaatgtgttcttttggctttttagtggcactaattgcatcgggtgagcaatttaaaaacatttgatttttatccgaatttgaattttgcgcttaatttaggcctttgtctccgccaccaccagcgagaagacgaagaagcgggacaaagcatcacaaagggcgaaaccaacgcattgaaacgtggcgaaagaagtgccaatttgaggccgagttgaggacggtcaaaactggggaaaatgtccatccaaacgtcgttgcaaatccaactgaaatggaaaaacagtttagttaaataaatgatgaatagggatcggatttttagtgataaaaaatcccaaaataattaactaaatagtgagaaaaaaattccaaaatagtggcaaaaatagtggcgaaaaagttccaaatttaggggtgcaattttttaaataggctgttttttaatttgaaaataatttaaaattaaggaaaaagattttattcactgattgcagttacaaaatattttcttagaaaatattgaacaagaaaaaaaaatttgggggaagaatttttgtgaaatttttccaattcttagggatgtatttttgaaaatttttaggtcgattcttaggggtgtatttttgaaaaatttttaggtcgattcttggggtgtatttttcgtttttattgcattttttgggaaattttccaaaaaatgccaaaatagtggcaaaaataatgacgaaacgccaaaatagtggcaaaaaattattttagtggctaacttccgaaatagtttttttttagtggcgaagctccaaaatagtgattcctagtgatgaatagtggcactaaaaatgaaaaattttcgaaaaagaatgtgtttttcgtgcatttttcgtcgagttaaagccgcagaaaaaatagttaaaaaactaagaatccgatccctagtcataatcatcagtgatcaaatgccttttttgatgaataatgtctaaattggtaa

SEQ ID NO: 81702 - DNA, 100 bp, Heterodera glycines; identical to SEQ ID NO: 54598

SEQ ID NO: 81703 - DNA, 377 bp, Heterodera glycines
atgaaccgacggtaaaagaatttcaaaagtcaaaaattcttatttgccctaatttactttcattatttcagttggatttgcaacgacgtttggatggacattttgcccagttttgaccatgcccaactcggcctcaaattggcacttctttcgccacgtttcgatgcgttggtggacaaacatttcgatggcaaaagcgaattgacaatttggagatcaatcgaaattcgtcgcaaggacaaaggaccagaaacgaaactatctgtgcggatggatgacaaatttgtggaatttccattgccggaccgtccgttgcccagcaaaatccgttttaagaatcttcggattgggtaaatcaaaatcagagagctatgaca

SEQ ID NO: 81704 - DNA, 372 bp, Heterodera glycines
atggccgaccaactgatgctgtcttttaagcagaaaatcaacgctggaaaatatgctactgccgagccttttctggccaaacttggcattcaaacaacttctgaggaagagaagcgatttatcacagagaatttggatgattggcgtgtgatcaccgcaacatggtttgaaatggcacggcacattggcacggtgcaaagtcttgcgactgtcgatggattcgctggcagacacaaagcttctctcctttgttccaaaattcattactgtcgcgagcaatacaacttggctttggaatatgccttgtctgctggaaatgagttcaaacttgtgccgcgggcggaagataagaagggcatgacactttggtga

SEQ ID NO: 81705 - DNA, 965 bp, Heterodera glycines
atgggcacggatggacatccgacggagaacggagtacgaactgagcgtacaaaaggcaagggactgtctgcagaagtactaccgactggtcgaactgtacaaaaaggtacggtaagagagggaccataaaatgaaatatttgcaatgcaattgcccttctgattcttttcaaacattcagcgtgccattgaaattctggaagttattttgaaaatgtccgacggatggcttgtcacaattcccctccgagacgaagatttggccgacgaagagattgtggagcgggcggaggactttattaggattcgcaaagattacttggccagtctactccaaaaactcattgacatttaccatcggtcggacatgccaatgagcgttttggacacagcgacgcttatcatggacccgctttactgtttgtataaggcgagaatccatataataataacaatctaataatatttcaataaatcaaatcattttcaggcattggacaaagaaaagctgcaaaaactgttgaaatcgatctcccaagcaggcgcatctctcctctgaactgttacacttcacaattaatttttctgtttttaaataaatttcccaattctttgctttgtttttccccttggttttgcatcattatttatctttgaatttaatcactttattttcccattattattcggttttttcctcagttttccaatggagcgttctttgtgcagtcggaacggtgcgggaaatgacagtgtggtgaatgtgagggatgacgaagtgcaggacgacgacgacgagttcttccacggcacggcatttgaaagtgacgaaggataggacggcatagggaaaaggcaaacgaaatactgtataatttgattaagcggttcgcggagaggacaaggagaaccgagagacgacggacacggcgaaatatggggttgactatgacgagatggacaaag

SEQ ID NO: 81706 - DNA, 1624 bp, Heterodera glycines
atgcacgattttgcacgaaatcgtttattcttcaaacaaacggctcgtgaattggtacctgtggtaagtaaagaggaattatttcttaattggcgaattaatgcttttaggacgatgaccgtgtccagaaaagcgaccaatgcatttgggccacatttggtggcgacttggccacactcctctctcatgcgctgtccaccgaggatcggttgtgggcctatttgagctgtgccgctgaggcacttttggacgaagaactgttaaaagagcacaagaaaaaggatggcgaactcatggcattggcgacggacattcagcggagagagggaatggacttgccgaaggatgtgcccgcgatttttgctgaattaagaaatgtgagtggtgagcaaagacaaattgccatgacattgtctaaaatggcactttatggaaagtaaccggtttgattttatcaaaaagtaaaaacaaaagggtgacccttttggtttgcaaaatttaatgtatagtcatgaaaatttactccctggggtttttaatctaaatttaaacaaaaaatcaaaatttgaaaaattcaaaatttcgattaaaccaaaagtgccttttgtttttgataaaattgaaaaacggtagccttttcataagcgcctctaaaaattagttatttttagttggtaatatttgcgtttattgctttagaatgagtctcgtccctattacactctctttgaacatttggctttggagcgatgggacttcgccgtgcgatccatcggcgaatatttcaatgccaaaaaagagggccaaattgctgcggatgaactccgtttctttgttcatcttgtaattctgctcagactcagtggcaaatgtttcactgatttgccaattttcgacgcgctcatcgaacagtacagcaagttactgcagcaaatgcgactcattaccatcgtgccgttttatttgtaccatttgtcaccggaaaagtcaactgaaaagatgcttgacttccttatgagttgttgttcattgaatttgttatttcttaattaacccaattaaactcagaactcacatttgtctcggaacaaaaggaagtgttggaaaatgcgatgaaaattggtttcgatgtgcccaatttgtgccgcgatgtttacagacgcttcaaagacaaacacaattttgggccaaacgtcgcgagagaggcgcttagaaaagcggcggaagagctaattttggcatggaaatggttggcattttgcgaaactgaaactgtttgggatgccattattgaagcaaattttctgttgcgtaaattcttttgtgagtttttcttaacagaaataatttgaattgtgagtgtttcgtcatttcaattttattagattattgattttgttaattttacgatttgcttttatttagtgtacggtttaatgtcggaagcacttcaattgatgcaattggcacccgaaaagctgcccgaaattgctttgagaacattccaaacggaatttccggacaaagaaattcccaccaaattaaaagacgcgcaacgcgaattcgactgttaccaactttattttgtcagttgaatggaattggcatgcatttgccaaataaa

SEQ ID NO: 81707 - DNA, 790 bp, Heterodera glycines
atgtgtcgcaaatacaatgaaaaatgggctgaagaacacaacgatttgacatgcgaacagttcgccaaacaaaaaaacgtgaaggatattttaggtatttgtgtgttacgcatttttgtatgtaaaattagtcttaaaaaagaacaaaataaaatttttctaaattttttacgtttttatcatataaaaaacaactcgggaaaatataaataactaaaaaattaattatataattaatttaaaaatttaaaaatatgtagatgcaatcaaatttagagacaaacagaaaacagaagaagaaatcaaaaaaagagaatatgccaaatgtccgggatgtaaaactcatgtcgagagaattgaaggatgcaaatttgtaatttgggaggattatttttaaatttaattttttaaattaattttatttttcattttttaaattgtaagttgaaatgtcgctgcggtacctgtttttggtattgttctggagagaaagctgatccgaaggctttgaaatcgtgctggggcgtttcataaaatccgccattttagtgagtttttcgacaaaacatggcataactttgcttaaaggcaatcaatttttacattcgttttggtaccattcaatagccaagcttttttgggatttttatttaccgatttttaaaatttcgagttattagcatctattttctaggtttttatttttaaaacataaaaaaacctaaaaattttgaacaaaactattttaacctggtttcgcgttttgtgtaaaattatttacaaaaatgca

SEQ ID NO: 81708 - DNA, 749 bp, Heterodera glycines
atgggagcattgaaagcggtgattaatattatattaattaattatttataggcataaaaataggcaattaattttttttattaacgctttttaggtaacaaaacacataaaaacttaattaaaaagacttaattttggtcatatttcacttaaatgaaattattaaatatttcaatttttttgaataaggacattaaggacatttttaaacaaaaaaaatcattgacaagaaaaaaataaataggtttttgggaatcaatttttctggaaaatttttcaattcttatggctggcaattgcctaaaaatggaaaccttactaaataaatcaatttgaattgttttaattttctatttctaattttagtcattttcgattgcttcttatcgtgtcaattttataattttcgtttgcttttgttcgtcgtcttttgctgatgactcaatttttgaattgaacaacaaattcactggagaaaaattagcaatgaaaaagattaacaacgatggatgctttttgctggtccgttgtcccatttcgcgatatgaaaacaaatggacgaaatgggaagaggaggcgattgagctgaacatttgtggccaatggagcaaaattgacattggcattaatgaggagggaatcggagacgggtgcgtaattcgagtacataattaactgaatattttattttaattagccttctctatgaaactctcgacccaatcgatcagcagaaataattcaataaa

SEQ ID NO: 81709 - DNA, 1690 bp, Heterodera glycines
atggcaggtcatgtgctgattgtggagcgaatttgcgcaacaatttacgttagtacttacgagcagtacagtagctggaaatttacgatcgtttggcttttcattatggtaagatagttggtttagcaataattttcattattataaattaattttgttgttaaaagatacaaagtagacattattactgaatcttagagctcaacatccgagaccattgaccttgaaaaagcatagaaaaattattacaaattaaaattttacttacatttttaaaaataaattaaagataatttattaaatattcttcctattaattttataattattgtatagattaccacttctttggcggtgacaatttgtcaaatcagcgtatcaaattccttttataaattatcttatattgctattgttctttattttggcgcaactattgccagtttgattgaaatttttgtaagaaatatgaaaatttaattattaattatttataataataataaaaaatgcaatttcaggctctttcaatgatcacaaaaattaaccaaaaattgtttaattcacgtgttggtggtggcacaaatcagcaactctctgttcgatatcaggtaaattaaaaaattaattaactttggtaaattttttggtttcctagatttcgaaattgcttaaaaaatcaaaataatattttatttggacctgagatgccaagaaattttcaaaaaatgttttcattctttttgattaattgaaaagggaataagccaaaaatacattttgcatttcaatttagttaaatgaaaatattcggacgggccgacaattggcacccaattttttgtgccattttatcaccgtttttattacatttattgtgacaatgaattcccagtttggtattataacaaatattgaaccaatgaccatgttttaccaagttttgtttctttcacatgctttcaatgaccttgcgcttcccgttgcaatgctttggtatattaattaattaattaatcaattttattattttttaacaagtgtttggcaaattaaattagtaaattttcagtatcaaatagcaatcattttttaaatgaaataataatttgtgagaatagcattaaatattattttaaaaacatttagaattaataatgttaaatttattttttaatttagttatcatccattactgaacagaaaagccaaggcgtcattagcgaccattaaacaattgttgagaaattcgtccaccgtttcgccacaagaagaaacggcacaaccattggacaccgacggaaggccaattagtgaacgaattcaacaagaaaatcaggacaacgaagcgtactttaaacaattggcctcagcttggggcgacagagcatgaacatgtaatttctgggtacagcaaaaatgcctgagcagaagagcactggcgggcggacgaacgcagaaatgagcattttttgaaaaatgacgtcatcgatcttattaatttttgacacctaataagcgataaataattatctctctcatccttttttcagcttgtaaaactttcccattaacctattaattatgcttctggttgagaaacattaaggggaaatcaataatcgtcaaatgttacagaaaatttttaaaaaaccaaagttgaggaagcgcttgaaattgatgcattaaa

SEQ ID NO: 81710 - DNA, 198 bp, Heterodera glycines
tgtttctcaaccagaagcataattaataggttaatgggaaagttttacaagctgaaaaaaggatgagagagataattatttatcgcttattaggtgtcaaaaattaataagatcgatgacgtcatttttcaaaaaatgctcatttctgcgttcgtccgcccgccagtgctcttctgctcaggcatttttgctgtaccc

SEQ ID NO: 81711 - DNA, 312 bp, Heterodera glycines
atggcttcagcttcagccaggattcgtgggaggacgaggcggccatccgcgcggtaagaaatcattaataatttaattattatataaataaataaaaaccaaataaattccagcaagcgccattgatatatgcggcgtgggaggccgcccacgacgcggggcacacaccggaacacggcactgtcttcccattgcggccggcgccgtggatgaccaacgttcgagtgcagagggatttgggagaggccgaaagggcctatcccgggcggcgcacggcggtgcgacaaatttttggtaaaatgaatttaaaaa

SEQ ID NO: 81712 - DNA, 817 bp, Heterodera glycines
atgttcggcatcaccatcgacccggagcagatggcagtgaacaaaggaaagcgttcaatcgccaagctatgcttgaataacctttgtgagtgtcttaatcggcttatgcctagtttgagctcattattttaagggggccgtttttctttgcgaaactttggcctggcccaaacggtgatcacagatgaccctgcagttttggctgagtacttggacaacaaatccatcgatgtgatgtccatcgacgaactgaatgagacaacgattctgatcagttacatgcagaaaaaggaatgggttgaagaacatgaatgtaaaatattggtgagagacaattaaattgaaattttaattgaaatttaaaattttcagttatttctctttggacaacatctgcagctcggcttctccttttgagagcgatgcaaatggttggtcgaacaccagaatgcagacttttgtatacggacacggactcgctcatatttgctcatctcattgcaaattgccctctacaaacaggtccacacctcggtcaattcacggacgaatatcccgaccatgaaattgttgagtactgcagtgggggaaccaaacaggtagtaaaacaaattaataaaacaatttaaatgttaattttaagtacggtctaaaactcaaaagaaatggatcagtggaacatgcgttggtttctgctgctgctgttgttggtgctggcgcatcaatcaatgcctccctccttccaccaatggcaccgccgccgcatctccctctgtcaatggcaccgccgccgcttcagtcccggcattcgcgtcca

SEQ ID NO: 81713 - DNA, 427 bp, Heterodera glycines
gaaattcagatgcctaacctgtgcctggatatttgagctggacttggatctatggaaaaaaccagccctggatcctagtctaggtagaattctaatttacagtaatgtttagatattatttatgtacaacaaatccacaaacccctttggctcttcggctttcgtcgtttctggaggaaaaaaaatattcgatatttttgtgtgtgtgaaattaaataagtttatttttttgaacttatcgtaaaactggcggaacgggccaactccgtctggccaactccgtctgagccaactttgagtcaatataactcttgaagttattgaccgaatcaaacaatcttgatatcattcgaaagctcttcacaggctctattagcctactaaaaattacagaaaatttcgaactataaaaaaagatagaaataaa

SEQ ID NO: 81714 - DNA, 309 bp, Heterodera glycines
aatcatggtatcataggaaagccctagatgtttagaagatatttataaggtatttctcagtgattaatcagctctcaaaatagttgtcagtttaaaaccgcaaaaaaggcagaattttcaaagttttttatttctatctttttttatagttcgaaattttctgtaatttttagtaggctaatagagcctgtgaagagctttcgaatgatatcaagattgtttgattcggtcaataacttcaagagttatattgactcaaagttggctcagacggagttggccagacggagttggcccgttccgccagtt

SEQ ID NO: 81715 - DNA, 1586 bp, Heterodera glycines; identical to SEQ ID NO: 17246
  unsure (1)..(1586): unsure at all n locations

SEQ ID NO: 81716 - DNA, 1115 bp, Heterodera glycines
atgtggaggtaattaccgcttaaatttcgattgttttaatgtaccaaaaaaaattattgtagtaatatctgtcaacttaaaacagaaatttccgtggacaagtatgcaggtgaaatgcgtaacaagggaattgtttgtaaacctccggtgcgtgtctctatttgctggtttacgtccgtgaacaaggtcttggaggttttgcacaaggaagctctgaacggcggcgttaagttctgtctcattggtcatgcgaaaggctctgagggtgatgacgtgcatggtaccatttattagccgttgtaaaattaggcccctgattgtgagtttcttatttagctacgatcaaggcgtttgaacaacagactgaaattgtcactcaagcaattacgtttgacgttctcaaggatgtgctcgataaaggcagcccattgactgttgcgaattgcattcacaaaacgaacgtgaaaatgggcggtctaaattatgctcttcatgtggatgatccatcgtgcgtcttttttccccttttttatatagtcaatacaattcattttagtgttgccgaattgttcgacggtcaaacactgtttcttggttttgcaatgaacttcccggatggattcgctccttccgaatctgctgcccctatcaacggtgtgaatggtgctgtgccttcaggaagtaaagctggaccaacgctgcctcctcctcctttgtgcattggggtaataaaaaggagaggagctcattaactcaattttgaaggagtaagtcaatttcaaaaatttcagtgggccgcgacaatcggaaaacgacacaaggatgaatacattggtgactttgtctactaccccccgcaccaatcgaagaaaaatgatgttattggaagcgttgtcaggagatgcattgagtccttcaaaaaaaacaggaacaaaatactgtaagttttggacaatttgcattttatttgttgcaatgattgcttagacaacgcgtggtcattttgcgcaacagatgtaccgagggacaattcgaagatgtcatgaagtaatttttcaaaatgatgaaattatttgaaaatttctattaaaatagtgaaactgggctcttcgaaa

SEQ ID NO: 81717 - DNA, 527 bp, Heterodera glycines
atgcatgacattgcattagacgagaacatggctcccggcaactatgtgtatccgtcttatgaggagggaggagacagacaacggcaatcccaacaacagcttcaaggacaccatccgtcgtatgaatccaacgaaaccctacgacaacagcaacaagtaatgaacccagacttgcacagaattgcagaagtcggtctaaaaaggcattggttgtgtggacaaatacggttattggcattttcaggaagtcggcgacgattgggattcgttggagtcgttcagtttcgaaatgctcggttttggcgccggtcggcaaatggaagcaccgccacgacagaacaacgcgtctggtgccgttggtcattcgccaaaaccgccgtcgtgacggcaaatgtgcgtattcgttttttggcagatgtaaaagggcattacgagttcatgctattttctccaatggtgtttttctgcaattgttccccatcttgtaaatctcgtgttccggctgaattttgttttttgttaataaa

SEQ ID NO: 81718 - DNA, 2315 bp, Heterodera glycines
  unsure (1)..(2315): unsure at all n locations
ttgtccgacagctgcggtcattgcacaacagtcgcccccaaatgctgagcccgattcgctgttcgcccagcaaagcgtcgcgggcgaagacattccgtggtggcaaaggtcggtcgggagtgagtctcggccctttggtggtagtcagtctcggcattttggatccggggaattgggattttttcttggcattttgacaaccactttttgcatgtgtttttacctgcaaatcccctcacaaaaaaggaattttctgctgcaacagcccactttggtgaacgcttggaatgccgtctttcccaccgttgtcgtcaacattttcggcattgtcattttcctccgtatgggttggatcgtcgtgcgtttgcctttgattcggtgccattggttctgccgttctcccatttgtccagggcactgccggtctcttccaggcatttgttgttctcgccctgtgcacccttttctcctcagtgactgtcctttccgccattggaatttgtgagcgatgtcaggtgagcatcggctgatcggcacaaaaaacacagaattgggtgattgaattgggctgatcagcattctcaaaactgatcggaatgaccgcccaattggttgtccttacccttccgcaaatattcctttctttctttttttcgtccattcacttttctctctgcgtttctccaacccaattgttttcctgcgcttagattcgcagtggtggcatttactttttggtttcccatgtgctcggaaaacgaatcggtggtgccgttggcctcatttacacctttggtcaagcatgcgcaactgcactggtcgcgctgggctttggcgagtccatggccaaattggccggcattttcagccccgtggccatcaaaactctctctgtgttggtgctggtcgttctcaacggtcggtcggttgttaaacggacgggcacaacctcgccttgaggcgtttaatttttaaaagctcttcgattgcgtagttacggtaaatacagtaattctcggcatttctctcattagcaatgaatttcgctgggcttcgcttcatcatccgtcttcagctgcttctgatgtgctttctggcaatagccattggcgatttccttcttggcgccgttctcttcactccattggactcaggtattttacccttcgaattctcggaagaaaataatttggcactccttaagaggccggcatcggcgaaatgagtgccgaaagactgtcgctgaattggcactcccattacggcccggccaattgcacgccgttctccgaattatcggcaaatgagtgaacgaatcacagcgaaaaaggaaaagaaccgaactcaattcagagaacaccaaaacaacgcaatggctcttcttggccaggagagtttcttcagtgtttttggcattttgttcgccaatttcatcggagttttggccggtttttcgtcacagaattcacttttaccgtttctctttcgtaaaaggagtgaatatgagcggcaatttggtggaccctctgagaaacattgccgagggcgaactcagtgctttggggtgagcgattcgatttgattcaattgatttattgtttatttgattccttttgatctcagagcaagcttcgccctctgctttctgatcatgcttatcctcggcgcttccgtcgatcggtgagtttagtaactaatcaccacaattatcagttgccctttgcctcactttccttccattttggccactctttgctttgcgatgttatgatttcggaacgactttcgctcaccaaacttttgttcctcggcggcctttacatcgcttgtctctccgccattctctcctccaccctcggcacttctcgcgttgtgcagggcatcgcctccgaagggctcattccacagctgagcaaattgcttcaggaggtggcaaattggccgagggggggggggggcagatcgccaaggagcagcaaaatacaaacaaatttgactaatggctaatcgtatgacaaatgactcccatccgttgcattattcggcatttccaattggctcttttctcgaaggattcgccctccaaagaccctctaaaggccaccgttttggtcactgcggtcgctgtgctgctcgttctactcggaaacctcaaccaaatggccattctctcctccatgccctttctgctcacttatgccttcgtaaattattcttacgtttcgttggcaatgagcgacgatttggactcattgggccgcgaaagcacgcaaaagtgagcaaaacgganaaggggggggggaaagaaaaaaaaa

SEQ ID NO: 81719 - DNA, 664 bp, Heterodera glycines
atggaaaaagtctcatactattattattattattgtgaaaaatcgaatttgaaagagctaatgacattaaatttaggcaaaagtaattatcgcgatcaaaaaagagtataatgcattaaatcaacgggaaaaataacactttttatatgcattcaataattacctgctgattttaaaaaagttaaataaaacatgtaaaatttatctatgctaatgattgttattcgacagatccctcaccattatataaatacaactgcataatatacaattacaataacattatgtttatttgcttttgcacaaaaataaccggtttcgaaaaagtgaataaaatttgattttatccaataaaaaataaaatttatacatattcctttgttcgagaacttaaatggaaaaatgctaaggactaatagaaataaatttatttaaatatgacgaattatccctaaaaaatttcatacaaatatcagttatgctaatttcaggaggtccattatcattatacaataaaaatacaactgcatattatacaatcattttcgactaattaacagtatttaaaattttattttttattttaatgggttttaacctacgataaattatttctactcattacagcaaaaacacttgaaacaaaatagttaaggctaataaa

SEQ ID NO: 81720 - DNA, 115 bp, Heterodera glycines
atggacaaacgaagaaacgaacgcccgaaaataatgggagagaaaaacaaaaaaaaaaagagtacagcagcaagagaagaaaaggacgaagatagagcggaggaagagaggaaaa

SEQ ID NO: 81721 - DNA, 648 bp, Heterodera glycines
  unsure (1)..(648): unsure at all n locations
atggactattttcgtttttcaattcattttttggtattgcggcaacgaattccattgtcagaaattgtgccgatgagaaatttgagcaataaggaaatattaaccgaattggtggaattgcttttgctgaaaaagagccaaaagaatagagaagaacaaacaaatgggcaaaaagaggataaaaaaggcaaaaaaggagacaaaaatggagaaaaaagaaacaaaaatggggaaaaaggaaataaaaatggagaaaatagcaaatcgggaaaaaagaaaaatgctgataaagccaaagagagtcgattgttaaggcttatgaatacaatggtgaacaatttaaatggcacggcaaacttaagaaagggaggtaaggacaaattcttagaatttaagaagcaattaatttgtgtgctaatgatttatcaaattcttttcttgtttgttttttgagatgatcaacggaaacggagaaaaaagcgaatgcccgacaatttattacgttttatattgaatttgttattcgtcggcataatcttttgcctggtgatgatgctaattntcatgtcnggagaagcgatggttttgacgggaaggaatttgaaagcaaattttgaggaacaaacaagtaatcaaaacgagaattaa

SEQ ID NO: 81722 - DNA, 345 bp, Heterodera glycines
tggggttggcatgatgcctatgttgcaccaaaacatgggagcaatgggcatgggcatgatgaatgttggcagtaccagtttcggcaatttgcaacaatccaatatggttcagtttcaaaaggcgatcggggaagacattgtcggggatatcctggagaaatattttaaaaattgttgtggacatttttcattaaatgaaaaaatcgggaggggcccggcagtgccgaaatgcgtcgccttgggaaaaatagaaaattttcatgtttttagccgaaattaaacaaagaattttcgtgcttattcgctaaacgatagtcgctgaacaaattaagaaattataaaaaa

SEQ ID NO: 81723 - DNA, 387 bp, Heterodera glycines
atgaaattttgcgtattacaatccccgaaaatccattttacatttgccaagaaaccaaaaaaacacattcatgttcctaaaattcagacattggcccgttcgatattcattgacgcgctctatggacgagcatttctgttggcagtgttgttatttgggaagttggaacgtctgtattggtctgcatcagaaaaatggccgaaatggcagaaggcaccaactgataaaaccaaagaattgagtgatgcgttcaacgacgcatcacgtctgttcctgttgcatggccctgttcagctgtgggaaatcagtcaagtgtacagtgatgccatccaaaaattcataacggaagaaagacgaaaattcacaaaagcaaaatcggaagtataa

SEQ ID NO: 81724 - DNA, 684 bp, Heterodera glycines
atggtagtcttgatgttgcttaaagccatgataattattgttttaatatgctatgtgattagtaatgacaaagaaaaggataaagcccatacgagcattggtaatagtaaagctcataaatctgatctatattctgataaatctaatcttcaacctgatgatgctcaaattaatcaacaacatcttaatgctaatcgagatagtaacaaattcgatcataatcataataatggaactaataccaattatgatgctaatcaacatgaccaacatcatcatgctaatggagttgatggtgattcggatgataatcagcttgatcagctttatgcaaatcaccaactcgttcaattacatgcaaatgggaacaatgatcaccccgaaaatgacaatcttgatgataacaataacagtgataagtcaaaaatagttgaccttgacgatgaattttgggatcagttgcctgagctcaccaaattgccagaattaaatggagtagagtttgttgggaatcatataaaatacaccaatcaaccaaaaagcgacacgcataaagacaaggaaattaataacagtaaaagaaccttatcttagagaaatttaataatttaattaagtttcggtaaagatggacggaacacagcagaaatcaatttgacattgaaaaggcaagaaaatagctga

SEQ ID NO: 81725 - DNA, 1185 bp, Heterodera glycines
  unsure (1)..(1185): unsure at all n locations
atggccgcagacattgttccgttccatcgacgaccattcgcgttgaccatcgaggatgaatgtctgctttacgcggacagagttgtgattccggcatcgcttcaaaaagatgtcctacaacttctgcatcgaggccatcccggaatgaagcgaatgaaaggtctcgccaggcagtacgtttactggcctgggatggacgaacaaattgagaattttgtcaaaatgtgcaacgaatgcacaatggaagcaaaagcgccggtgaagactgagcttcactcgtggccaaaatctgacggaccatggaaacgcgtacatttggactacgccggaccgtttatgggaaaaatgtttctcataattgtcgatgcatactcgaagtggcctgaggtcttcgaaatgcgttcatcgaattccgcggctacaatcgacaaattgcgatcactctgtgccagttatggccttcccgaaattttagtcacggacaacggcacacaattcgcttcaaaagaatttaaggaatttgtgaccgaaaatggcatcaaccatctgttctccgctccgtacaatcacatgtcgaacggacaagccgagcgttttgtcgatacgttcaagaggacatgccggaagatcaagggagaaggagcctcggaaatgttgaccacatttttggcaacataccggaccacgccttgtgaggctttgccggagtgcaaaagtccggccgaattgttcctgggaaggaaaccgcgcacgactttggacttgttgaggccaaagccaaaggcaccgataattcgagacgaggccatggagaagcaatttaataggcgccatggagccaaaccgagatcttttgccgtgggcgataaggttctcgctcggcatcgtctttctcagccttggcgccccggaaaagtcaccaaatgtaaaggtgtcatttacgacgtcgaattttttgacggaaaattcggacggttccatgccaatcagttgcttgtgagaagcactgacgaaaacggcacaaatgcattgaacgtgttcaatgatgcgtttgatttgccattggcaccaccgctggttcagcatggtggacaagcgcaattgcctgtagtggcacccgctgctgtcatcgcaccagccgtggctgaagaacccgtcgtggnagaagctgatcgagcgcccgaa

SEQ ID NO: 81726 - DNA, 818 bp, Heterodera glycines
  unsure (1)..(818): unsure at all n locations
atgaaatatttggcctgggacgaaaaatcggaggaaaatggagggaatgaaactgatcaaaatggaacaattggacaaaaggatggccaaaatgtgacaaaaaatgatcaaatttttgatgaaaatttggaaatgaaggaagaaagtgcaagaaattgtgatcaattggaacaaatgcatttttcaaatgcaattgacaaaaagaaaagagaaattgtgaaaaaatttcatagaattaaagagaaaattaagcaaattggaaagaaatattcaaagaaagaatggcaaaaaattgaaagaaaaattgcaaaaaaattgngagtaaatcaaaggaaaatttacaaatggaaaagagaatttggaatgatgaagaacaaaaattattcagttgaagaaaaaagaataatgtacttcagcaaatttgatcaaatatatgcaaaattaaaaatgaaattacatgaaaaattggagggaaaaagagaaaaatgcaaaaaaataatagcaaaacatttgggcatacatatcaaaacaattttttattggaagaaacaattaaaagttggaaaatattttataaatcaaaaaaatgatgatgaaaaaacggaaattgttgaaaaatatttagaaataaaaaataaatttatgaaaaatggaaaacgaaaagattggaacgaatttacagcaaaaattaaacaaatctttggtgtgcataataaaacaattgaaagatgggccaataaaattggaattaatcaaaagccgctaagcgatcctcatagtttaggaatatgagaatttggaaatgaacaaataattaa

SEQ ID NO: 81727 - DNA, 799 bp, Heterodera glycines
atggaaggtacaaatggagggttaaatatggtacaaaatgagggggcgaggggcacaatcatatggaaaattgttagtaaataagagtgattaatcgttaaataagccaaaaattggcacaaataatggtgattaataaaaaatggttaaaaatccaattctttccaattcgttcgtcacagcggtgacaaaacataaataaataataattagaatttccccaaaaattaataaccataattttagggttcggcagtgccgacagacatcgccaagaaaacaaagtggaagagaaagtggaagaggaacagaaagtggaagaggaacagaaagagaaagcggaagaggaacagaaaggggaacaggaagaggaacagaaagaggaagaggaacagaaagtggaagagaaagtggaacagaaaatggaagagaaagtggaacagaaaatggaagaggaacagaaagtggaagaggaacagaaagagaaagcggaagaggaacagaaaggggaacaggaagaggaacagaaagaggaagaggaacagaaagtggaagaggaacagaaagtggaagaggaagtggaagacgaacagaaagtggaagagaaagtgaaagtggaagagaaagtggaagaggaagagaaagtggagaggaacagaaagtggaagaggaacagaaagtggaagagaaagtggaagaggaacagaaagtgtaagaggaatagaaagtggaagaggaacagaaagtggaagaggaagataaagttaaatagctaagctatttcaattaaaaaaataaa

SEQ ID NO: 81728 - DNA, 503 bp, Heterodera glycines
atgatggctgctgcaacacaatcagcaacggtgggttcaacaccggcgccacctgtacaacaccacgtctcattcatcacgccattgatggccaacaataatgggacaaaagcaatgattgatgataacatgctggtggcagtggtgggcgaccatggcgaggtgggttaattcacgacaactgcgtggtgtactgcttggagttgtcgagtgcattttatatccccatgacgatatttacagggtggcagcggcggcgccgtcggatgctttgaagagccggcggacaagcggtcgcggcacgcgtcgcgcgactcgtgcggcagcgtcaacgatcaggagatcaagcagcttctgacctcgcgccaacaacagcaacaacaacaacaacaattggccgagaaaaaacaacttcaacaacaccagcaactaccgtatgcgtcgtctaccgtaggcgtggttgttcaccaccaacaacagcagcagccaaaaacttttccgag

SEQ ID NO: 81729 - DNA, 3158 bp, Heterodera glycines
atggctgctgctactgctgtgaattgtgccggtgccgtccaccaacagttgctcctgcttgatgtttatgccgccgctgaagttactgtttttccgactgttgttgttgctccgctcgtcgccggtgccaccggcgccgcttcggctgccgttgttcagtcgtcgccgcagttccgttaccgtagtggtggtacagttactggaactgttgttgttgatgtgagtggtggacgatgccgaaatggccaccggttttggcaaccctattatacaaacagaattcattttttgtcgaaaaactgtggtggggttttttaacttttttggtgccccgggactgatgtgtccgtgccaaaatgcactgaataatttgatgccaaaaagttgcccccccccaaaatgtgacacttttctaaattaattactgttcttctaactcaagtaaattaaatattttcaatttgtggggaaatgattttaaaaaacgtgtccaattttgggggtttttgagccatacataatttcttttgcaattaaatgaaatttttgaatttgtaggctaataaaggaaaaaaacatattatcagttaattaatggtgaaataatacctacgaggggaacttataaacagagcgaaaatatttaccaattaattgcccaatgcgattgtaaaattgttaaaaaaagattttcttggcaaaatgccctcgagaagggacagaatgcgtgcgattgggggaaaaacaatttttggcgaaatgccacctgctgttgacaatgaaccgactaattggttgattgaggtgacgaaaatgtgaattatcattacaaattgcttacttgtctaatgaggcaattatgggtgtgtgtgatggtttaaaccaacattttttggcgaagtgccctgggggaggggggggggggggacgcgcgttaataggaggaggcaggcaaaattaattagccaattaacagatgttagttattgccccgagagggcgcctcaggcaataataacgaacaaaaataaatttaatataaaaaacagcacattttgggttaaacggtccagcagcaggtgcactatgtttcacgcccgggagcaggtcgttcccccccccccccgtcgtttcccctcccgaaaaattttttttttaaatttttttcaaacctagaaattttttcataaaaaaaatcgctgaaaaatttttcaaagaatttttttcttgaaattttcttactaagaaattttctaagaatttttttatgaaaaaatttctaggtttgaaaaaaaattttggggggggaaacgacggggggggggttttttttttgccggcccggccgagtcggacagtgccgccgactcagtccctccggcagccatcgatttggaggcgcctcgtcggaagctcaatgctcggccattgccgaacagcagctgctgtactcggtggtcaatttcgatggatgtgcttaatttgcttcaatgagggacaaaggagcgaatcattcggaaattgaaccgaccgagcgccgctttcgcaatctttgacatttcgcatcagcgattcgctatgctttttggactgcaaaaccctaaatgatttcagtcagcattaataggcaataaaatggtttgctttgagcagggaaaaagcgacggaagcgtttccttaattaggcgattaggagcgaaatgcgtttgaccgaagttacccagcaaagcaccaccccgggccgttccatccgaagcacccacgggagccaatacagcagcagggcgcgggcctgacaaacagagaaatcggccgtccgttcatttcccaattttcatttcaaagtgccattccctcccccgtgccagttccaaaatttacctttctttgttcccaattcatttctcccacctttgttcccatttcgtgtgtttcgggcgtccgatagtgcaaattcagcacataaacagtgaaaacggtggatgctgtgacgatgagcatgcaactcgagaagaaaaggccgaggaggggcaccgcctcggaagtcggcggagacatttcggaaagaatggagagaaagaagcaaatggacaacaggacggtgatctcttaaatactgtcattcttttgagtagccaacaccaatttagccataatttgccaattactctttccctttgatcactcctcagtttggccacccgccaagggtttagccggaggcatttcccgagaagtggggctgtcatgggacgccttcttcccccattcattttcgcacttacgaagtgttattttctcccccgcttcaggtggtaaggtgaagccgagaagggacattgtcgtggtgagaaggcacggcattatcaagttaaagccgtagtaaagagtccgtctgaaatgtcaacgaatgggcttaaatggtcgactttggcattggtcaccttcgcatgtgtaaaaagaaagtcaagtcggggtaaggctcgttaggacaacaatcgtaaaatttctcagttctggctaccgtagtcactgtaatttccggaaaagtatggcattttaacaaaatcaaattgacttggcaaagcccattctccgtttggcaaatattcgctggtgtcgaagccgccttccgcaggttgcaaatcgacgtaaaagcctggcaaaaaaaggaaagttaaccaaggatggattggagaatggacggcggacgaacctgaatatgtccaagagccgaatttgaagaagcaacgctgctcatcaaaagggaacctaagaggagaaaagagagtgcggggaagagagagaaagagtaggagagagagactgaaatgggacatagagggagagagagagaaagtgaggcccaattggaaggaaacaccgtccatggccagccgacaaacgaaccaagtgatgtcgattttgcagctgattttaaagatgcccgggggaacccaagacacatttccatcattgtacacgatcatatttgtggggaaagtcgagtcgaaactggcgtccacagaattgtacaacagaacatcgggcctccaaattttgccaacgggaaatcggacattgctacaagaaaaaacgcgaaagattggagaacccgcggagaatgggacaaccgaccttatgttaccgtactctga

SEQ ID NO: 81730 - DNA, 1891 bp, Heterodera glycines
atgccatatgacccgagggcacgggaagagagttgttggcacgaggacagtgttgaggacagattcggccgatatcccttcagaaagtacccgtaagtacttggctgacagagggtaattagatctaattggctttacttaccaggaatgagaatccagcaaagattatggactctgttctcgatgcaattggacacacgccaatggtcgggcaaagttttggggtgataggcaaatcgaaaaagtcgcaaaaatatttaaatgagatttttatttattttgaagaatatgagagaaattacatttttgaatacaaattttaatcccttttattctttccttcgaaattatttcttcaattaaaattccctaccacgcaaaacaaagctcggcattcaaatgtaataaaatgaaagcgttttatatttataatgtgccattgaatttttatttttacaaaattatttatattgaaataattaaattaaaatacataatttacaattttattgcaactttttggttcaccttgggaaggtccctaacccaatcctgggaattgcgtatttcgacagtcgcacttcaaattgaataggcgtgtcgtgtcgtctttcaaaagtttctaagagttaaatttttccagcaattttttgggcatttcgttccattgagactttttcggttcggcttacaattagcagctttttgcgtgtgttcttccttttctttgatcattgttttttaaaggtaaagcttcagcgaattccggcggaatttggcattgagtgcaatgtttgtgagttttttggcatttctcaattagtgcacaacaacaaaattcaacaatgaatatgagctaaatttctgaaatagagaagaagaaggaaacattcccgagaggaaatcccatggatcaattaaggcgataattgaccctaatgaaatgatcaatcaaattaagctggaactgtagttcattggtaattttatactcattaccaatattttgagacggaaaatgcgaatttttcaatgccggcggttcggtgaaggaccgaattgcgctgaggatgttggaaatagcggagcaaagcggcagactgcgtgccgggatgacagtgattgagcccacctcgggcaacacgggcattggccttgctttggcatgtgccgtcaaaggatatcactgtgttattgtgatgccggagagaatgagccgagagaaggagctgacgctgaaggcactcggggcaaagattgtgcgcaccaaagacaaagcgcggtacgacagcgaacaatcgcacatcggcatggcgttcaaattgagaaaggaaacgcccaattcggtggtgttggaccaggtcaatcgcaacggaacgggtgccaaaaggggagggagcagtcctcggcacttttagtacaaaaacatcgccaaccctttgacacacttcgaaggcaccgcggcagagattctggacgcgttggatggcaaagtggacatggtcgtcgtcggagtcggtacggcagtccaaactcagctttgtgccattcattggccaatgaattgccttaggcactggcggtaccatcacgggcatctctcgcagaatcaaaaaggccaacccgaactgcataatcgttggcgtcgaccccatcgggtccatcctcggcggagaggacgaacacgcaggacataagtacaatgtggagggcatcggatacgattttgtgccgacggtgttggacatggaagatatcgacaaatgggtgagtggcatttcgctgctgtcttatcggacggaattgcaggaaaaagttggggacctggacacttttcaaatggcgcggaaaatccatcggatggagggaattctcagcggaggatcttcag

SEQ ID NO: 81731 - DNA, 1182 bp, Heterodera glycines
atgtgctggcaacaggcacgggacagcaacccggagcgccggttccagtacgagaacaggttcagctggacaatggacaaacaacaccaccagcaacagcagcaacaacaacccgttgaaacagttcaattggtgcagcagcaacaccaacaaccgcagcagcaggagaaatttgtgatggtgtgtgtgttcatttacttgatggcataactaggggacacattggcatagatataaaagattttaaatgccattgaaaagagtcgtgaaacatcgcaaattgaaacggggtcccctcccccctcttatacatgcacaattaaacaccacatacaacggatgatttgacctaaggctgggggttgcatggaaaaatgttttcatacaacatccgccaaagttgctccaacaattagaaccaactattttttgattcttttatttatttatttaaatgattaaaaagcaattttattttagccatgcttcaatcttcgtgccagtgctggtttgccaattggagtgccgcaaatgcaacaatatcatcatcatcaacaacaacaacaacaacagtttgttgcgccatcacaatttgttcttcaacatcagcgtcaggcgtattgtacaaacggtgtgcaaattgttttcatgtttggaaaaacattaatggaaaaagaagaaaaaacttaaccgcaaaatcttcgatttacatcgcttgaattgttcaaaaaatgggagcagcttgtttccatacgccgttccctaccatctcagtcccacaccctcccgcatcgttccgctcccccccccccccgaaaattttttttgattgccggtttagagaatttttgaaaaaaagcttataaaaaattcactaagtttaacagtttaaaaaaaattcgggggagggggtgaaacggcgggtcgggaggaaccggcggggggggggggggcggaacgtagtgcacccaaaaatttggttgacttcctccccctacctttgacatttcaacatgatcgctatttaaaaaaaaacaaattaaatgttcagagcacatatctccggctcatccgataggcattgcaatgccaagtaacaacgttcagttgccggctactggtcctactgtagcccacagtcattatatgctattaccagcaccggcggctcatcatcacact

SEQ ID NO: 81732 - DNA, 1629 bp, Heterodera glycines
atgacgtcaaaggtcggccgggaggagatcatccaactgttcagcaattatggaaaattgttgggcgtcaccgtgttcaaagggtacgcatttgtccaattttcgtacggcaccgaggcggatttgtcggtctccgcactgaatggatacaattggcacggcgcaacactaggtaatgacatttcttttaaatttttaggcctctgtaatcagcagaaattgcctttaattaagattttgggccaatttcctaacaaaaattttgaaaattcttatcgccatcgctaaagtatatatagtacagagtagggttatacgggcccgtatgcccgaccgggtcaaaaccaggacacctgactttttcagtacccgggcccagtaaaaatttgggccatcggacccgagcctggtttttctgtatccggtagtacccggacagttttttttttgccaaaatacccggacccgcttaattctagaagaaaatcagaatgggtgcctccaaaaagcgactacctcgtcgtgttcaaaaaccgtatagaggagattcgctggaattttatttccttttttttgttgtaaaattggcgtttcaatagtgcaaatattaactcggttttcccatttaaaagcattcattttttcacatttgacagatgtgaaattggcaatgcatgggcaacaaccgacgcccggtgtgccgccgcctgcgcaagcgctgaaacccatttttggcgcctttccaattggagctcctacaaaaagcattgtcgggttagaaatcgaataattaaaaaaaaattatggactatgggccttaaaaaaatcaaaaaagtccattttaattgaaaattttcaaataaaaaaaaaattgtgtcgtccccaatttaaggaagcgcaacaaaaatgaacagccacaacaggaggcggctgccaaggacttgaagcgcatgaaaattgacacggccactggtgggacgggcgggggagcagcagcacctgctgggtcggtgaccgaaagcgtgccaaagaatggcgcaaacaaagcattcgctgcgcaaatggacagcgctggcattggcactgttgtgccgccgcatgcgaatgccggtaatggcacggtttgcacaccgccgccccacttacgtccctggagtagggaagcctcgccgcaaagaaaaaaaaaatttttttcgttacctagccttcggcaaaaataattaaggaattttcagggcaacaaaaaaaaatttatttttttttctggacatttccaaattcttatttaattataatacacttaaacaataaattttttattattttttgacaatttttgttttatatttgctgtattttagtcggtgatatttggagggtggggaatacaccgtttccactcatcaaaaaaattgctttattcaactaacttcaaacaaaatttttcagaaattcttgacacattgatttgcggagggtgccgtttcgtgacgcacagtttggccgagtttgtggagcaccgaaagcgtccttgcaaattgccatccaaaataggtcaattgggaaccccagaaattattgaaattgaaatttagacaaattgtagactttttcattgataaaaataaa

SEQ ID NO: 81733 - DNA, 138 bp, Heterodera glycines
atgactactaattttgtttatatgcttaaggaacacccaaaaataactaaggacaagtatcaacaaatttgggagttggaagaaaatccgattgtgatttggcacgatggttcagttcatttcaacagtgttcgattg

SEQ ID NO: 81734 - DNA, 1840 bp, Heterodera glycines
atggatccaggcctggatttttccttgatcaagatccagaccaatcatttttgggctacctgggtttttcctggacctggattttcctgggtttttgtacaggaaactccaggtaaaatatgaaaaaaatccaagtcttggtccaaattaggcacaaaaacctggatttcctgcataattttgcccaggccaggcaattttttggcagctgggtttttcatgggattggatttccctggatttttgttcaagaaatccggtccaggttaaacataaaaatccaggtctaggtccaggttaggcaagaaaaaacctggatttcctggataataatgaagaatttgttatttcgagtgaccatgtttcatttcaattttcaaaaaatagttaaatagattaaaaaaaattattattgttggttatccaggcctgaatccaggccatgaaaatcctggagttttcatggacctgggtttttgtccaggaaatccaggtccaggctttttttctaaatgacgaactctaataatatcctttattttgccaaagtcgttatccggcattcttgtacgtttaaaattactatctcaatcagaaaaatgtgatccaaaaattatttccaatcaaatcattttttaaaaatttttcggcattttaatatcaccaagaattttcaggtggattatcctcagcaagatgacactgatgattcagcagatgatgaaagtgacaaagagaaatatgactttttgtcatggcaaaaaaaattgcgtcaaccgcaacgatcatttaaattgccatcggagagcaaatacaatccgttccaaagatttgatccatttcaaagattgggtccgtttcaaagattaggagtttacggtagtcgaaaggaaatggaaaattatttggacatttttggcaatgaaccgtcctcttccgtgacggcaccgctaattggttccatcaaaaatgcggtaaaaaaatgacgggaatgaaattaattagttaatgaatataattattgttgatataattgcttttaaagcccggaatagggctcgttggtactgagatgggctttttgctcgaactttcttagagaaaaattttggaaaacatctcaaaaaatgcggcaaaatttttccgctcctggccttaaaatttagtttgtaggaaaaagccgtcaggcaacagcatgccaaaaagcccgttttggccaacggagcgccgaacgggacttttccacggctttttaaaacgggcttttcgtaataaatttctttaccaagattgggtattaatcaaatttggcttacaaattagcattaatgttagcatgagagatatttttgagaattacaaaattttcaaaaatttgataaaaaatacgcttaatccaattaaaaaaaatcgacaatttgaaaaggcctaagtctattcgataattctttaagataatacattttttcgaaaatttccgagatgtcagatttgcagaaaacgttattaggtgtacaatttggcaaaaaaaaaattaaattttccaattacctaactgaaaattcgttggatcaataagggcaaaaattcaaaaattaaattccaaataattttttaggagattgatcaacagaacagtgaggacgagaaggggagcagcaccagcacaaagcgtgtaaatccattcctaaagccggatggaagcagctacaacaaagacaaggatgaataaacagaatgccaaacattcgaaggaattgatcaaattcaaaaaaaacgattgtatttatagagccctcacccaacaaatattggcacatgttatgaaatgaattagtta

SEQ ID NO: 81735 - DNA, 1671 bp, Heterodera glycines
atgtctgacaaccgaaacgaagcggagcaaaagatggcgaaagcaatgtaaaattaaaatgccatttttaaaatttcaattttaaattttgttttcctttttttcagctttatctccgccgattgttggctttgtgtgtacgatctgcttccggcttcacaacttggccttggaattgcgatgatcagccaccgttttgacttctacgtggatgaacacttcaagactcgtcgctggaatctgggatcgatgaaaatcaaaatgaagttcgaagcggatggcaccaaggaaatggatgttgtcaatgccaatttggaatcgtttggaattgcgcaaaagccgttgccaaagagagtcgtcggattcaaagccatttcattgaagtgagatagattttgatgcttttttgtttgtaaacacgattccatcatttttcacaggtacttcaacgacaatgtgatcacttttctcggccgttttcgtccaatcttcgccgcccgtccaattaatttgaccatcgatacattcaaggacatggaattgattttgcgcaacatttggccaatgatcgcgacaaacatttgtgccatccaattgtccaccacatttttccgctatttgcgtgaattcgtcccgtcatttctcgacgactgtccatcgcttcgcgttgtcaatgcctattcctatggtttcttcgccgaatttccatgcgatgacagtgccaatgcttcgaatggacaaactctggccaaatggcttttcactccccgttcggacaatgtgccaaaggtgttcaaatgctggttgtacatgaattttcagaattggtcgtcaaggattgaagccttcaaatcggtgatttcgatttgattgttttatttggcatttttatggtctttgtggggttcgttgagaaaattattttggacaatatttcaactcgtttttggcaagttttttggcacacttttaatttggcggcgccaaaatgtcgcgctccaaagtgatcccgaccctctctgggttttcgtgcctcctcccccaaccgtaaattgtcattatcttttattaaccaatttttccctattttaggcttttgccaatgcttcatctccagtcaatttcattgccatcattcactttccgtcgccttttggtttctccgttgtgccatttgatctgatcaacgaattgacccgggagcaattgacgatgaagaagatgaacgatatcaaccgtgttcttctgatccgttgtccgattgtgcgcgacgaaagcaaatgggccaaatgggaagaagaagcgattggatggaactttatggaccagtggaatcggatcgacatttgagatgggtcagtgaatgaataatgcttattcaaatatccaaatttattgcttttcgatttttaggcctcttgacgcaatgatcgatccaagtgatcagaagcagaaatgactgaacgatttgttgagaaatgatctatttaattgatgtggagttggataatgaatttgagcccatctgatgtatataaaattgttgttttgttgcgatgatcacaaattgtattatatatatatatttgcccttaggataaattgactgaaattccaggctcattcttttgacttaatgataaagtcggttgtcactttccctccaataaa

SEQ ID NO: 81736 - DNA, 505 bp, Heterodera glycines
atgggctattatgcaaccgtaagctgtccgatcagagactttgttcgagttgcggttttgctaccaaaaatccaacagatgctgttatccttcgacttgaacttcaagatctaatggataaagaatgccgccaaaatacaacaatgttcaccagcagtgctcaaaagtatcttggccgtaaagcaagcgaaatccggatgatggaacaggacggagacggggaagggttggctaggcttttagattccttcattggaaagaagattgtagccaaaatagctattaaggtattatgctctataataataatcgactaaatttaacttgttcacttaaaaaaaattatcatatcgataatattaaggaaaaagacgccaattggggaggtgaaggcagcagtttgaataaatttgattgggtcgttacttctgttttcgtgcaatcattggagcctgctgaagcgtacgctaatgatgacggtgaacaacagaaaaccgaagaatga

SEQ ID NO: 81737 - DNA, 1017 bp, Heterodera glycines
atggcttctgaaagaaaaaaagcgaaaattacggaaaacatctgtgggcagagacagcctcatccaaaacaaccgaaatgggatttccgttcaattgcatattttgaacaatatccaaccgagtcccaaatggatgaaagtgtgccaacacagcattcggcagctgacattcgtcaaacaggcatgggccaacacagcatatcgacaaatgccgatggtggacaggaacagaaaccgttgtacgaggaaatcaccaatcatatacacaagatggagcgtttctcggtgcaacgccatgtcactgaatttgtgcttaatgctcagcatgaacagccagatgaagcgctacgtcaagcgttacatcaacttgtcaatagagctgtacaaaatgcggaaaagcaaagcggacgctctgtttcaaaattaggaataatggtggctggaaaaggattaaccgatccggtagtgctgcctttgaggcctccagcacaaaacaatattgacgttgtaatggccgagatggacaaacttggccaaagcgagggagacgaaggaggcgttaacaaaaaaactttgctactcagcgagccggtggagatcatcgttacatgtttaactattccggcaggatcggcaccacgattctttccacatcagaattggggctacaatcaaacgcaaataattcatatatccaaccgagacaactattgtctctttcatgctcttgctgcaggccgagcttatcatgattatgaaatttttcgctccagtcgtagtccaccagataaccaagctccactttttgcagctataaagaatagaacagacttttgcaaggattatgaagcgtataaccgtctattatcaaacaccgggcgaatggaatctgtagttgaagatctgatgaagaactcaggcatcattattggccaagattcttatggaattgaccatctgctacctgttcagcaatactgggtaatttttgtctacaattttaatattttgtgctga

SEQ ID NO: 81738 - DNA, 2512 bp, Heterodera glycines
atgaaagaagacgtgaaaatgctaatcgaggcatgtgaaaagtgccaaatgaggaaaatccagccagggcaggccaaatcggctccgagtgtccctatcgaaccatcaaatagcccatttcaaagaattcattgcgacttaatgggtcctttaaagagaaccgaaagagggaatttgtatattttcttggcgattgatagtttttcaaaatgggtcatggccaaagcaatcccggatcagaaagcgaatactgtatcagaaatttttgttgaaattgtggtccatcaacattcaactcctgagattgttgtgactgatcagggaagacagttcacttcgggaatttttaatgatttggcaaaaatatatggttttgagcatgtcactacaacaccatatcatcaacaggctaacggaatggccgaagggacgatgcgtataatggctaatattatttctcaaatggtcaatgaaaaagggaataattgggatgaaattctgccgcacgctattttttcatataatgtttcaatacattcggctaccaaattttcgccattttttatcattaatttacgacagccaaaattaccaactgatcgattacttaaactcccatcccccgatgagcttgtatcagatatttcggtctataccagaattcagactgaaaaagctgctaaagcatgggaaatagtgcgaaatgaaattttaaaagcgcaggaaaggaacagagaagagaatgatcgaataaggaaagcaagtgaaagagaatttgaaatcggtgatttagtgttgtttaaaaaagaagttttaagccataaatttgatcagcgttggctgggaccaatgcgttgtgtaggcgttgaaaaagaaaagaaaaatgtcattttacagtcaattgatggaagagccaaattaagaaaagtacaccaagaaaaagtgaaacattttaatggaccagcaattcttcctctaaggcagtcagatgaaccattaaattgggaaaagtacgtagatgatccgaatttagaacaggaagaaattgaaagtgaaagtggcgaaagtgactgtgaaaaaacgcaagagaatgaaaatgcgcaaccaaaaaacaaaatgggattaaaagtttcaaaatatggctttgagagttctgacgatgagaatgattggaatattgttgcgtttgtaagagaaaaccaaaattctgaggatgatgaaggcccggaagttataatggacagaaaccccgaaatcgaaataatgccaattttcacaatactcgaagtccttattgagggttcatttactgaagtatacaccggatggagagaccccgtaacaatctcattaatctcaagcatacctgaaaacctagtaagggaaaattgggaaatttatgttaatggaaatggctcacgatttgttatggcatggatttttggcgaaagttttgaaattttcattgtcaacgaatttgatcaaattatgttgggaattgatgcgcaaatgttgttgggtgaaagatggcgaataaaaaccgaaaatgaaattgagacatattgggaaatttacttcgatgaaaatggacgcgaattcgaaattcccagaattcctgaaatccttttttcagaaaggaaaacttggaaattgggtatgggccaaactttgtaactctccgagattcagaaggaatgataagtgatcaggatgatttagaggaagtaaatgatttttcaagaacagacattaatgtgataaattatgtaaaaccgtttaaaaatttattggatttttcaaacgaaattgatgaagatgaaggaaatgaagaattagtggaaaatgccggagaaagggagagaaatatgaataattctctagaaattttaggaagaatggaaaacgaacagttgaatgaaaaagggcggctgaataaattggataaaaaacaaaataaaagatatgaaagccattcgtttttcaaggaattggaccgaatgacatcaccggctccattacatttcgaatctttgattgaggacgaagaagaatcactgagacgtttggaaagacgtctgcaggaacagctgaacaaagtgaggcagacgttggcccaagaacaactagaggagagccacgtgaagacaagggaagaaaaatgccttgagcaactgaagcaacaaacggtacagagtacggtaaaccaaaaaggaacggcggaaaaagaagaaaaaagtggagaattatgtaaaaaaagagaaagtgaggccaaaaaagccgaaccggaagcaaaagaccgaaaaacggatgaggaaggacttgtacaagcaaaaatggagaaagagaaaaatacggtggaggatgtgtgtctttaggagatgaagaagaagactctccttatgaagcagcgaaggtattcgagacggggacgtccttttttgagagcgcgggggtgcgagtgaattcacgtcgggaacttgaggaattgacaaaatcccgaaatgaagcaaaa

SEQ ID NO: 81739 - DNA, 391 bp, Heterodera glycines
atgaaaattagacataaatcctactggaaatttgtcaaaatgattaaaaagttaaagacattatgccaaagagatatttttcaaagaaaaatgaacaaaagtgaaggtttttggttgagaccgagtcggaccggatccggtcaaaaattctccggaccggaccggattggcattttcaaaaatgaccggattccggatccggtctctcataatccggtcaatccggtaatccggtcaatctggatttttcccaaaatcgccggaccggattgccggatccagaaaaatccggtaccggatccggtccggctcggtctctaattattatataaaaatttggacaacttttcagaaggaagaccatctttaaagcgcatgaaaattaaataaa

SEQ ID NO: 81740 - DNA, 1059 bp, Heterodera glycines
atgagttctatatggcaaattggtctatttaaaaaaacgtccaagactacagcaatttgtctcgagtgtgaagcaaatgtatattagttttattatgataaaacattcgcttttcataaatttatctctgccctcacttttcttattaaattatgaaatacttttatggaaattgtcttaattattaattatattggggtggaaactaagttctgtcatagctgggagaaattgtttattaaaatttataacaaatcaaaacgaaacccataaatcactcaaagtatctcccctaattctccacaatcttctgccatttttgagattttaaaaatgatctattgattaaatttgtgcagctagacaaaaactagaacagcagaagtgtttttcgtacaaaaaaattacagtaattacaaataatataattttttaaattaaataattgcataatattttatttcatttagatattaattttttgcagtataaggcctaagtctggaaactttttatgaatcatcattttattaagcgaaataagaaagaatttatcatttgcttttatttttaaattataacatttaattagtattgtcattaatttgcttgcaattttaatatttttttcttttatttttataattatatattaatgtttatattatttgattataaattatttgtgtttgaagtcaaaatgattgtttttaataggttaatttattttttatgaaattttttaaattttttaattatttttaattattaaattttgactgggtttttaatgtgaatattaaacaccatttttttatataaatgttttgaataatttgaatttttttttatttggtacatttcttctaaattttatgaaaaatatttttttaaaaatatttttagcaataatattatgaaaacatgatttaatattttgtgtaaaaattttttattggatttttgagcatttaggtttataattttaatttgtttccaagaatgatttataagtttaaatttttttatttatttaattttctgctagaatccctataa

SEQ ID NO: 81741 - DNA, 1420 bp, Heterodera glycines
aggcaaaggaattgcacaaagtgagcgcacttttgcggggccaaagtggactgatgttcaccaatgcgaaggcaaacgaagtgcaaaggtcggcgggggataattccaattttttcgtaaattgatttctttccgtttttggcgggggcgcatttggtggaaaattttttaaaggttctacgaattagaagcatctcccttttttccattttgtttgcatttgccgtcccaatttttaaaacagaaaattttttcacttttttttttactttgcgacgcttttttaaattctttttttttttaaatttcagaggcacttacacagaagagacagtaaatttatagtcagtcgtatgtcctcataattctatgattattcatcttgtagcaaaatttaaaaaatttctgagtaaaaaattttcaaattttttagttttccaatttcgttccggcgaatggaatgcttttgggcccaaaaagcggcaaaaattaaaaaaatcttataaattaaattttctaaggtttttcgccgagcacaccgaggctgagtttgcccaggcgggcgccgtcgcctcggcggacatttcgctgccggccgggccaatgccggcggaattgcacttgcacggcgccatggaaccgcagctgcgcaagttgggcatgcccacacggctggaaaatggtgggcattttgggggaaaatgggacgaacttttaattgcaatggcccaaggttttgaaggtgttcgaatgcaatttgttgctctattgttgcagttaagcgtcctatcaatagccatattttcattttctttggccataacctttctttttcctacttggtcaatccataccaagcacctagcctgggaatttcaagaaaaaatgtttttttgaaaattttaagacaattttcttaacaaaatgttttaaaaaataaattctttttaaaaatttcttataattatgctcatttgtcagatgccgccgtcaagcagaaattttttttttttttgtaaattattttaaattttcatgcaaaagggcgaagaattcccttttatctggcagccatcgccaggcaaaatttttgaaattttcctgcactttgtgcgttgcgtaataatgtgccgtccctttcccctgccatcgacaggtgcgtgccattgagctgttggaggagttcactgtgtgcaaaacgggtgaccaactgtccgcggaccaggcccgcattttgaagcagttcggccatcggttggcccaattccgcgtgcgtctgctcgcccgatggagcaaaaagaagggatttgaacagatagacggaggagcggaagaatgaatgaataattgttgtgttttttcggatggacccatctaccaatttactttgttaaatttgtttttttatttaaattgaatt

SEQ ID NO: 81742 - DNA, 1296 bp, Heterodera glycines
atggctattgataggacgcttaactgcaacaatagagcaacaaattgcattcgaacaccttcaaaaccttgggccattgcaattaaaagttcgtcccattttcccccaaaatgcccaccattttccagccgtgtgggcatgcccaacttgcgcagctgcggttccatggcgccgtgcaagtgcaattccgccggcattggcccggccggcagcgaaatgtccgccgaggcgacggcgcccgcctgggcaaactcagcctcggtgtgctcggcgaaaaaccttagaaaatttaatttataagatttttttaatttttgccgctttttgggcccaaaagcattccattcgccggaacgaaattggaaaactaaaaaatttgaaaattttttactcagaaattttttaaattttgctacaagatgaataatcatagaattatgaggacatacgactgactataaatttactgtctcttctgtgtaagtgcctctgaaatttaaaaaaaaaaagaatttaaaaaagcgtcgcaaagtaaaaaaaaaagtgaaaaaattttctgttttaaaaattgggacggcaaatgcaaacaaaatggaaaaaagggagatgcttctaattcgtagaacctttaaaaaattttccaccaaatgcgcccccgccaaaaacggaaagaaatcaatttacgaaaaaattggaattatcccccgccgacctttgcacttcgtttgccttcgcattggtgaacatcagtccactttggccccgcaaaagtgcgctcactttgtgcaattcctttgcctaaattggggagtgcgttatttttttttaaatttaaatttacttccgaagggggggggaggaaatttctgaaaattgctattattttttttatcattcaaaaatcactctttttgttacaactttcaatttattgcccaatatgaaaatgtccttaagagaaagtgggaattttttgcgtaatttattttgaaaaatttttgcattaaacagatgcacgaccattagtttagagggagggcgggagaggcacgaattttaaacaaaatgctaattaattttttctggcatgtgtcaaaatttttcaaaatttataaaaacaaaatgagtctaatttaggatttttagggttttcggggtcgctgaatacgaatataccctttatattaccccttgcctaaccttaggcccatctgaataataaaaaactcaaattcgagacttggacatttcgtgggtcagcgtcagataaaccaaaaaaaaaaaaaaatctgccaa

SEQ ID NO: 81743 - DNA, 627 bp, Heterodera glycines
atggaaaagagattgaatccatctgcacttcctacgcttatgttatcgaatttcggtggttattcggtggagacactttgcacgcttgggaaggagttcgtattggaacttatgactcggatgattaggtaagtcgtcacttacagtttaatagctaaatttatttttcatactcttattgaatttggaattcggtcccacccttggagaaagattaccgataaccaagcaattaattttaaatcttttcagcattgtgagcactttaaaaatggatattaaaggagacaataaaaaagtaaattttaattttgatttaaaattcatttgcctttcaaggatctagacattgttcgaattcaacttgattattctcgtctcatttttctctgtcttactgaggttttctcattttgtacactgatatttctacattgaaaatcgtttttattaggtccgtcttcgcatcgatttaaaacttgctgagggaattggagagaatcagaatttgaaagatgttcgtccttctgatgaacggctgttggagctcctttcagagccgaatcaaccggaagaaaatgcgaaaaaggcaaatttggcagagagattcgaacaaaacagaaagga

SEQ ID NO: 81744 - DNA, 133 bp, Heterodera glycines
aatcaacaattttcctgtttttttcccaagggttgtcgccaataacgtggagcagccggccaaccgtgccaagcggttcacctcctttggctcattgtccaccattgggggccgcgttggatgtgttgtgtcg

SEQ ID NO: 81745 - DNA, 304 bp, Heterodera glycines; identical to SEQ ID NO: 51570

SEQ ID NO: 81746 - DNA, 304 bp, Heterodera glycines; identical to SEQ ID NO: 51570

SEQ ID NO: 81747 - DNA, 1419 bp, Heterodera glycines
atggccgatgatgatttggaaattaaatttaagaatcttcaggggaaagtcagggacttggaagataaattaatgggccataaaataataaatgtaccatcggggattaaaatgcctaaatttgatgggaacggtgacttttataaatttttgagggaatttaatatgtatgccactgcggcggggtggcatccgccggaatgtgtgcgattatttcctctcttcctagaaggggaagcaaaggaaatataccagaacattccaggggatgaaaaaaagaattggcgaaatttaactgaaaaaatggcagatcagacaaagcgtctggacggaccaatgtgggcacgccgaatgttggcaaaaataaaaatgggaaaagaaacggtaacagaatttgcaaataaagtgcgggagttggtagagcaggcatctccgaatcctgactacacaaacgatgctcgtgaaaatgagagcatccactactttttaagtgggctcccgacaaatttaaaacgcaaattgtttttcatggaaaaaccagatacgcttgtcgaagcgatagctcaaacaaaaagggtacaacaagtcagagaagagttggaaaatgacgaaaaaggggatgaattgagaagtcaaattgctgagctcaaagagcaagtcaatgcaattgaaattaataataaaccgaataatgaaataaacggaggcagacaatttatgaattcgaattggaggggaaacatgcggggcagaggcaattttcgcggattaaacagggaaaatcattggagaacgaaccaaaatgttcgccaaaattttgcaaatagtagaaatatcggaaattatagtaataattacccgaggaatcccaattatatgcctctgggaggaaaccaaaattggaataacaacatgggaaacacaagaccaggaggattttggaaccaacggggcaattttccgaacaatcgcggaaatttcacaaatttcagaggaaatttacggggacaaagaaatgaccaacagagatacagaataaatatggttggtgaagaaagtgaatctaaaatacaaaaaagccgttcaccaaccccggcattaacttttttaacaatttctacaattttttgcttattatttgggggatcaatggcacagtaccaattatgttctgaacgagttgcaatgaccaaagtttcattaccaaatatttcggactgtaaaataccggaacagcaaaaagcaacagaacgaaaggtgaccttatttttgcctgtacgaatgcctaaacaatttccgatctataattgttatcaaaaaattacaaaaacatgtacgggaaattttttattcatttggtaggaagtaaaaagtcaggaaaaagttaagaagggtgtcggtgcggaaagatgccgaaaa

SEQ ID NO: 81748 - DNA, 431 bp, Heterodera glycines
atgcgaattccgtccccacttttggccgctaattatgtgcttgcaactgttgcaatttgtgctgcaatttttgcactcggcttatggtttttcgtgttgaaaagcaatcagtacaacccaactttggctattgtggaagatgatgatactacggtgacggattcgcccttgcatactgtacctggaagggcacaaaaattatatttatttcataccaattttttgaggtggaagaattttttgacacggatggaatggcatcgaaaatggttgctagtcgtgccgaaaatcagctgatcagacaaatggagcagccgatcaagttggacgagtacggcatggcaccgatggacgacggcacgaaaatggtcagcaaaaaactatttcgcgtcaatgacacacatttggcacagtcaagatttgaaagctaa

SEQ ID NO: 81749 - DNA, 606 bp, Heterodera glycines
atgcaattttatacaattaagatagcgtcgaccggaagtgaggtgtgcagccgggaagatgctccctacttttgtcagcttgtccgccaatttggcgaacagttttacaacgaatcggcaaagtgggcaaaaaaaaacacacaaataaataatggcaactttttcgtcttttaccttccaaattttcaaaaatttatttctaaattttgggagcgaatttggcactttttcttgaatgtcaaagaaagcaaaatattaaaattggtattaaattttggaaatctttgggaatatatatatatatatattaaaaaaatggtaattcctgttattttttaattttaatttttaatttaatttttgtcagatcaatcactgacaaaatgcgaattggtccgtttgggccggtggcaccgattgtgccggcaaaagtgaacaacgggcagcagcggaaaaagcgcagaatgcgactacgaaattgaaaaatatacaatatgtacaaattgtatgagaaaacttttgagaaatggtgtaaaaattaatggataaaaaattaaaggaaaaatgatttttttattcaatgattattgcttttttcaaaataaa

SEQ ID NO: 81750 - DNA, 324 bp, Heterodera glycines
gcaattaattattattattattcaaattgaaatttgagtgattgcaaatggaaatattaattacattgagatgggatggacaataaataatttaaaaataatttaaagtcattcagtcaatcgaatggtcaatttggctttggttgttctccttctcctccgcgtctgtttttatgccgcgggcgcggcggaggggcgggcgcggaagggaacggtcatttggtgcgcgagacggacgagggcgtccacatttcgcgctttgcgcgcggacgacgcgagtttgttggcgcggtcggcgttacggtactgattggtgccaaggtc

SEQ ID NO: 81751 - DNA, 797 bp, Heterodera glycines
atggccgattctgttggctccaaactgacgcggaaactgctcttctttctcaagcacatgctgatcgaaccggtgagtggacagtccactgactgatcggacgcaattggcaaattcattgctcacatggggggggggggcaattgcaccaaagtggcactttcatcgctcgcgcatcattcccccgccgagaaaatgccccggcagacaaaagagtacatttgaaaggccaatctttggccaaatgcacacgtctggccctccctctcatttagaccacaattaatgcacgcacgcattaattacacgccatgccaataaaaagtgccatttcctggggatggatgggtactgtcttttcccatcctccgttcattactgtatatgttagtgacacttttgtaatgtgtccattcaggagaccgccgcggaaaacgttgtcttttgcgtgttgcacgaccttggcaccaatcagtaccgtaacgccgaccgcgccaacaaactcgcgtcgtccgcgcgcaaagcgcgaaatgtggacgccctcgtccgtctcgcgcaccaaatgaccgttcccttccgcgcccgcccctccgccgcgcccgcggcataaaaacagacgcggaggagaaggagaacaaccaaagccaaattgaccattcgattgactgaatgactttaaattatttttaaattatttattgtccatcccatctcaatgtaattaatatttccatttgcaatcactcaaatttcaatttgaataataataataataattaataacgcatttgaataaa

SEQ ID NO: 81752 - DNA, 324 bp, Heterodera glycines
attaattattattattattattcaaattgaaatttgagtgattgcaaatggaaatattaattacattgagatgggatggacaataaataatttaaaaataatttaaagtcattcagtcaatcgaatggtcaatttggctttggttgttctccttctcctccgcgtctgtttttatgccgcgggcgcggcggaggggcgggcgcggaagggaacggtcatttggtgcgcgagacggacgagggcgtccacatttcgcgctttgcgcgcggacgacgcgagtttgttggcgcggtcggcgttacggtactgattggtgccaaggtc

SEQ ID NO: 81753 - DNA, 942 bp, Heterodera glycines
atgcggaacgaccctttcggacaacgctatctgagggacgaatgtgctgtgtttgactacaatgcgtgggacgacgttgactggccagaggagaaggaagcagaaattcaccaaaccatccaagcgcaaatggccgacgccgttcccgagagtgtgtcgttaagtcttctcgagaacccgaaggatcgatgggaggccttctttgagactcacaacaataagtttttcatggaccggaaatggctgtcacgggaattctcggaactgttcgttcggccaaaggtttgttggccttattccggtggttgccgcactctctctcctcgctttaacttgtatttggtcttctctttaggacagtgccaaaatcaatgtgctcgatgttggctgtgggatgggcaatacgacaattcctctgctgcaaagtgctgaacacctcttcttgtacagctgcgatttttcgaagaaagccatcgaaacgctgcgaaatgaccaaagaatttcatctgaacggtgtcgtccattcgtttgggacattactgagaatgctcatcagactcaagtgattatttttttaattgagccatttaatgcgtttcattggcgtgtcaggtggctgacggcactttggactttgtcctttgcattttcgttctctccgccgttcggcccgatcggttgcgtgccgccgtttcgaatttagtcgcactgttacggcccggcggaatgctgttgctgaaggactatggtcgtcatgaccttacccaactgcgcttcaagtcaggcagactcatccaacacaatttgtaccgccgcggggacgacactctcgtctatttcttcaccaccgaggaaatggacgaattatttcgcgaagcgggcctcgagaagattcaaaatttcatggacaaacgacttgtgggaaaagagcaaaacgcgtga

SEQ ID NO: 81754 - DNA, 97 bp, Heterodera glycines
agtaaatgaatttttttcatgcagaggctgcagaaatactcaataaagcagcaaaaaggaggatctcttcgcagattcattacgagagcaaatgaag

SEQ ID NO: 81755 - DNA, 1301 bp, Heterodera glycines
atggcaaaaatcgcgaaatatggacataaatggcaaaaatgccaaaatatggacataaatttttcaaaattgagtgcaaaatttcttcaaatttattggttgaaattgcatatgagatacatttccaaattttttgactcggtaaggcgctctgacaaagacggctttcgttttgcaattagtcggtcaacattcggaaattggtctcgaattttttcggcaattacgtgcaatcattttaaaagaaaaaaaacataaaagctaaaatttattaattttttagcgcaaaatcaacaacaaaagcgaaattttcgcttttttgcttatttttgacataatttattaatttttaagaaaatttaaatttattcaatattctcgagaaattttggcgaaaaaaagattttttgaaaaatttttcgggttttgggctcaaaaaggctaatttagctgctgggggccgttctaatagagttttttttgaaaaatgccaaaatatggaccaaaatgccaaaatatggaaatatggacataaatcgcgaaatatggaaaaatatggaaaatatggatatagaaatccttcctagaagcttcaaaccaagctaaaaacatgtttttcgtgcgtttcaggcctcccacagtccaggaaaaaaatatggatttccatgtaattctattccctaatcatcactcaatgctgcggcggtggacagaaggtagcgatgcttctgtcgtggctgattttttaaaatcatttccctttttcattttcagacggagcctcgaattgaatctccagcaactctttcgggcgtgacagtgccgttggagcaagacgaagaagagcagaaaaaggacgacgaggggtaagtgcaaaggcggcggatcattttttacacattaaaatttaccatttttagtggcgaccaaacagcggagaagaaggtagaggaagcggcggcagcggacgaacaaccgaaagaaggcgccgcggaggcagcggaagcggagaaaagtgcgacaaaggagaagacgaccgaggacacggaggagaccacggaaacgacggaaggatcgaccacagagacttccgaacttccggctcgggatcgtcttcagcatcgggctctggctcggtggaggagttttgtcacctgggggccaacgcaccgcctcgtcccgtaagtgaattgtggcatgcgtgtggttgattaaaattccccctttccagaacgattcgtacgtctctggctcagaggggagttctgggacttaggacgccgcttctgaaagcacagtag

SEQ ID NO: 81756 - DNA, 149 bp, Heterodera glycines
gcacgtaattgccgaaaaaattcgagaccaatttccgaatgttgaccgactaattgcaaaacgaaagccgtctttgtcagagcgccttaccgagtcaaaaaatttggaaatgtatctcatatgcaatttcaaccaataaatttgaagaa

SEQ ID NO: 81757 - DNA, 1319 bp, Heterodera glycines
  unsure (1)..(1319): unsure at all n locations
atggcattctgttcagataancccgaagtgtcccgaaaaagtcgtcgctattacgcgcttcgctcggaccatccggcggaattggagtgtctgctcgaggccaatccgttgccgactttggtcaaatggacgaaaaatggccgaacaatcactgagcacacggagaaaaccatcgatcgtatgaaaaactgggcgatcaaaggaattcttcttattgaagggaatttgctgcgaagtgccgtgcgtattcctttcgtaaattttcgcgaatccgccggcatttacaaatgcgaagcggaaaatatcatcggagtcaccgagccaaatttggaaattcatgtcgtggtggcagaagcgccaaaattcacgagaagcccggcaccaaaatatatagtgaaggcgggggaaagggtggagatcgaatgcgagggatttggggaggtgccgatcagaagagtgtggagccgaaaggaggacggggtaagcggaaaagagagagagaggggagagagagagagagcaacagagagagagagagagcaacagagagaagagaaagcaaccgagagagagagagcaacagaaagaaggagagagagaggggagagagagagagagaacagagagagataaagatagatagatcaacagagagagtgccacccaattcagaggcaccgctcattctccgaggccaaatttgcgattgccaacgccgcccactctgaccatggcaattactgctgcgttctgatcagttccgttgccactgtttcgcgtgaagtgcaactgatagtgcatgtgaatgccttctctccctctcttctcattttgccctcatttgatttctccaggaaacggccccccaatgtgcaacaaactttcgcgtccaatgcgaaggacagcagcgactcgcagtgtattggatgccgggatatcccggcggagatcactctcagagttttcggattttctaccagcaaattcggaatgacacaccaccaattactgctaatgaggcatggaaggtgactggccaacgaactgatcagtccaaactgcacgtggatcatttggaattgtttggcgaatatgaatttaaactggaagcaagcaaccgaattgggacgaccaattgtaccatacccggcactcattacagtaggaaggggcgggtgagtcaaacaaagaaagaaggcgcttaattaagcgtgctcaaaattggacagacccaccaattttcttctcgtgaattcaacccccggagttctgattttaaaatgggacgaagtgaaagaggcgaattcgtacagaataaa

SEQ ID NO: 81758 - DNA, 376 bp, Heterodera glycines
gtttcctaccatttgcttcgacgtcttcttggagtgcgcactgaggcagggaaaaaagcggcgaaagtgagcaaacttgccaagggcgaagtgctcatggtgaatattggctctctctccaccggaggtcgtgtaattgcagtcaaaggtctgactccttctccattccaatttatatttaaattatgcatttcttatttaatataaattaattttaggcgatgcggcaaaaatagcactgactgatccaatttgcactgaaagtaaccaaaatattgcattgagtcgacgcattgaaaagcattggcgtttaattggatggggcaccatcagaagggggacgaccatcgcagtgccccaaccatcgatcggataa

SEQ ID NO: 81759 - DNA, 2509 bp, Heterodera glycines
cgcgtcccaaaagtgttggcatcggatttcccatcaccggcacttcacactccgtcgtgctgccattgaccaattgttaaaggccaacgagcgtcgcttcatcctttctgatgaccaccagcagtcggtattaagagtggacgttgcccaagtcgctgcaaaccgaccaatcgaggacttttactccgcttcaaagtgtctccattccaatgcctttttgtttggcatttttgatggccatggcggagcggcgtgtgcaaggcacgtgtgcacaagggtaagaggagaaggaaaggggcaaaacagaagggtttttattcatttttggtactcgaatatttagattttgtgggtcacaaatatgaaaatggtaaaataccttctttccatgcactttcagttgttcgactatatttgttgctctgcgctggacaaacaccgagtggtgcaaatccccgtgggggaacaaatccaatggcttggggccaatgccccgcacagtcttccacaagagaaggacgacgcccatctccgaaatgtgcgcgagtatcacagaaagttgttgcctgccccaagtgttgtccatgccattgccctttaggttcagaagcggcgtctcccccgccaccaccgtccgttcgtcccttcaggcggcctttttggcgttggacgacgacctttcgaagggtgcgatgcctgaccaaagcgggcgcatttgcaggtgctttccgaatttgcccacagcatccaggattttctgcacgctttctgagaattatcttttttgtgtccccctcattttcggtagaatttcttcctcttagttttacaatccttccaacttttctcatttttctccttttcagaatgagtgtcaatgttgcggccagcggttcgtgcgctttggtggtgcacgtgcgcaagaacaatctgtgaggactgaatgacacgtgccccgcccccgaggaaaaatggcaggaacagattctaaaatttctggtgaaatgaccctgggacaaatactctccgatatatttgccttccgcgagtcattcgtcctttcgttaattgaagtcatgtggccaatgtcggcgactcttccgctgtcctcggcgtttgtcttcccaatggcttaattgctcgccaactgactcgcccgcacacttcagaaaatgtcaacgaaattcataggatccgatcggcacatcccgccactgaaaatcggactattctgcgtggtacaataaattttcttaattatttaattttgatttttttttgctaatgttgaggtgatcgccttcttggagagctttaccccctgcgggcgtttggcgatgttcgttacaaatggccattggaattgcaaagtaagccctcccccctcacaaaaaataggtcaattcaaacgcgggagccataactgcgaacaaaatagacaaccgaatcgaaatttaacaaatttacaggtattgtattttctatttttgtaaaattttcataacaatggcggattttctgccgtttttgcatttttaagaagtcaaacgacgctcccctagtcgaaatcccttaacaaaacttttgcgtatacaaatttgagaatttaagtgtttatacattcatttccgtaccatttaactctccccgtcagaagtcgttctcgaacccctcggaatgcccgccccctccaatctgttgagtccgccttatctcactgctcttccggaagtgttttaccaccaattgaccaacaatgacagttttctcgtaagaaagtcttgtcttataaacacttttgaatttttcagatattggcatccgatggtacaattttttggaaaaaaaaaactaaattcacgttttaggactttgggagttccttgacccggatacggtaatcaacggaattttgtgactgttacataaaagttgtaatttaggctgtacggttagttcatgtaaggaatggatgtgctgcactttccttttggaatttgcagtttttctttattttttcaaaggatcacgcacttggtgcacaaacgttgagtgatttccgacccgattctcagcaatcactgggagaagtaagtttttggtggcacaaaacccggaaaagcagaaattgccatgtgccagttatatgaaacggccaaccccatgctttttgaaacaataaattcaaaccattagaatagaaaaattcggcgtttttggactccgcacaaaacgaaatttattatagatactcgggagccttgaaacgagaaaacagggctatgctagcaagccgctggatgaaaattcggcgacccatttgatccgaagtgcgttgggcggttgttcaggcggaacggagctgcaatacgcgcggttggaagaatcgctgatgcttccccctgggatggcgcggaattaccgaggtgaaatcgccttggaaagcaattaactgttgctttaatttagacgacataacaataatggtggtgcacttcaaaacaccgtg

SEQ ID NO: 81760 - DNA, 749 bp, Heterodera glycines
atgtccccttgtaagcagctgtagcctaaaaatggtggaaagttcctccttttttcgtcaaactgtggtgccgaccgattggacaattgaattgtctttgtccatttcgttggatcgcactgtcgcgcatccgttctcctctggcggtgcaaatgccgaaaggcatcgcattgtcagggcacgaggggcaacagaagccgttggactgacaacggaagccgggcggacaaacgccctgcagcaatggcaaattgaaagttgccgaagaattaaatttttttaataattttttctagggtaattttatgcgctgaacacatatataacgtttatttttagctcttatgctctttacgtgtgttacgtgaaattttttgactagtcaactacagtatttcgtcggtaatttgtcccccctatttttcgaaaaaataataaaaatttaaaaaaatcgtgaaaacacctgccctgggggttttcgaggtcgctgatcacgaatctgacatccattcatattaatttcattgaaacatcaatactggttatattctgtacatattctaacataaaagtaaatttttaaaatttgaatttcgactttttgttcgagttcgggtcagggtttcggaatcggccaaaactaatgttagattcatgttcagcgcataaaattagtctaaaaaaattatttaaaaaaaatttcaggggggcgacaaaaggataagaaccaagcaagctctgtaacttaa

SEQ ID NO: 81761 - DNA, 692 bp, Heterodera glycines
atggacccaatttcgaaggccaaagaaaatttgcgggggcccgagaagtacaaagtgatcaacgcggtcagaaagaagcgaaagcatttgctgcagctgaacttcgaccacattccaattattgtgggactttaatttttgctttgttttgtcactgctccaattccgttcaggaccaagttgttctgatgtttccaagccaaggggcgcaacacttacaaatgggcaaaaaggtgggcgtatttgccggtcaaatttattttgacaaacaattttggcaccaaagtttacattaaatcatttttgacactttaggtcattgacaatccgagcagtgcgcgactttttgaggaggcaaacggtgcgatttaaaaaaccaaaattatcggcatttaattgtgtttaatgtcagaatttctcaaattcgaccttctcagcctctgtcttaacggaccaataaacaaattagaccaaacattctatgctcagatggctctgttcgtttcttgtatggccgcttttgagaaattgaaagttgaacagcccgacttggtcgaccgactcaccggtgagtaaatgtacaattttgatttttgtatattgtaaaattcctttctgcacagattgtgccggctttagcattggtggaatttgtgctcttgtcgcagctgaagtactttcattttctgatg

SEQ ID NO: 81762 - DNA, 1598 bp, Heterodera glycines
atgcaggagaagttcaagcagaaccaattcaatctgatggccagtgaccggatcagtatcaacaggacactgccggactatcgaattgaaaagtaagtgaccgacaaaagtggcaattgcaaaaataataatttaattttgtccactgaacataattaaggaccttaaatgcatgtggacgattggcattcttaattattgatacatattatgtatctcccccctcacgacagatgcaaatctgtcgagtcgtccttggccactaactccgcaactgtgtccatcattattgtgttccacaacgaggcatggagcactttgctgcgcacattgcactcggtgctgaacagaacgccgttgcatttgctggccgagattattctcatcgacgacttgtccgagcgcagctatttgaagcggccgctggagctgtacacacgccgtttcccattgcctgtccatctgctgcatttgccccagcggtcgggactgattcgagcgcggttggccggctcagcgatgtccacgggaacagtgagtgatgatttttggattttaaatttattcaacattttcgttgtccaaggtattgctgttcctggatgcccacgtcgaagtgtccatcggttggcttgagcccttggtggatcgtgtggtcgacaatcggaagcgtgttgttgcgccgatcattgacgtcatatcggacgacacttttgagtatgtgaccgcctctgataccacctggggcggcttcaattggcacttgaacttccgctggtaccccgtgccggaccgggaaatgaacagacgcggctgggaccgttcaactccaattcagtgagtattttgcgtgattcgaattcagagaaatgggtcgaaatttaaaattaaattgaaaattgtcagaactccaacaatcgctggcggtttgttcgcaattgacaagaaattcttctacgaaattggctcttatgaccaaggcatgcaggtggaaacatcaaattattcactttttgtttaaaaaaaattgtttcaacaggtttggggcggtgaaaacctcgaaatctcatttcgggtgcgttttctccatcaattggctcatttacggtggcatttttaggtttggatgtgcggcggcacattggaaatccatccatgctcgagagttggacatggtaatattacaatttattttttatttaattccataaatttactttttttgtttgtgttcgttcagtatttcgcaaacaaacgccttacactttccccggcggtactgccaaagtgattcatcacaacgccaagcgaacggcagaggtttggatggacgaatatgcacagtttttctacgcaatggtcccgggttggttcagcgtttatcttttttaaattatattattatttattcgatgaaggtgccaaacacgtcgaacttggcgatgtgaccgagcggaaagaattgcgccaacggttgaaatgcaagtcgttcaaatggtatttggagaacatttacccagaatcgccggtgcctgccagttttttgtccattggacaagtaaaaaaaagaaaatgcaatttttttaactgctgggcca

SEQ ID NO: 81763 - DNA, 1620 bp, Heterodera glycines
atgttccctttcaacactccctacaaccatttgcttaattggtcattggtttgctttctgatcccatggttctacagctattacaatgagcaacaccggctcagcagcatgcccgtggagcaggcgatgctcaaatcttgggacaccgtcatttcacagccatccataaaatttcggaaaattatggtcgggtgcgtctcccattcttttatatttttttctctttgctttttcacaatattttaattttttatatacattttcagcatcaattgcaatgttgatgtgatcgttagcggagtcagcatggtgaacaagctgaacatctcgtcaccaaatccaatcgcggacaaagaagtgctcaacggatttgaggatttgtacgaggcgtttgtgcacttttttacgcgtggtgcgcctgccgagcgatgtatggtcaatgacgcggcatttgaccggatggtccacaccgttgaagacaaacatctccgtgcacaggtgacttactgattccaatcaaattttgagtgattttagcattatattggtggcaatgccgcattaatggctcagaaaatcgcctcttcgttccccgctgcaacggtaagtttcttttttatataagggtctagcatgtgttgcattggtgatgccctttattattttgtctccttttggtaaggcttatttggttggtccgattggcccgcgaagccacgcgctgttacacccggccatcgttcgaaacaattccacacgaattgcggaggacgaattgcacctcattttggagtacaaacagggcgaaatcctcggggagtacgtttcgcccgcctcttctcgtttcattgtttcccatgaccaattcaggtctcacaaaaacactgtgggaattattgttgtatctttaccatggttttcccacgtttagtggcagtgcgatgatcatcgaaatgtttttcaaggcaatcatgcaattccgtcccgacctgatcattttgtccggaatccatggtctggaagcgcaggtatttctggcatctcaattttgttttatctttatttatatacaatttgcagaaccaagacgtgcgattggaaaagctgcgactgatcaaacggtcgctgatgcaagtgaatccgctgattccgattcatttgcaattgggcagcatggcggacgaccagcaagtgcacgacattttggagagggttggtcaaatgcaatgaattggtgaacttgatcatcattttcagatcattcccaatgtggacaggtgtgcgttcattagttttttgagtttttctttttgctttagccttgccatcaatgagcaagaattgacttatctgtccaaagttggcgatggcccatacaaagagcgttatccgatcattgccggcactcttcacgctcataaggtcggatggcccattaaaaattgaataaatttatggggtattctgtttcaggctgttgaaatgctttactggctgttgaccacctatggacacgaccgaaccaatccggaaagcaaacgttacaaccagcgacttcaacggatccattactattctttgacatatcacattatggtcctttttgcgacaacaaagtaa

SEQ ID NO: 81764 - DNA, 475 bp, Heterodera glycines
atgggcggaggagcgaatggaaatgggagaaaaggcaaatggcaaaatgaaaacgcgaaaaagcgacacaaagtccgacccctcccccaacgcacaaaaacgcctccatttgactctgaatttcaaatatgtcacaattcagcggctacagtaccgcaccttccattggctactgtttccgctgctgtcacagtctccccactgatgacgcccaatgccaaattggagctgtgctgtcagaaacagcagttgccctccacgtgccaacagttttgcaatttcgacactttcactcaagaaaaggtggagaaatcgaaaaagcaatggcatttttatttttaaaaataatttgttatttcagctgctaatcgctctgctcggctcccattgtccgtctgctcagctgagcaaagcgttcgactgcgccacctcaaaagtggaccattccgagtgttgtcgtcaggaaggaatgtga

SEQ ID NO: 81765 - DNA, 1961 bp, Heterodera glycines
acataacccgcaccatttggcggtgtttttatgtgcgttcggcaaaacaccatacattggccgttgtgaattcgatcactgaattaattaattaatcagttaattatagttttcatccaattagagttccattttgtgctcacattccttcctgacgacaacactcggaatggtccacttttgaggtggcgcagtcgaacgctttgctcagctgagcagacggacaatgggagccgagcagagcgattagcagctgaaataacaaattatttttaaaaataaaaatgccattgctttttcgatttctccaccttttcttgagtgaaagtgtcgaaattgcaaaactgttggcacgtggagggcaactgctgtttctgacagcacagctccaatttggcattgggcgtcatcagtggggagactgtgacagcagcggaaacagtagccaatggaaggtgcggtactgtagccgctgaattgtgacatatttgaaattcagagtcaaatggaggcgtttttgtgcgttgggggaggggtcggactttgtgtcgctttttcgcgttttcattttgccatttgccttttctcccatttccattcgctcctccgcccattttccactgcaaaaccatccgaaggaacaacgggagatggaaacattttgcctcttcccccccaacacacataaatacatatctctccgttccaatctaatcgctatttttgcatttattggccggtgagcagcaaattttttctcatcccccgccgttaaacaaattgtcgtctcctttccccaccgctcattccctccgccccctctccccctcatccttttattttactcattttttctccactctgtaccttctttcttagttcaaattccgataataaatcatttttacaattttaaaaatgctataagtaaaaaaagaaatacttcaaaaatgattattttttaaaacgatttcattgatttcgaaattcataaaaaaaaaattgcgtacataaaagaaaaaaatctgagcatttcaccattccaactttttctaacactttgcccgcttatttttactcgcccgtataaacttaacaagcaaaacaaattttgattgttttttataaaaccgactagaacctcaaattcttagtcaacattttagaaaacccacttatcagtttttaactttccatttccaatgactgccccaaaaactagaagacatgtctttacaatatttctacgtacacaaaatacaggaatagcaagctttagtaatttattaaacgacgatgtcttcgatggaatgttatcgctgtcgcgagacgggtcacattggtcgcgactgtcctaacagtggcgggggtggtggacgtggtggaggttagtaaacgaatagtggaagattcacatccgttctatttaggaggcgatagcgtctgctacaactgcaacgagccgggtcacttctcgcgcgaatgtccgcagggacgcggagggggcggcggcggatcgcgcggtaaaacatcaaatgatggctggcagaagaatgccaaaaattggaattcctcgtaggtggtggaggcgacatcgtctgctacaactgcaacgagtcggggcatttctcgcgtgactgtacgcagccgcgtggcggtggtggcggagggtcgcgcgggggttcgtttttcagcttcggaattattttcaaccccatatatatattaaggaggcggtgacaatgtctgctacaactgcaacaaaccgggacatttctctcgtgagtgtccgaacggtcgcagcggtggtggtggaggcggcggctcgcgtggtattagctcattttccattcactgggttacttatactgttcatttccttaggtggcggtggcggcagtgtttgttacaactgcaacaagcctggtcacttctcgcgcgagtgcccggacggacgtcgt

SEQ ID NO: 81766 - DNA, 1126 bp, Heterodera glycines
atggcactcttgagcggtcatcgaatgtcactcttgagcggtcatcgaatgtcactctcgagtcggtcaccgaattgcactctcgagtcggtcattgaatggaactctcgagtcggtcatcggatgacactcttgagcggtcatcgaatgtcactcttgagcggtcatcgaatgtcactctcgagtcggtcaccgaattgcactctcgagtcggtcattgaatggaactctcgagtcggtcattgaatggccctttagtcggtcatcgaatggcactcttgagcagtcatcgaatggcactctcgagtcgttggctacacatatttactccaacacttctttctttttccaaaatggccatggcaacaatatttgtttattgattcgcccatgccgaaggagaaaaaaaaggaaaatccacaaaaaaaatttgtctaaaggcgagaaaaagaggaaaatccacaaaaaaatttgtctaaaggcgctatcgccaccgccagacccccctcccccccattccaaatttttttttttgaaaaaaacgtcgcaaaaaaagctgtttgaaaaggaaaaaaatgtcaatggcatgaccccctgcgcaaattttgatgtcgtcaacccccccccccctccttaaagtattttgccaaattgtgctctcaaagactccaactagggctgcaaaaaatatgtacaaaaaaatggtccaaatatgtacataaatatgtaagaaaaagcccaaaatttgtacaaaaaaccccaaatatgtaaatagaattttttttaatggtattttttgggaaagaaaatccccgtaaagtatgaaatagccacaaaatgacataaaattacttttttggtatttttaggcaacattttcaaacttattttttctttagaaattttcaaaatatgtaaaaaaattaaaatatgtacaaaaatatttgccgaaattttggattttttttttgaggatttccaaaaatttccgtaaaaaatactcaaaatctgtaaaaaaatgaaaatatatatgaaaaaatccaaaatatgaacaaatatgtttgaaaatcccgatatatgtaaatatgtataaaaacaccgaaatatgtaaaaatatgtaaataaa

SEQ ID NO: 81767 - DNA, 1677 bp, Heterodera glycines
atgaactactcccaaatcgaaaaagagggattagctcttgtctttgcagttcagaagttccacaaatatcttttcggaagacacttcgtcctgcaaaccgaccataagccattgttgaccatttttgataacaaaaagggcattaaagcgtgtacagcaaatcgcttacagcgctgggcactcatacttttggcgtatgattttgagatcgaataccaaaacactgccgattttggtcaagccgatgctctttcgcgcttaattgcaaaagcgccagtgcccgaagatgaatttattgtggcaacaattacagaaagctcaaatttggcaactgtgaatgcctttacggcacaatttccaattgtccacgaggacattgtcaatgccactaaagccgataatttgcttcaggaagtgaagggattcatcatgaaccaatggccaaacaaaatggatatgtcagatgacattttacaattccatcgaaggcgagaagcgctgtcattcgaaaacggatgcatcatgtacgccgaccggattgtcgtccctgcatcgctgcagacggaagtgcttaaaatgctacatcgtggacacccgggcatgaagcgcatgaaaagcctcgcacgccagcatgtttactggcccggaattgatcaccaaatcgaagaagtggtaagaaaatgtgagccttgtgccaccgaagcgaaggcgccaaggaaaacggagctaaattcgtggccaaaagcggaagggccatggaaacgtgtccacatggactacgctggtcccttctttggaaagatgtacctgatcattgttgacgcacactccaaatggccggaagtgttcgaaatgcgttcgaccggatcagcagcaacaattgaacaattacgttcattgtgcgctcgttttggactgccggagactttggtcactgataatggcacacagtttagctccaacgaattcaaggaattcgtcaaagaaaatggcatcaaccatctcttctcagcgccgtacaatccgatgtcaaatggacaagcggagcgctttgtcgacacctttaagagggcatgtcggaaactgaaaaaagagggcgcgcaaaatgtggtgaacacatttttgacgtcataccggacgacgccgaatgacgctttgcccgacagcaaaagttctgccgaacttttccttctgcgaaagcctcgcacaacattggatttgctgagagcaaaaccatcggcaccactgatcagagacgaggcgatggaaaagcagttcaatcgtcgttttggtgcaaaacctcgaaagttttgtcttggcgataaggtttttgctcgtcatcgccaatcgcaatcatggcgcgctggaatcgtcagccaatgtcagggagtcatttacgaggtaaagttcccgaatggcacttccaaccgattccacgcaaaccaaatgacggcccgtcacatggatcaccaaggcaatgatgagttgaacattttcaacgatgcttttggtcttccgttggcaccgccggatggtcccaacgaagcagctctgccagctgatcaacaagcggcacctgcacaagagacggacgaagcaaatgcttcacgaggccatgtccgtgtcgatcgcccgcaacgcaatcgagatcctcctcaacgctattctccgagttga

SEQ ID NO: 81768 - DNA, 381 bp, Heterodera glycines
atggtcgtccgtctccctgctgctcccatcgcggtcattttggtctttgctgcctttgtcatcgctgtgcatgccgataatgaccattatcctgcctatccaaaagggccatcaccacattatccccctcgtggtaaaatcccttcgtggatgcattcgcagccattggagccgcccggctacaacccttcggcgcaaaacgatgacaaacacgagcagcagcaaaatgatcaacagccgcatcagtcccatgctcgacctggacgttcagctgctgcagttggagcttccgctgcactcgacggtcgttctgttgctgcttctggtcgtgcttctgctcctgcccttccaattggtttagcttctgcccaaaagcaatga

SEQ ID NO: 81769 - DNA, 821 bp, Heterodera glycines
agaacattcggggagaggaattattattattattattggcatggcatatttaaataaaatagcattcatggaaaaagtaaaatattttttttgaaattttttataaaattaataaaatattttttaaataaaaaactatttttcatccattttcatgctggatggtcccaacattttttttttcgatttttagcacgtttttttaagaaagttaaggattttcagggtcctgggtgcattaggcactatcgagaaagtttttgtatattttctctcgattttttttaacagattttcagcaaaaaattggtacttttgcgaactttcagaaaaaatcgagaaattttttgggcaaatttaggtgaggtaaatattggaggggtacaaacaaaaaaaatcgaaaaatttctccaaaatatactattttttcctctaaaactttgggtacggaaaagtcttggggcttactcaccctgcgtaaaaccgagaataatttttgaaaaaatttaaattttggccaactaaataccgtaaccctatgcgacccaccaaatgtttcacagagttacgacctgcggctcagccaataccacgacagcgtgatcagcatccatgggcccggcgtgaagcaggaattgcatcgccaggtgccacagccgaagacgggtgccaccgtggtcaccgaggagttggagctgctcaaccgacggtttgccgaactgtcctccgtgatcctggagcgcaagaacattgtgaacgtgctgatccagaattggcgccgcaaacaacaggtgggtgacatcatcaaacacatcaatcgc

SEQ ID NO: 81770 - DNA, 541 bp, Heterodera glycines
atgaccgtccaatcatccattctttgtaaatgttccagtcacatcaaccgaaaagtgatcgcttttctccaccgcattcaacgccttttcgcaacagatatcacgttggaattggccatattttttagacaacgccaaagttgggatgttgtgacctacgggatttggcccgcgctgaatgccgccgggattgttaaaatccgtttccataacatcaacaatgtcaccgctttacaaacacacatctcgccaaccattctgcacgattgtgccaatcttcgttcaattgatgtcaatcacatttaccggcctctgactgggcaaatgtaattggctaattaatgggcaaaaatttccagttacagaaaaaatttcaaaaataaaaaaacgatttagtggggatgaatttaacggcgctgatacgcctgatgaccaagcgttgtacgaatggctgagcacgccccgtgcagatggccgtcctaaactgctcaaaacttacttcagtcgatccgatgtcaattggaccgctcaaatgaaaact

SEQ ID NO: 81771 - DNA, 1060 bp, Heterodera glycines
atgaatcgtattggttcagcactttcaaaggtattttttgcatcagttttcattgaaaatccagcaaatttttggttgttgcttttgtacttaattaagagattttcgttttgggactttaattggaagccatacatttttttgccattcttggatctaaacttgagtttggggagattgagatcgagattaaaagcagtacggtgaatctaaaacatagtagaaaaaatagttaaattggaatttaaatgcgtttctcctgttttagtcggttttcatccctcgtttgttctgtcaccgtttcttcgccagtggacccaccgatgcgcgacaaaatgtgctcgttgtcattgtcgatttcaacggcgaacagcaattgcttgtcaacggttaccaatttcagatacttagaaaaccaacaatttttcatttttctaggaaagtacagcgaattgctcggccgttcccccgactttccatttcctggcaacgtgaaaccgttggctgaaatgcaacagcaacaacagcagaaagtgaaccaaccatttattaaactgcaaataaaaaaaggcacttttgcctgtttagggcccccaaaaaatacaaaaagtggacccttttgtagggacttggaattagttgaaatagatttcagacgattcgccgtaaatcaccaagtacagttttcaatacttatgacacgaaaaaataagaaaaaatagggtcttcccttttggaattttttgcgggccttaaacagcaaaaatgccaaaaaaatgcatagtaaatttaaaaaaaaatttttttcagtttccattccctttggacgccttgccaaccaaacaactcggcaatggcttgggtgctgtcatgccactccacaaaatcgtcgagccttcatttgttgtttcggacgatcgtaccgccataccacgagcgttaaggcatcaccgaatgtggcaaatgggtgaaaatgatggacggatgacggctaacacaaccaccgccaaatatgaatggaccgtggccggggtggatgggattcgaatgctgtgcgaag

SEQ ID NO: 81772 - DNA, 385 bp, Heterodera glycines
atgtggtttgttggtgacgtcggcaagaccatttattttgtggtacggcaaagcccggcacagttttggatttgctcttgcctccaggtgggattgtacaggcaattctcgagggcaaaagactcgggattgaatttgattgaccgattttatgattttcgacagtagatgtatgtataaaaattagatttcgacattttagcatgagcatggtggaccttgcttccgttttggaccttgagctttaatttcttgaccaaaaaaaattcgggaaaatcgaaaattcaggccaggaacccccaggttcgagagacggacctcgcgagtctcgggataaagcctaattacctaatgcatatttaattgccttgcctcccgaaataaa

SEQ ID NO: 81773 - DNA, 165 bp, Heterodera glycines
atgctttcttcttccgcctgctgtactctgttggccgcgctcatttcggcggcgtttttcgccgcggctaacccaccaacggtgaagcagtgcctgtgctccgaaattcagccctgcacccaaaagtacatgaacacgtggaaggcgtgcatggagcagtgtaag

SEQ ID NO: 81774 - DNA, 1326 bp, Heterodera glycines
atgaagccgaagcagcaaaaactggcaaggattgaatggacatcggaggaggaggaagaggacgaggaaaagccgccctccggggatgaggcggaagcggaaagcagtgaggaagaggaatacgcacaaaaacagcaggcgaaagaagtcgaagttgtacaccgagacagggatgaggaggaagaggaggaggagccagaagagacacaattcgcttcccatccgtcggacgaagcgctgctcaaaacgccggaggcgctgccgtcgaaggcgggcggcccaacgaggatgtccaagagtcgctcgttgcaggagatgattcgccactactggagcttgggcagaaaccatggcacaacatcagcaacaacaacaacaaatgcaaatggcggcattggcacgccaaaccgaaatgaggtgagtgaagagatgcatacagctaattgggctaattagttatattaatttaattaattaatgataaattaagcttctcttttgtaacaaagaattttgctagggtcaaaagggttaaagaaaagtgccgcttaatattggacatttaggcgtgtgtttttgttctaaaatatacctaaaatcacactcaaatttcaggagtttccagtacaactaaaatggttgattaggcatttatattttatcgaaaaattccagaataatgacaaaatccaaaattagaaaaaatatacaaaaattcgacaaaaatcattcaaccatattatacaatttacgtatttaaaaaatatattaaatatagaagctagaaaaaaaagttaaaatttcagttttgctataaacattcaattttgttaatgattcagtccctatcccaacgccgtcggtcccggcattgtgccgccaccgctgttggcatttctgctgccgccggcagtgctatgccacgtgcgcgttccaccgatgagcgactgttcgctgctttggccagccacacacagcaattggtagtttccggggaaaacatggtctgcataggtgtgctgtttatacccgagatttcggtgccgatactcaagactctcgagaccgacatcaaccccaccacttggccacactgaccgtgtcaaattcattttttcaatcaaacaaattgttttttttgttgatcaaaacacagtatcttacaatttagggaatattaaaaagtcacaatatttagttatgagaaattgagattaaaaatgtgagaaaagaccctccaaaaaccccaagaatttcttagtcgagacttgaaattatagtggcaatttcctgggcattcgaactcaacaccgatttggtacttca

SEQ ID NO: 81775 - DNA, 149 bp, Heterodera glycines
agctcgacattttgaaaaaagcctggacctggattccatgttggacctggacctggatttcctggacaaaaatccaggaaaatccaggctcctcgagacctggatccaggcctggacctggattttttgaatttttttttaaaaagcaa

SEQ ID NO: 81776 - DNA, 1195 bp, Heterodera glycines
atgggtggcggttgggtgtcgcagcccgcgtcaccgatgattccgcgcgatcgcccgtcctcactgctgttaccgcctccaccgttgttcagcgccggctcatgctcgccactacccaccaccaaccattatcatggcaatgatgatgatgatgatgatcaacaggacgctgcggctcagcaacgccgtctgcgtcaacagcacgcggctgcggttcggtcagagccgaatgtgtgcggaagcggcaagcagcagcaatcgatgctgcccttcttacgctcgctacgtcagctgaagctgttcaagcggcgcagtgcgtctgagctgtcgctggtgcttgaactgctccgaaatgttggcggcggtggcgacgacagcaacggcgccatggtcaatggctgcgccgaagatgcgaatgggtatgacagcagcgccctaacggatgacgagcagcagcagatggaggcgggcgacgacggcggactgtcggcgcggcaccggcatcgccacaatgctagccagcgctatcggcatcggacagcatcgccagtgccggccgccaccgggtcggttgaacgtattcagcggcaccacacgactgtccgtcgtacggccacaacattgtcgcgtcgcaccacccaacgcagtcagcagcggcggacacggcgccgtttcccatgggcgcactattcgcccgccgccatccagcgtcgttttatgaatggtcggtggtcctccaattagatgcaggctgggaacggggagcgagtagacggggcaatattgcaggcaaattacgattacggtattttggtagtaaaaaaacacattttattttttctcaagagcttattcacaaatttattttttgttttattttttgtaaataataatgtctaacttaagccctgttatttttaattacaggttactgattttttaaggaaatccgtaattatggattacggatttccgtaattaaaattccaattatgtgcaacctttgtacggggaagggccaaaagggtgttcggggcagaggggggcacccgaaacggacgggcctaactgcgtcacaggtacaaatgtgtactttattcttgtcctttttctcgacattggtcttgtttcattttttaaaatctttttagcgttttcattttttaatggatttttttttttgctctttcgataa

SEQ ID NO: 81777 - DNA, 1128 bp, Heterodera glycines
aaaggccttcgaatcctccgagccgaaacgaacccgtgacagtgcagcaattgacccggtcgacctgaaggtgtgtttcaaaaggaaaggcttacatttgtgtccttatctgtgattttttgataggacgatgaggagttttcttggaatgaggagtttataggtttttttggaatttttgagttttttttgaaacaaaattacccgttttctctcaaaatgctaatagtgtcaaaaaaggatggatttttcattgactttgatttgcctaaacccaaccaactacccgttattttagaacccggatgtttttaaatttccttctcagttcaggctaaaaaaggaggccacgggcgacccaaagcgacgccgcggggtgtggcagacaacgctttcgagtcgcggctgacggacgcattggacacggcgaatcggcacgcaaaagcggcagccaatgcaaagtatcaaactgttcaggtaaaatgggagcacagaaaacatcaatgaaaaagggggtggcggaagtcagggatggacccaggatttcggctcggtgagggcggcgtttccaaaaaaattatgacaagtgggcctggtaatgctgccaggcgccgccgtgggaaaaatttagaattttggcactattttttaacaatttgcagcaaaattacttttttttgtgtatttttgaaaatttagcaaattttcttggaaaattatgttagggaggtcggtcttggagctgggttcaaggtttatcattggttaagcctgccgctctgtccaaattaggccaaccataaatgcctgggttatggacagtaaaatccaggcggagaaagtaattgtctacaaaattgcatgagaatgtttacaggctcttcaactgcacaccaaactgatgaaggaagcggtggacagcgacgtgaagcaaaaagggggcgaaagaggcggcgattcggccaaatgggacgaagtgatggaaaagcgaaatgggaaaacaaaaaatggattttaaatggtgcccttttcaaggtgaaacgcgcaaaagcggaggcggaccgacgtgccaaattggacacggaaaaggaaggcacggcacgcgacgcaatcaaagaattggagaaa

SEQ ID NO: 81778 - DNA, 792 bp, Heterodera glycines
atggtgattagaagagtcacaacagtgattagaagagtcacaacagtaattagaagaggtacaatggtgattaaaagaggtacaaaagtgattagaagaggttcaacagtgattagaagaggtacaacagtgattaaaagaggtacaaaagtgattacaagaggtacaacagtgattaggagaggtacaaaaattgttggaatggtacaacaatggttaaaaagggtacaatcatggtattaaaattaaataattaaggaaatcgtttattaaaaagtaagattaaaaattgaatgcaattaataaatttttaaaaataaaataaatttccttttattaattaaaaagagtgtttgaaaagtacaaggattgaatatttatttgaattgaaattaatattacaaattctaatttaaaaatacaggagttctttaataaaagtaaataaattattattttaatttaaaagatttttcacaaaaaataatttaatttaaattaaaaaattttattttttatagattaaacaaaactatttatatttattaaaatgaaaattaataatataatatttatttaatttgaaatgaaattaaacatgtaaaagtaatcaaaaaatgcacagaaaaataatgtacaccggccggattcgaacctgccgccccccccctcaaaatgatgcctcagaatccccaatcacacagggattctgaggtcttaacgatgtcaaaagtaaaatctgattacgtattcgtgatcagcggcccaaataacccataaagaccaaataaa

SEQ ID NO: 81779 - DNA, 742 bp, Heterodera glycines
atgcgcctcaaaaagttgtaagacccttccaccactttcagacccgtcccattagccgttaagctcaaattagtttttgaaacgaaactccttgtcaatataacgtatatattaactagcgggtgcgtgaaccgtcggctatttagctgggaaaaagcgcttcgcgctttgggagcttcgctacctagactgtgaagcgattcaaaaaattcggtgatttttaggctgcttcgcggcctcagacgggcgcttcgcgcccgtttctaatttttgttgtgcttttcggccgcttcgcggccgttttttaaattgtgttgagtcggacgggcgcttcgcgcccgttattaaattttgatggactcagacgggcgattcgcgccctttttgtggcctttttaggccgatttgcggcctcgaacggccgcttcgcgccgttttttaaattttagaacagatacaaaagtgattagaagaggtagaactgtgattagaagaggtacaacagagatgagaagaggtacaacagtgattagaagaggtagaactgtgattagaagaggtacaacagagatgagaagaggtacaacagtgattagaagaggtgcaacagtgattagaagaggtacaacagtgaaaaagtgatacaaaagtgattagaagaggtgcaaccacggaagggaaaggcacaacagtgatttgaagaggtacaacagtgattagaagaggttcaacagtgattaaa

SEQ ID NO: 81780 - DNA, 624 bp, Heterodera glycines
atgaaaaacgcgggaaaaaaacgattaaataatgtagaaaagtaaaagcaaaaactttctcacaaacaaaaacgggaatcaggggccttatgctcgtctcgcggtttagagctaaaccacggttaacggcgttaaccgtggttaaaaatccttaaccggtatgctcgtccttccctttttaaccgtggttaaggataaaccacggttgagttaaccgtggtttactcccttcttaaccacggttaacgcaagttaaccgtggtttatttccaaccggtatgctcatctaaccgtggtttaatctttcttaaggaatcttaaccacaactcgagttgtggttaacgtaaatttatttaataatttaaatagtaaaataaataaataaattttttctagggtaattttacatgcagaaaaagaatctgacttttatttttgtctatgatataaattattgacggattagtgttatttcatcaaaaaatttgcacacgcccaaaccgctaaaatagctttttaaaaaaggtgacaaaatttaggtacaggccattttttgaaacaggtacaactacggttttgaatctggtaaatcattttctcagatttggacccaccatattaaa

SEQ ID NO: 81781 - DNA, 381 bp, Heterodera glycines
atggatatggtgcggacgatgcttaagcagatggtccaggacgggtgggagacgcaggagaagaagaagcattgcccttttgatgttcagaaaccaaaacctgatggactacgtgttcggcatgctcgagcagtacgccagttcgctggagcaggaggtggaggagcgcaccaaagagttggtggaggagaagcgcaagagcgacattctgctctatcggatgctgccgcggcaggtggcggacaaactgaagctgggcgaggcggtggagcccgagtccttccaaatggccaccattttctttctcgacgtcgtctccttcaccactttggccggcaatgcacgccattacaggtgacaaaatcagtgatcactgtctga

SEQ ID NO: 81782 - DNA, 554 bp, Heterodera glycines
atggaacagttcgactcaacctcaaaagatttgttccgcaacggatcgttgatgaataccgaaactgccggcacatttcagggtgaagcaaaaggggggcaaattaagagaaactgagagcagttcaggcgagaccggacgcatcactttggactcggacggcaatagacagccgacctttttcgtcactatgctaaacgcagcgaatgtgccgacagtgacaatgacagtgaacatcagcaaaggagtgcttgtaagcagaggaggaggagggcattttgccaatttttccaacattttgtgccaatgttcagaatttggaccgcctttacaccagcgaagcgtccctttgggtcaattggggcggcgttcggccgctgaccacgccgttgtgcggctacaacggcacgcaatgtggccaaaatgcgactgtgtacattctgatcggaagtgcgcttgtgcttcttctcctcttcattgctttgctcggcatcggatacgcactgaggtcgaattgccaaagcactgatcaaaccattattggaaaagactaa

SEQ ID NO: 81783 - DNA, 91 bp, Heterodera glycines
ggattatttttcaaaacacctcgtagactgggggataattggagactgagggattaatagagactgggctataattagagcatatacggta

SEQ ID NO: 81784 - DNA, 886 bp, Heterodera glycines
atgcttttctacccaatttctgtttctttgattttgttcaccttttttgccggaagcgctgaagcgcaggtaaattcaacaaaatattaatgttattatttttggtatatttcctcaattatattaataaaaaatatatatgcataaaaatgaaattaatgccaaaagtaaatccaaaaatggaaaattttcggttttttcttgttttgtatttttttctgaaatggttttttcataccatatttagctatttttgagattttagcttaaattaaggaattagaagaaattttgagaaattatacccttatttggaaaattatctgcatgttttacagtttttatatgcatattttgcgatttttcgtgcttataaattaaagtcctaattattttattattttttaaaattaataacttttgtttatttctttttttagctttagaattatcccttactatatattaagcgagtaatagccccgccccttttttggctttttgaattcgcgccgaaatcgcactttttgtgaagcgcccaaatttgcacttttttttgaagggacctagcaccggagagagagaatatagattttcttctatttaaaaatcatttgagaacaaatacagagcgttttaattatcgcttttctcttcaaaaactatgatttttaattcaatttgaattggcacagaatgatgctggcgttttgggacccgtcgaggaaactgctgggcaaattggccgcaatttaagctgttccgctatacacgcggctgtccgcgccatcattacagcacatccggattggcaccagtggttctacgaggcgaggcacgaatctttttttgtgttttaatatttaaaattataaaatattattta

SEQ ID NO: 81785 - DNA, 1078 bp, Heterodera glycines
  unsure (1)..(1078): unsure at all n locations
atgcgttggtcagtacaaacatttgtttgtcttctccacggagaatttgcgctctgcaaggctggcggaggtaaaatttaaaaaaattgcattttttttgtcataaattgttttttttgggtgggggcataagtgccacgatggggggggggcaatgggcgacagtccgatgtttttgagtattcctctttttgtagttctaatttctctaatgcctgcaaattttaaaaattacattgagtttcaaaaagttacgcccgaacattttcgggaaatcagtttttgctacctcacgaaaaacggactcggaaaaccattttaaaaattttgtaagcggatagtaaaacattaaatgataaatccccgagtttttcgtactcttccttgaattgtataatttttcattatttttggaaaactcgaatcaaaaaagaaattttttttttgtaatttttgtttttcacaaaggtccgccaacatttcaagcagaattcgcggattttcttcgccaaaaacaatttgatggccgtggcattgggcagatcggcacaggacgaacaggtggagagggaaactgaaaacattgacttttggccatggcaaaacgcccatttttagcgggacacataccagaaaaacaaatgactttaatcgctggttttccacgaccctaaaaaatgacaaaatgggagggtaaaaattaaatttggcaaaaaattccacccttttttcgccatagacctttcatataaagcgataaattggaaaatgatatcaaaaagataggtttttagaatgctaaaaaatggaaattttaatgaattactcccctccgatgttaattaaaaatttacaaaaaaaagaacccatttcgtgcccngaaactttttgcgccctttgtccanaatcggattcaaaattatggttttcaatccccgatcacctaaacagctttaataagcgattgaaagtagttgcatccgatcatttgattataaattaattgttgaaaaaacaaataaattttcaagcagcagaagtaatgctcctaacaaacgagaagacagtgttttcttaa

SEQ ID NO: 81786 - DNA, 289 bp, Heterodera glycines
atgcccaacttgcgcagctgcggttccatggcgccgtgcaagtgcaattccgccggcattgggccggccgggagcgaaatgtccgccgaggcgacggcgcccgcctgggcaaactccgcctcggtgtgctcgtcgaaaaacctttgaaaatttagtttttttttaaattttttggcggtttttcagggtcaaactccgggaaatgctgaataatcatagaatacgattgactacaaatcggatgtgttgttattgtgtcagcggccccgaaaaaaatttaaaaaataaa

SEQ ID NO: 81787 - DNA, 152 bp, Heterodera glycines
atgccgtcccctttctcctgggcaggtgccattgagctgttagaggcgttcactttgtgcaagacgggtgaccaactgtccgcggaccaggcccgccttttgaagcagttcggccaccggttggcccaattccgcgtccgtctgctcgcccg

SEQ ID NO: 81788 - DNA, 1188 bp, Heterodera glycines
atgactgtcgttacgcgttcgaagcacattcatgcgcccggtgttctgagtctagcgatcgatcagagcggaagcgacgctcaaaccgtgggttctgtttcataaaaataagcaattgggatgaattctcatactcatgacataataggtgtcattaattaaagcctaacgggtcagcagtagatttttacaatgtgttagagacgtgaaaatagtaggggaatggataggaaaaaaattaaaatttttataattccatgactttctagcaacccttaatttgctcttaaaaacataaactctcggtgtgccttctatttattggtccatctcatcttttttgggacggggtggttaaataatgatgtttagtaggacaatatttatgatacgacccaataatgtcggcaattattctgtcctttgctatccctccccatttcacttaacttaagtatttgcaggtgttctgctgcagttccgatgaaacgctcggcttgtggacgtgtgccggggctggcgcgttggaagtggacattcgcaacacggccaacaattgtcgcggagtcatagcagtttttgtcagtcttcttctcctttttgctgcctaatcggtcaattttgcctaatatttgcctcttttggtcagggcgaggacatttatgttgcggagcagggccaagacgtgatcaccggcaacgaccaacacgtggtggtcaagtacgggttggccgcctttctgtcctcgtccccgttgctgatgttttctctggaactgaccgcgttggcctgtgacggcacccacctgatcgccgggtcgaggtcactcatttcaaaaatagcattgacccaatttctgaccgatctcaacgggacgggcccatggattttttgtgttatggtctccaattaatcaagaacatcccgataatatatttggtttatggctattttttatttggttgaataccacttgggtaactctttttggttttatttggatgactacgacggtcacggaatttaggatttttgagggatttggctacctgtgattagctgcttgtgttttaactttgaaacgtatacgctcttgcagcgatttcaccgtcaaatgttgctcattgggaagcggcggagagaccaactttgaccgatacgaatggcgacggtttgtttcgtatctga

SEQ ID NO: 81789 - DNA, 606 bp, Heterodera glycines
atgccggtagttgctgataacttaatgagttaatatttttcgttatcttttttcactttttcaaaattatgttaataaaaacaatcaaaaaagttttcggcggtgcctttcggtactgtttggcaccaaattatttatctatctaacgaacaataaaaattaagaaatttaaacagaaaaacaaaaaaatatatatgttttgttaaaaaccatcctggtctgattgcaagaaattctttataaaaatttaaatattgatttaatttttactactttttaatattctttaatagtcaaatatatcaaacttgtcaggttaaattctggagttgcacgggaccgggaattttgacaaaaaccgggaccggacttaccgggaccagaaaagtcgagaccgggacctcagttttcgtccgggtccgggaccgcgaaaaagccgtgaccaaccgggaatttattttccaatagaaaaaattttgaaaattccaaaaattttcatcaaaatgcataaattagaatgataatttaaacacaaaatacatatttctctatgtaaatgattgagtatttttttatttaatggtgtttttcaattgttttaataaa

SEQ ID NO: 81790 - DNA, 161 bp, Heterodera glycines
atgccggtaaaatggtcgcaatcacatttttgtataatacgaataaaatggttttggccaattttgggaaggagaaagaagagatttgctgaaaatggttccgactgctctgctgctgttggtgatggtgggagcaatgacgacgggccggggatggaggg

SEQ ID NO: 81791 - DNA, 114 bp, Heterodera glycines
atgtccactgcttcaacttttggcttacagaattttttggctcaaactgcttttgctgctgctaccgccaccaacaaagagcactcttcgcagaaaagcgaagaggaggaggag

SEQ ID NO: 81792 - DNA, 310 bp, Heterodera glycines
atggtacttacacgtaaaaaaactgaaaaattcaaggaaatgagaaattctagcaccgaagcaaaccgaaaacggaaggaatggcgcaggaagcgcgctcagaaaggcggtttgacgccaaaaagtgacgaaaattgaccaaaattaattttattttaaaacactgcatttttcagcgctaaagcagaccgaagccgtgccaacagcagaaggagaggggacatcaacccaagccaccgaaagtgggccgtcaacgtcaacttttgaccttcgtatgtcgaaaaagcactattttagaagcgaaaattaa

SEQ ID NO: 81793 - DNA, 840 bp, Heterodera glycines
atgaccaccccccctggcccgatcgtacgtcgtatgacccttggaagtgaccaccccttgtacacgtatgctgtgcaggtgtgtgaaatgcgattttttggaaaaaaattttgaggaccgtcggaagggtgccgataggcgccactggaaattttaaaatttttccccacttttgtagcccgtgctgatgctcaacgccagcaaatggcaatggccacacagtgtgcgacgaatgcagcgactgttaacgaaagcgaccactgccaccaatgacgacaaaacagcaacggagacgacaacaacgacggcaccgcagcaacagtcgcaggacggcgccgcaacgacagcagcaactgcacagccgagtgtcaccaacacggacagccgaatgatgttcacgataaagtgagtggtgggagaagcggtgggaaaagcaaaaatatacatattttcgtgtttataaacaaaaaattttctgttatttttaattttaaatacttttaaaacacaaaaattttctgaaaaaatagtatttttttaaaattcataaaatattttagaaagaataaatgtacaaacgggacccacgcgtttcggcgccagctctttttctacgatagcttttttctttgacatccaaatacaacattgttggtatcactcgaaagctcttaacatgctctattagccttaccaaaagcgaaaagattttcaagcctggaaaaaattttattacgaaaaaacttcaaaaatttcgacttttcgcaattttcatgtataacttttttggaaattgtctaatagcgaagcaatagcttagaaaaaattaaaggtaataaa

SEQ ID NO: 81794 - DNA, 338 bp, Heterodera glycines
atggaattatttttcgcactatctcttctgcggtttttcttagccaattgttcattcattttggtcaatggagcgggcagcagcaataaaagtcaaggtattagcaacacttcaaaagcgaaatcttcatctgtcaaattagctgatctgttcgcattggatccgctgagagtgacattatctgatctgatcaaagaagagagaagcgggaaaatgggagatcgaacagagaaaaaaggaacattggcagaactgatcagaatggagaagatcaaagaggacgaatttgaccaattaatggaagaaatgagagaaaatcagcatctgattgaagaagt

SEQ ID NO: 81795 - DNA, 96 bp, Heterodera glycines
ggattatttttcaaaacacctcgtagactggggtgggggataattggagactgcgggattaatagagactgggctataattagagcatatacggta

SEQ ID NO: 81796 - DNA, 842 bp, Heterodera glycines
atgccaccaaaccttggaaaaacaaaaaatgacaaccgtgctccaaaagcgaataattcttttacttcttcaaatgagaaaacgccaaaaaaattgccggaagattttgaaaaattgtcacaatttttgcaggtgaaagtcagaaaaataataaataaataatttatatattttttaggaatttatcaatcaccaagacaaaaaatcattgaagaaaactgtgcaaaaacctctcaatatttcaaaattaactgccgaagaagccaggaaagatgatgaacatcgagagcaaagaccaaagatggaaatgccaaaagagagtagcaataacaggcaaaatttcaataactatgtaattacaaagcgggcccggattaaaaaaaattcccagatcctaaccaaggaccggcatttggaaaattcaatgacagtaaaaaggacaaaagccgaaagatgctataggcaccgcgacttcccaattttcaagacttacgataataataataataaattccgttgaatatcaattgaatatgattagatttaagactagaccagacatttatgaaattaatttttaaaataatatttttttgccgtttttaagagcaatttctttgtttgcaaattcaacacggggaacaataattggcactgtgccattgtctgttgaaattggcaatgatagagatgaaatggaagagcagcgaaagttgacagatgaaatgtcccaggtggaagtgatcaaaaaagtgaaggaagaaggaattgacaaagtggacgaagcagaacatggaaaggtggacttttctatttttaattatttaaaaagaaatttttaa

SEQ ID NO: 81797 - DNA, 678 bp, Heterodera glycines
atgctttgcaccaagctaagtcggcacatgatagatgttaaacagaaattatgggagggcgtctaccgtgaacggggtacgtgctaatcttgctaaaaattacaaaatgtttcccaggaggcacattattttcaacacagtcgaaccctaaaattccgctaattttttaaaatgatgaccgaaaaatcataaatatagatctttttgccacacagatgatgccatcatctgctcatgttgaggatgattattggatggactcgtacattcgatccgtttcagcaaagtgtgtacacataatcaaaatggacactcaacagaaaacgtggcagtcatttggggatttatttatagtacagtgttagagaaaccattaccgtataccaatacagtatatgctttaaccattcatagcaccaattcatgtacaatatctgtatagacaatattatagtctgtgtgtctgtgtattatttatctcgcccatagacggatttctgtaacagtgatgactcacccatacagtatccatacaattacatttcagttacgtaatagtgcttactgtaatagcgctaattgtatgcactcatattatgcaattagtgcactcattagcatttttatttattgctctgatgataattatttacccaaattaataatggggccaataaa

SEQ ID NO: 81798 - DNA, 2201 bp, Heterodera glycines
aaaaaaaggaattcataggaaggaaatttttttcgtcccccaaccgattttgagatggatggaccgtcgggcatttgactcaaaaaaagagaaaaaaattgtgacaaaaaagggctaatgtttgccaaccgcgcgcctttgtgtgttcccctcgacttgacccccttttcgagtccgcttcatctttccttttcccttctttcactcccatttattcgttcgttcgtcccaattgcttaatcccctcccacccatccccacaaattacctttgtcctgaccaccaattcccgccaaatgagcacagcaaatacttgaactgctgctgctgcagcagaagacagtcgcgcgataggccaatcggaggatgaaaataggaaaaacgaatttggaaagagtaggcggggggggggggggattaaacgaatgggcaaattctgtaacttttccattttccaatcggtccctttttcttttcttgtcattgtccgtttagcatttcaaatcgcttccatttgctgtgccaataattctttgtgcttttatttcgcccaaatgttcggttgctttggcgggggtcgtcccctctccccgccccttttcccacaacgaaatggcaccgatggtgccgtaagtgttgcgcgggaatgccctcccacgagcccaaatttcttgcaaattttcatccttcggttgctgaaaatattagagaaggaaaagaaccggaagaatgaccgaagaagggaaaaagagcgcacactaagcaaattcatcggcggaatgatgcggaaaaggaggtgttcaactgcggacggactttttggggatttgcggggggcaaacgattgggcacggactgatcaattaactaagccaagggcattaaagacccggtcgattaaagtgcctaaattggagaagcgaatttagaggggccgagagagagaggggagagagagagacaactgattgattactgactcattaaattttagtgctgaagcaaatgaacgtgacaccgccatgttgggtaatttggagttggcagaattgaagaccgtctccacgttgggagttggggggtttggacgggtcaatttggtcaaacacatcgacactgaacgggtgtacgcgctgaaagtattgaacaaacggcatgtcaaggagatgaaccaggtggggagatgctccgaaattggtccatcaaattccgtccttttggactttctctttcgtccattttttcactttccgtcgcttttccctcaggtcgaacatgtgctcaacgaacgcagcattttgctgagctgtcattgcgatttcattgtccgtcttcacaaaaccttccgcgactccgagagactttacatgctcatggaatattgtcccggcggcgaagtttggacaatgctaaggaattggggccgattcgacgaggcaaccgcgcgcttttactgtgccgcagcattggaagcgtttgattacctgcaccggcggatgatcatctacagagacctgaagccggagaacatgctgctggacatcgacgggaaccccaaattggtcgacttcggatttgccaagaaattgccgacggagggctcacgggcatggacattctgtggcacagcggtgctacatttggccaatgaagcgaatgccaaacgcaaattgtttaggaatatgtggcacccgaagtgattctcaacaaggggcaggacagtgcggtggacctttggtccctcggcatttttatgttcgaacttctctccggcagtccgccctttgcgtccaccgacccaatgcacacgtaggcagggattgtcagccggggaagactcccgaccaattagtcaactaattgccaaccaaccctctccccccttaaggtacaattccattctaaggggtgtccaattgttggcttggccccggtacatgggggacaacgcgcgcaatttgatctgcaagttctgccgacgcgatcccacgcaacgattgggctatgctcggatagaggatgtcaggcaggacatttggtgaggaatggcgccaattggcagaaagaaatgcctttttaatccggcacatttcgccaagggaacgcactgattctttccttttttaggttcaaaaacttcgatttcgcctcctttcgcaaccactcaatgcgtccgcccatccgaccgaaggtaaaaacgg

SEQ ID NO: 81799 - DNA, 809 bp, Heterodera glycines
aagccattggagtggccgatgttctctcaccagtggaccatatgcaatttgtatgtttaaccatccatccattgctgagagacaaataaatattggtttgttctctcaaaagggtcaacagaattcggcacaatttgacaatccatcggcgaagaagacaaaaagttatgccgaagccgtgcgattcgaattggctgacggaggaaacagtgacgaaccaatgatggaatgggagggacagcagaatcagcgggaggactcaacgcatgacgacggcactctgtcggacaatggtaagaaaaaatggggtatttatctgtcaccagacttcaaaaaaatttatacgggtaaactggtttggggtttttagggtcgggaaaacgattctttcggatcctgaacccaaactcgaacaaaaagtcgaaattaccccatttggtttatgctgacaataattagttttagtgcattctttgcaacccgttgcgcccccgtcactgaacttggaattgatttgtgtccaattgtttctgcaaaacaaactggagacaattttggcgtgcggaatgttcagcagcaggtaattcagtggccaattgttccagtttctaattaaactaaacgtttcaggaccaaagtcgtcgcaacgacgaatcagacattggacaaaaaaaaatgttttgcctcattggaaatccattggactgataattcgaaagagcgttgtgtcgtcaaaaagtaccaattcttcatggtgacggacaatgagcagcatcaaatgaattccgctgcttttgcaacttctgaac

SEQ ID NO: 81800 - DNA, 81 bp, Heterodera glycines
atgactcgcgcttctgccggctgtgccttgctgtcctcttctgctgctctggcgttgcttctgcctgatcacgtgtttttg

SEQ ID NO: 81801 - DNA, 997 bp, Heterodera glycines
atggcgattcaaaagttggagcaacagttgcgaatgctttccgcggagaatgagcagttgagggcacaaagtgcccggctcagcgcaatgtttggagttgtcggccaaggcaatgaaagcgaacagcagcagcaaatgcaaatgcaactccattttctgttgaatgagttgataccgaagaatgaggaactgctgatcattcaggtggagaaaattcatggggaaatggttttgaatttaaagaaaggggatcataaatccatgtttttctgaaggagaggcagcgaattgaactcgaggctcagtcggccaccctcgaggagcagcggacgcacatcgaagtgctcgagaaagccctttccaacgcgcaggagcgactggcggccaaagaacggtcggcggtggacgccgttgcggtggtggacaaatgcagccatttgcagaggttaggccccaatccaaacacactcaccaactcactgattatgccaatgtcagaatgttgcaagaggcactggaggacaaacagcggcaaaaggaggatcacggacgacaggtggcgcagttggagatggagctgacgcaactgcggctccaatttgccaaggactccaacccatccgcaattggaagcatcgggcgaaaaagcggcggttcgatggcaatttcagcagggacagcgacagaaggcggtaccattgtttagtgtaccatagggctcccaagtatactgagtttccaaatttgggttgacagaaaagttccccttggcgccaacaaatccgaattaaacaacatttaggacaaattttgatatataatacaaattattcattaaggtattggcgatgaaatgttgaagttgaggaaaacgatcagtctgaaggacgaccgaatttcgcaattggagagcggccttttggagatgcaaaaacggtacagcgacgagctgcaacttcgcgagacggcctcaattggcaatggattcaccggcgga

SEQ ID NO: 81802 - DNA, 2263 bp, Heterodera glycines
ttgcttgtgtacttttggccacaactttgctcaacccccccaaatttttgaaacataggtgagctaatagagaacccataggctatcggatgataccaagaattatggtatttgttgaaaattttcattgatggtttttatataacgccctttttgttggcttttatataacgacatagcaccatcgaataaatgggaaacaaattattatttgctaacaaaacattgagcaaaagacgaataaaaatgtttaatattaattaatacatttaattaattttaattaccaaaaacaaatgtagaaaattggagttgttaattttttgtacagataatgataaagtttaatcccattgaatgaaaagagaaaaatcatttctctataaattgtaaaaatttattttctatgcaaaaatacccggaaatgtcctaactctaaataacaatgatgaagagcaatattaattttcattggattcaaattggagccaaatcatatagacggcaagggcgtagacagtggggggggggggctgaaagacctaatacggcgtgccacacttttgccaaattatggattatatgctgaaaaagtgaatttatctagtgaattgaatgataaaatattcattgtcagtgtgccaaatgtatacatcgccactgatttcatttgtgcctttcctactgaaaccgatgccgactttgctgagagtgtccaattgctgtccaagtaccaattccccagtgtgttcatcaaccaattctacccgaggcccggcacaccggcggcccggctgaaaaaaattaacacaattgaggtgaccgaaagggacgaccgaacaacttggggcacttatattaaatttacacgcatttcttctggtaatttctttcagattttgctgaaagtgcacttacctctttaaggcgcgtcgtcggaccgccgaaatgacgcggtgtttccacgcttatcgacgctacactgacgaacggattggcgaggaacattttgttttaatttgtgagagggcatccgacgggcgccatttggttgggcacaacaaatgctacggtaggaaaatccgtcaggatacaggacaacatccaaataaaacgagtatgtcttttccagagcatattttggtgcctgacccctgcctcccccctagcaatgagtgtgtctccgccagcaaaaagtctctgcttggtcactgggctcatgttcggattgtctctgtgtcaaaattttacatgaaatccgaaatcgtcagtttccccgatttcgaggaggtaaagtaaaggaaatgttagtggaaatcaattcaaatttaggaccataagcagagaatggaggaggaacgaatttggacaaatggagaagaaagacgaaattccaaggacaaacattggacgaggattctccgaaatgccgtcgcagtgatggcattgattattgcactcaaattcattctcaaccatttgttttttgttgataggctcagtgaattatagtgtgtaattgttgaaattggtgaacagacccaaaaggtgtaaaccttccaatgatgtaatgaacaaaaattttagtctcttcgtagatgcaccggtaatcgttcacatcataacggcactgcaataaagggaatcgagcaagttctggcttcaatttcgtatacaaatgttagtttggcgaaaagaattaaggcacattttaaaatggaaggtgaaggggaaaaatggatagatatattaactaaacgaggaaaaacaatcgaatctggccgtggttcttcttcgtcaccctttggtcacttgatggcattggcattgcccagggaactcctcctgtacactaactgtcggtggctgttcaacgtgtccgagtcaccctcctctccctttacttccacgaccgttttcccagcatttccttcactgcaatttgatggaattgcattattttgggatttatcaaccaaaggctcttcaatgctttgtagaataattttatcaaaacaataaattacccatcaccaaaacaaaattgaaaaacgtcatcaaaatcattgatccacttgggggaaatgtctcttttttcttctgcgctcaatgcatcgaagtctttgcggttgtcctccggcattatcaccactttaaaacccgcttttttcactgccgccattttctctctgatgccgccaacttttaaaacttggccagaaagggtaatccgccccgtggccgtgatgtcctgcttcaccgc

SEQ ID NO: 81803 - DNA, 1383 bp, Heterodera glycines
atggacattgaggattcaatcggtcggctgccaacagagttcgatgaggcaatttctgccgatgagaaggaaaatggaaaacgctttttcaatgtgcgcattatgcggaggaataaaatgagagaatctgaggaaggcgaagaaatgacgacggatggagggggaaggggccaaagggacgagtgccgggcggaccgaagcattctcccgtggggtaagtcctccttttggatctctgtccacttcatgcattcgtttgattttgtttagttcagattgcacagtttttctccgcacttggggctgttcccacaacaacagtgactcagagtacatggccggactgctcgttcaggtgggcgccatggaatatcagactaagggggatgggccaattctatttttcaaaaattgtggatgtttaaaaaagaattttcgaattggagtcgggcaatgctcatgtcagcgatcccgaacttccttttaggcaggctacagaatgactgcggacaaaacgttagccgacatttgggtgcttaacagctgttcgttgagatttaaattttagcaacttaatctgttttaaggattttaggcacagtgaagactccatccgaaacgcaattggccaaccaaattcaagaggctttgtccaactcgaagcgcgtcgttgtgtccggttgtgtgtcccaagtgatttcttgatgttgtttttttagtttttttttttgcacttttcttacgctctttcccttccattttctctcattgtcaggcgtcgccaaatgagccgtggcttaatggtgtttctgtgattggtgttcaacaaatccaccgagttgtttatgttgtggaggaaacactgaaagggaacgtcgtccgattgttgtcgaggcgaaaagcggcgactgcgaatacgccgcaaattgacttatcaatgccgaaaataagtgagaaaatggcaaacatcgaaaatgaactgccggttaaggaaggaatgaattcatcgaaattttggccataaacaatgggtgccttaaccattgcacatattgcaaaacaaaggtaaaacggcgtacaacaatccttagtcataatcaaaaaaacaatttgtgtcccgtctttcttgtgcttgtttttaatgcttcctttgaatttgctttttaggccgcccggggcgaccttcgcagtttttcgctcagttcgcttgtcgcccaggcccataaagcgttgtccgtggatgggtgtcgtgagctgtggctgacctcggaagatttgggcgcatggggacgcgacattggccacacaattgtggaccttttgcgcgctttggtccaagtgatccccgacggatgcatggtcagcccatttgtgctcacctaa

SEQ ID NO: 81804 - DNA, 999 bp, Heterodera glycines
aagaatgaggaactgctgatcattcaggtggagaaaattcatggggaaatggttttgaatttaaagaaaggggatcataaaacgattgcgacgactcatttaaacaattcgatgaactcgaagaaaacccagcgcataaatattcaaaagaggcccagaaggggttcgaaatggaggacgaggaagtcacaatccgagaaccttcggggacgaaggaatcgttcaaattgcccatcaatatgccgccagtgaaattttctttttggtttgttttggactttgtctaaaaacttatttatcattcttttagtgtctcatgtggttatcgccaagcatatgaacagtttgcgcagattttacgcgaaaaatatcccggaattgacatccacggcgaaaactatcctcccggcattcttcgcacggtgggagcgcaggtgagtggttaagagaagaaatttaatctaacaaatgttttggcgcattcgatttgtgtcttaggtcatcggaatggtcaaaattgcactgattgtgtgcgttgtgtccggaaggagtcctttccccaccttgagacttgaaaccccaactttcttccaatggatgctcagcaatcgtttgtctgctgcacttatgctttttttattttccaatgccatcgaagggtaaataaattttgttactttcactgattgtgagatatattaacaagatcaaattatttaggatgctccaatccacaggagccttcgaaatttacattgaaagcgaacgaatttggtccaaattggaaagtggtcgcgttccgtcacctccggaattgttccagatccgcacaattttacttctccgttaatacccatttactttcattgcaggccattgacagtcatttggcaattcgcgggggcggccccggaagggtcatcgctttctgaaagattttttaaattcccctccaaatttcagtttggttcgccttcctctttcggcatcgatgggtca

SEQ ID NO: 81805 - DNA, 328 bp, Heterodera glycines
aggggccatacgaagaacagctgcaaaacatggttggagaactaccaaaaacacttgatcaggcagaagcaacgccagagcagcagaagaggacagcaaggcacagccggcagaagcgcgagtcatctgcagaagaggttctgaaaggcgaggaaaaattctttccctattttcactttttactaaaaaacccattctgattgtgagcatcgtccagtgatttaattttgttgttttttagaatgaacgcctcgcaacaatctcagatgagtcattcccagccgtgtctgctttcgtccagcgttggccaatcgcatcacaaaaatga

SEQ ID NO: 81806 - DNA, 2544 bp, Heterodera glycines
atggttcgacaaaaacaaactttctttaataacaatgatcttccgacaacatcagcagcattgtctcatggaaaagacgggttccaagctcccgttcaaaaaagcggtcaaatgaatagaagggttcaaagctcccttaataaaaagcggttgcatgaaaacaatgacaatgaattgaattttgaattatcaagcaaacgaaaaaacacagttgaacaaattattaatttggatgaagtttcgaatgatttttttaaaaataatgattgcgaagagattaaaaaccagaagaagatcggagagtcagctattcgtaaagaattatcacgaatgagaatgtctgatgaaaaaataaacatcgttcagaaatatgacaggaaccgaaaaatggcacaaaaaaataaacatacctctttatatttaatagctggtgaatttcgtgtaaatgatttgagcagttataatcttggtgaatttgatgttaaatgcattcattgcccagctattcattttcaggaagaaaacaacaaaatcaaaggaacccaagaattttatgactgttgcaactatggtaaaaacagtaatttagaagaaatgatacaagaatacccaatggatttgcgggttttatttcaacctgaaatagaccaaaataattacacacaaattggagagttacacaatgatttcaaaaagaaattaagatatttaaattcctctttttcatgtgcgtctttgggatgtatgcgatttaaatttcctgataaaaatgtgccaattttcaaaatacaaggtagcatttatcattcatataatagtgttgctaggccaaatgaagaagaactaccgacgaatggacagctttattttatagatactgatgaagcgattaattatcgattaagtgcctacaaagaccaattaacgaaactttcaaatgataatactatagctttaatcgcttacattgagagttacctacgcgaaaattatgtttattcccagtcatataaaatgatgaaagaagtatttgaaaaagcagtagaaatttcaaaaaatactgactgtgaaattcctgacattacaatgttatttgatgtaagagaaggaacagatttaaggcgctataatataacgaaatcgaatgaagtttgtgctatcatttttcgtgatgctaatgatgatatacctgctgcaaatattgttgtacatttaaaaggaagtaaaaaaatagaaactattttccctttaagtccaatggtcgaacctatgtgttatccaattttttatccacttaattatcaaggctggcattacaatataaaaaatttagaagggaaaaaaatttcattgtgcgatttcaccaaatataaattatttttcagaagagaagggaaatttttgccgcaccattatagtaataaattgtttcaacaatggttagttgatcaggcggcgcgaattgaatggagccgtttgaattacataaaattacatcaaaaagaattatgtaaaggaacatataatgagatagataattttttgtatgcaaaagctgccgaaatcggtgcgcaagttaaaaagaaagtgattttaccatcaacctttagtggaggaccaagaaatttacatgagagtttcatggacgcaatggcaattgtaaacgaggttggccgacctgatttattcctaacctttacctgtaatcctaaagattttgatatacaaaaatgtttgcttaattcacaacagtcatatgataggcctgatattgtagcgagagttttccatttaaaagccatccaatttttaaaagaaataatagacgggaaaatatttggaaaagtggctggattttgttatacaatcgaattccaaaaaaggggtcttccccacatacatatgttattgacattagatccagaaaataaatggaaaaatacaaatgatattgataggtttatatctgcagaaatacccaatgaagaagaagacaaagatttatataatttagtttctgttctcatgatccatggtccatgtgggcctgattttactgatgcagtttgttggtgtaataaaaagaaaaaatgtagtaaaaaatttccaaaacaatttcgtgaaaaaacagaaataaatgaaaatggttaccctttatataaaaggccaaataatggacaaacagttataaaaaaagattggaaaacaggaaaaacaaaagtaatatcaaaccaagatgtggttccatataacagatatttacttaaacgttttaaagctcacataaatgttgaaaaagttgctgatattaaagcggtgaaatatatttataaatatatatttaaagggtatgatgctgccactgtacgttgtgtcacaactgaaaaaggaagtgtaaaagaattaatatacgatgaagcgggttcatttcttgacgcccgttatcttagcccggttgaagcatgttggaagatttttaagtttcctttacaagaaaagtctcattcagtacaaagattaccagtgcatttagaaaatgagcaa

SEQ ID NO: 81807 - DNA, 1105 bp, Heterodera glycines
atgaagtacatttacgctgacggaacctttgcaagtgcaccaacgctcttttcacaactttacgtcattttggcggggtacttttttgtcaattttgttttacattcgtttttcaccaaatttcagtcgtggtggctgggtgtttccggtccttcattgcctgctgacgtgcaagtcgcagtccacgtacgaaaagatgtttgacatggtccgcaaccgctggccgacattttcaccaacaaacgcgtccatggacttcgaacaggcgatggtcaacgcactccgtgcaaaacatccacaatgctcaatcaacttttgcctattccatttggtgcgcaacatgaaatcacgtcttaccgacgagcaaactcacgtaagaaaaataaatttattgattttgaaattctcaaatttagcgcttcacaaccgacgcagcctttgcacaagctgccaaaatgatcacttcgctggcgtttgtgccgcttgaggaccttacaccggcgctggcagccctagaagattatcttccgggtgaacttgagggcgttctcgattggttggttgagtttttttccaatttccttattaattttaaaggttcataatcaactacgttggacggcttcgcaacaacggcacacgcactcgtccattgtttcgtcccgaagaatggagtgtgtacgagcgaacaatgaacggctccgatcgcacaaacaacttcgccgaagcataccatcgaacgttgcaacatgcgatcggacatggacaccccccaatatggaaatttatcaacattttgcgcgagcgtcagaaattaatcgacgtggacttcgaacatttcctcgccggaaatgctccgccgctgaaagcaaagcgttaccgtgaagcggacagacgaattttgagcattctgaagcgctacaatcaggaaaaagcgcagccgcaaatcaacgatgatcaccaatacggccaaaatcaaaataatccgaatttgtttaatgaaatgcttaggggatttccagcaattatcaaatggaatgaatgattattattgttttagcattttgttatttattcaaaattttattttacttttgcaaataaa

SEQ ID NO: 81808 - DNA, 1180 bp, Heterodera glycines
atgagccacccaatttggcaaatcggtctttttaaacgcattaaagaagattcagtcgattgcttggagtgtaagcaaaaaaacgttattaatttttcatcttcatcattttttggtttaaaaatatatttgaatacttttttatactttgaaaaacttttttattaatacagaattttttgaaatttcctaaaatccgcaatcctgcgcaggatcctgcagatttaaaatgcaggatttgcaggattaatcctgccggatcctgtcctgtaaaaaattttgaattccaatcctgcaacaggatccgcaaatttgaaatttccggtctctagtttcaacttcacaaattgcattgcgtggtgcatcttaacaattggccggggtattcgtggctttatgggattcgtagtttggacatttcgtggcttgggcactgtgggggggggggggggggttgatcgagcaggttaaaagccttctgattggttcttgtttggcattttattctaacttagtgataagtgccgaattgttggaccgaaggtcgttgctttggtttgcattcattgtcttttaccgctgaattatgaatgaaatgtcatgtggtagggcggtttagttcggaagcagttcgctgtcattaaccacggcagaagaaacaaatgtctctgactctgcccattcgcccggcctttttgcctccggactatgcttagctttctcggcatgcgcaaaaaaaaactcctcaaatgaagctgttgtttgcataaacggcataactgattttagcgacacttcacgcaaatgatgtcccttacggaggcaatttagagacaccggttctgttgcattaggccctctttcgcgcctccgtgtccgtactatttgaattctctaatgtattttttccagctaaattgaaaattaaattctccccctacggcgctttctatggcttttttagttgttaacatttagaaaagatgtcttttttttgcagagtcagtctttagctctcaatcatcaatgtgttgcatcgtttgttctcttaattgatgttcctttccgattatcagtgaactcaaatttcattgaaatgttgcgttcattgcttgctgatagaaccaagtcaaatggtttctgctggattccatttgcctattcccaaatggttcgttaa

SEQ ID NO: 81809 - DNA, 707 bp, Heterodera glycines
atggaaggtgtatcgaccagcaatgatttgaacgtcggtgagagcgatgatgaagaaaattgtgagcctgttcatttccaacgtggcaaaacaatccgaggagcgctttgtctttggcaccaaggtgttaaaatttttttttttggttttaattttaatttttaggctttcgctttttgaaaatacgaagtgatggcagctggttcaggtgcgaacggcgtaattgtccagcgacagcaaaactggaggatgagggactgatgacgggcgttttgggtcccaaagaacaccatcatggccttgccccatcgcgttttcatgcggagtcaaaacgaaatcagatgaagcaactgatcacggagaacccaaagcaacaaccatctcaactgcgcgcacagattcggaccaacgtcaacgacgaagtctttgagctgcttggcaccaatgaagcactcgaccaaatgacgaacaggtagaaaacaattcagtcgaataatgatacaacatttactagggccaagaacaaattctcgggctcgtgatgcaaggctttgcggagggacttcacgtccgtggaaattcagagagtggtgaagaaactgaggccgatgaaaattgattttaaacattttcatattttattgttttttttgatattttatatattttatgaagatttctttgctttgaagcacttttaaaataaa

SEQ ID NO: 81810 - DNA, 969 bp, Heterodera glycines
atggccgatcaaaccgacgtttttggggttgcttcgtcaagcattggaaagccaatcagagttgaacttgggacagggagcagaaaaacaattatttccggcaatttactaacgacagacccggagagcggctcaatagttttggttgagaagcgtcagcaaaataaaacatcggatcaggggaaatgcagccaacgattcattctgattcccggcagttctgttcactctgccaaattggttacaattaatgaagggacaattgggacggtaaaaaaggatggacaattggaggaagggacgaagagtaatgccgaactgcgcgagaaggcggacggaattgagtcgggggacgaagcgacaatcgaaagccatggaaaaaggcgagcgaataagacgaacagaattcatggtcttggtttcattacagaaccctgtccgaaactgtgagaatctttgacgaattcgcactttcgaggcgcctttgtctgattgatgcactaaacaaatatggcatcaaattcagcgaaaagccacatgttttagtacaaaatattgacaatggacagactgagggacaaatgccatcgacggtaatttctctgcagagcagcggcatcaaaatctatccgccgtacggaaaggtaagaaaaggctagttttaagttgaaacatttgttaggttattgactccactttctatctttaaaaaaatttgaaaaattttgatgagaggtcagcggcgaaaattacggatattggggatgtcaaaacatttgttgtctttagtttttacactttcttggggtccgattgaaaaatattttgttaaattttaccctccccatcaatttacctcttaaaattatgtttattgtttaaattcagaatgatataatcggcggtggttcaattgtagtcaaagaattgttgcacaaactctccacagaaaatgtttttgatgagtga

SEQ ID NO: 81811 - DNA, 1436 bp, Heterodera glycines
atgctgattgacaatgtttgggtggtccaactgttcagcatcgtcgccctgacttccttttcgctgtattccacttatttgttccccatcaactacttcgacttgctctatcgttgtgctgttcatcttggccattgggaattaattgagccgatctcacaacaaaacaatgccattccgtcccaacagcagcgatttggcattcggcaacaaaacgaacaacaacagcaaaatgaaacttacgagtctttcagtgagtcgtaagtgttttgccaaatgattttttatttgttaaaaatcgtgcggtttattgtcagtgcgtctgtgccttatcaagacgggacgcgactgcttttcaagggcaatttgtatatcgcgagaagtcatgcccattatcacactgtttctgctgaaccggacaacaaattgcattttcgactttttgtaagtaaaggaatgggaaaccgtaaaaatacgatagggccaaccgttgactcacaaaaatgtttaaattttccaacacaaaacagactaattgtaagaaatggtctacaatgtttggaatcactttaaagaatactcgcacatcatgtttattttaatacgtaaaaaatttagttttttattttttatattgctagaaattcttcggcattctgatcataaattttggccattttttaataatttcattcaatttcaaaaactccctcccataaaaatattctcaatttaagaaaattgcgaagaaccctgtggcattagcttcttacacttgtgtcttccaatgtgctttaattgccttcgaattttggcttcttttgttgacaaacgattggcaacaaattgtcactttggtccttcttatgtttgccaattatttgctgctcgcaaaaatgttcaaagatcgcatcataatcgatcggatttacaatccttctgaagaggatttgcagcttattaaacaattgcaggaggaaaatgaacgttcgcgcagagaaattggaaagcgaaaattggagaggaaccaaaagcgatgaattatatacgacgggaattttgcatggacgggacagggatttttggtctccggggcccgtagaataagagagtggtagtggttaaatgaccatgaccttgtagtaaaaaatggtagaataagagctcgtggtttgcaaccatgacctcatggttatttaaccatgaactttgtggttatttagccaccaactttaacccgtagaataagagacgaccatggttatttaaccctatgaccatggttgaaaaagctaccgcgcgagagggcatggttgcagaagtaaccaccatctttagccgcttataaaaattaatccaataattttaaaataaccaaaatgataattttagataaagcaagcttttctctttctgtatatactaatttcaataaa

SEQ ID NO: 81812 - DNA, 647 bp, Heterodera glycines
atgaccaaaaatatgagcaatttggtcgtccccatggtttggctcaacgaaagtgccctgatcgactcggccactcgtgcccaaatctcgagacctgtcacggcactttggggcacattcgtcgttggcattgtttttgtctgtgccggggtcgtctttctggtcacgttcgtcggcgttttcattgccaacaaaatgacaaatcggagctgtcccaatgactcactgaatttgatcgccgaccctccgacagagggcgacccaactgaggcccaaccattggcagctgctgatcagctcactacggatcagtgattattccctctgctgacgacacttattcaattcttttgctttgtttcattttttcaaatcccaaattgctcatcttaaaaccgtaccataattgaatctgttccaaaattagagactggtcatcaatagggctgggaatttaagtcaaatgactttttttgctgactctaaatggccttaaaatgacttaaaaagtgttctaaactttgtttgaagcgtctaacatgcacttttttgcgacttttttcgtgatttttttgactttttgaggcaaaatttgaattttagcgaagaaaatgccgaaaaatacaaagaaaatttagaaaaataaa

SEQ ID NO: 81813 - DNA, 972 bp, Heterodera glycines
gtgttcatctccgtttcggttgatgagctcctcttcaacggttaccaggacccgctgatcagtgaaatttgcagcaatgttttattcaaaatgatgtgcaaattggcgaatattccggacagaattggcctcttttacggggtattttttttactatcagtatgaattggccaggcttttctggcactgaaaaaaacctttcttttcttgaaaagtacttattttagtgtaaaaacttttgtttaaaactaaatttggcgattttctggaccataaatccactaagtaagtgcgtgtttttggatggtatttctactcattagatttactttcgttcagcaaaataacacggacgatggccaatatgcggtggacactggactgaacgaccccgattttttggaccgcgtgtactccttcaaagggatagagggaaaactgagcgacgaccattggtacggcgaaagggcgcggatgatcaacgggacggacgcggaactgtttggaccgaatttgatggatgcgccgaaattgcaaatgtaaaaaggccgatttggcggtaatttgagactggctttcgcatttcagattcattggccaactttgccggtgagtcgcacagtttaactcattcaaattcacacatattaatgcctttttatagttccttcgatttggaagttcgtcagcccgctctcaccgccggtctccccgtcttccgatacgcccaacccgactcggcgttggacatcgctgtgcagcggtcgcaaggcttttgcaacccgaattccccgcttttcttcaacgagagcgtccaaccgggtaaatgcgttctgagatgggctcttccatggtgcattttccatttccctttcagttggctgtgctccgtccggtcttctcgacatgtcctcctgtttccccggctctccccccattttcttttcggcctcccattttcgaaatgcccac

SEQ ID NO: 81814 - DNA, 3191 bp, Heterodera glycines
atgaggaggaaaaagtggcggtccaaactgaacatccccgaggcgatgttgttgatcagtggtcaacatttgcaggtcgtcggcgcggcggtggaaagcggcggtggtggtagtacgtcttcagcggtcggggtgaaacggcgtcaaacttcgacgacaaagcatcgattgagggaaggcgacgctttcccaaaagcggaggattcggcggacacaccgccgtcgttgtcgcaggtcgccagcagttcgggtgacagttcgtccggcgtttcgtccagcgcgtccatccaatatttgggcactcgccgtccgacggccattaaagtgcgtttttgtgtcgaaaaagcgatggaaaatgagaaatgccaaatttgcttcacagattgaagaagaagactcgctgaccagcgcgccctcctcctcttcgtccacgtcagcgcgagcactcgctgcgcatattggcaatccgtcaaacggccgggcacagcgaacggtagcagcaccatcccatccaaagaagcagcagcaccaaacggaggacaaagggcacggcgagacgcacaaaccgcagcaaacgcatcagcggaaggacaaccaacgagacaagggacagggcattggtggaaaattggtcagtcatcagcggcgagtgggacaattttaagggcaaaaaagtaaaagacgaaggggaaaatggaaaggaaggcatagacattttagttaaattttcaaccattttaattgaaagagtggggcaaagggaagattggaagggatttgtttacaaaaccaccaccaaaacgaaaagctgggaactttttttcacaatttaccagtgataaaaccccagtcgaacttgatgaattggctaattttgacgacaatttcgggccgcaaatgtcaaaacaacattcgagaagttgtttgaataaaaatataatttaaactatttttttcacacgacgcattgtcacgtggcatttatcaaaaatttgttaatcacacttttacccactaataaatcacacaaacgtgtgatgtgtgcctctctacaaagtgcaaatgttgtacatctctgctcgtccctctctccacccccctccccctctctctctttctctctctccccctccccccccccctctctctctctctcctatcccctctctctctctctgtctctctctctcccccctctctgtctctgtttccatttttcgaattgaactttaatggggacggatgggaaatcttgtgcgttaacgatgcgtgatgacatacatatatattgacagggttgaaaattcattttcttttctttggtttacccggtctctccggcagaacgacggattccttccccactccctccccccgtcggtttactgctcgaacaaaaataaataagccatcatgggacggtcccacggggagggtgaggatggggaagtatattttacgcttggtagccccctcccccccccccccccccaagggggcattacaataaaccccaaagtcgaccctaaatgttttcccattttggtccttccatgtctccccgtccctaccgccgtcgtttcctgtttgatatccttattagcatttccaattgcagttgttcgtggacccgtccacctcgcatcacccgtccaaggcatccgtcgtccagcagccgttgcgcgacatcgaaatcgcggcagccgcggggaacggaatgttcggtggcgcaattttggggtttgtactttttgctattcaagcgaaatgttttttggcacgatattgcggcgcgtatacaacgccattttgaattttatattggcattctgttcctttcgaaattgtactccttgaccaatttacacattttaaatccaccaaattttagcggtggtttttctgtcgctggcaattcgtcgtcgtccgccgccgccgctctgtatcaacaacagcagcagcaacatttgtcgggccatggcttgggtgccgtcgcatcaaacggcggcggtgcttttctaatgaaaaatggcaccggttgcggtggtaatcttcgtgccgcggcacaccaccaccacaacaacacgaacagccatcacaatttcgtgcaaccgacgacgacggcactgctcaaaccgatgggcgggggaactcaaattggacaaacgcagcagccggggcagtcgaagcagcaccagtcgggccatcacaagtcacgacagagcacggagggcgagtatcaggtgggcagggattggggacgaattggatttcccggggacaatgggacagagcgggagacaaatccgagtgggacggaaattcccccaaatttagactaattagtgccaaaatggaccaattcatggctaattattgtgatcggattaattttgctgtttttagctgatcaaaaacgaagtgctctcctcttcgtacggcaatcagtacgaagtgttggaattcctcggcaaaggcacttttggccaagtggtcaaagcatggaaaaagggcaccaacgaaatcgtggccatcaaaattctgaagaagcacccgagctatgcacgccaaggccaaatcgaagtgagttctgttgcactttgtttctggcattttttgcatttatttattttttctttcggtgtccattttgtcccgtctgagcaacgaaaatgcggaggagttcaactttgtgcgtgcctacgagtgcttccagcataagtcgcacacttgtcttgtgttcgaaatgctcgagcagaatttggttggttttttgctttgccaatgggcagccggacgaatttcattaaaaaggcaccaataccttcaaaaatgacaaatttacttaaatattttggttggtacctggtgattaatttcgattttcgctatattttaaattctaaatttgccatatttttgaaacaatttgtcggcatggcaaccacaaactgaataattgaaacattttttgatagcgctttatcgggacccaattcccgacgcttttcacctgctgatgatcttttgcttgattaatgcctcctttcccaaaattcagtacgacttcctcaagcagaacaagttcacgccgctccctttgtcgtccattcgtccgattgttcagcaagtgctcaccgctctgcttaaactgaaacagttggagctgatccatgccgacctcaagccgg

SEQ ID NO: 81815 - DNA, 3499 bp, Heterodera glycines
atggcaaataaatttgtgcttgtaccacaagaaatttaccggggtctcacctctgcgacggacacgggtgacatcaatttggatgctgtacgacacgatttgacgcgtgccagggctgaacgaacaaacccttcagctaaaaatgtcagctacaatcaacagcttaggcgatacttgcaaatgagacgggaggtcgcggacaaaccagcacgggttgagctagtcaagggattgagtgttctgatgaggcgaggcggtgcggatgatgaagcagaagttgtagatacaccaccccgccctcctcgtcctcctcctccaccaccgcttcctggtcagcatcctcctcgtcgtccaccaagccctccaggcccaggtccgtccccgccggggagtcctccgccgcgtccacagcgtcctccgagaccacctagagctgctgcgccgccctcttggagagatgggcgtgtggaggaatggcgaaaaaagagaaacgacatacaacaacggcagccggttgtgcgggaccttcttgctgaagcagctgctgctccgctacccgaaagtgacgaagaggatgactacatgttggagagcgattcactctgccagcaccatcacaatattatggcgacttgcccgttctgcctgacaacgcggacgcaattgaggagatggacactgcacagcacaggattgcaaccagaagaaagttacataatggcgatgacgatttgcatcgcaaaaaataccgggtctattatcctcctcccccttctcgcccacccccgtctcgtccacagtcaaaaattgaaacacctcgacctccaccgcgtcctagcctcaagaaacaaccacaaccactgctcgatcctcggccatccacatcacaacaagttgatcgcaaacctaaaagggagccaaagttcgatctggatccgcgaccatccacatcacggcaagccgggtacaacccccctgcggaaccaaaacatgagcagaaaccgtcaaaaaagccacctcctcgcgccacaccctatcatattccgaaaagagagccaaaaattgaagaaacagtgccacggcaccagcaaccttctcctgctgccccacaagtgccgcctgttccgccgcctaggagagggaccaaacgtcgccaccccccggaaaatggtgatgagagtggtgagctgcgcatacgtaaacgagtgaggcaagcgcgaagagtacgagtgtattactcaccagagccgggtccatcaacatcagcacaaagcgatgaacaacaacaacaacaacaacgtgaactgtttgccattccgtcaaatcagctgaccatggcacagagaattgagctaatatacatcaaatgcaaccgttatgccaatcgtatgggtgtccggggaaacgcaattatcaacactcaaaatgctcaaccattggtgcgaagcaatttacgaacggccatcaggtatataattgacagaagagcgggtcgacctaccattagaccaccgggagcggaccaattggaggagcggcttaggcaggacccaattttgtattcattgacggctccaccaaagagaccatcgcagagcacaaacagcagaacgtcaataaagaaggaatttcagccgaaaaaatggaaatgatcaacaccactcttgacaagctgtacaacgatccatcctctcctgctgcgtttgccggtgttagtgcactgtggaaggaggcgcggaaaaagttaaaacaactacggaaaaaggatgtacaacactatttggagggacaccgcacgtacaccctgatgcgccccaggcgggtacgatttccgagagcaaaaactgtagctgctggcttcatgaccgacgtccaagtggatttggctgactttcaagcgctttctcgtcacaatcgcggtcaccgatacctgctggttgcggttgatgttctctcaaaacgcctgtttgtcgttccactcaaaaataagaaggccgaggagatgctggatgcattcaaagagcttgtcaagcaaatgccaatggtcccacaccgcattttctccgacaaaggcaccgaattcaaaaacaaattgctgaaggaattctttgaggagcaggagattgagaaacatgagcccgtgcattcgtcagtgaaagcgtcagttgctgagcgcgccatccgaaatgtgaaacagcgactgtacagatactttgccgaaagggagacgctgaattgggttgatgttgtacaacaaatagtggatggaattaacagcactccgtcacgggttcacggaatgcgaccaattgatgtcaattttgaaaatgctcagaaggtgtggaagcgaatttatgaatcaccgcaaaaacgcaagaagccacgtttccgtaaagatgaatttgtgcgcatgagcagagagaagggacagttcgagaaggggtatttgccaaactatggagacgaaatcttggaaattgacgaggtgctgaaggcggtgcgccccgtcagatacaagctccgggatgatcgtggtgaaaaattccggggcaccttctatgaccaggagttggcccgcgtgagaaaagatgccgacaccagttacagaattgaaaaagtgtacagaaagcgaagaaaaccggatggaaccacagagatgctcgtaaagttcattgggtatcccgaacgagaatggattgacgagtctcagattgtataaaagcgtttgaatttttgtgtatttctcatcagttgaataaatccataatgtcaaatagtttctttgtgtttttgcctagcaatgtgacggattatccggacaatcagccaaacaaattccgggtccggcttccaaaacctttgcatttcatcgggtcttgggtgcgtgggctgcacagcattagtcaaacgccgcatcgtacgcgtgccggtcccaaggtcttcacagaatcgagttgaacagctgagagactttttgacgacaacgctgagaaaccatgccaatgctaaactaaagccactcccgcgagaggaagaagcggaccgtaacaggacaaaaccactttactctccgccacctgcaaagcgtgcccggagatctctagcgctctcttcgcctcccagacatgaagaagctcctgcacgatcacttgaatcgcctcccagatatgaaaaagcgcctgcaaaaccacttgattcacctcccagatatgaaaaagcgcctgcaaagccacttgattcgcctcctaggcatgaacaagtgcctaagaagccacttgattcgcctccattgtatgacgaatcaaagctgcaaaaaccacaaaagtcacctgaaaaaccaacaacatccactccaactaaaccatctacaccacctgcaagtactcctcctcctctaccaaaaccagcaaccccagcagctgtttctaaaccgtctcaaccaattgctcctgcaacacctactgctaaatcagtagcaacacccactccagctaaaacg

SEQ ID NO: 81816 - DNA, 1867 bp, Heterodera glycines
atgctaacttttaccaatttgtcaacagaagcagatgaaggtaagaaaagaattggcattgaaatggataaataaaagatgaaatatataaaaaaaatattccattaaaaaattgaaaagaagggaatttattttaaatttcaattctgtctaatataaaaaatagctgccgaattttggtcaaatatcttaaattgacatatggtcatttgttgggttcgaaaacaaggcatatatatatatatatccgcaggccttcaaaaattgccgaataccggaatataggccttatgtatttcagaatggaatatgcagatttttttttaatttcttcaaaaatttcgacaatttttgtagcttttgcactttggaacataattttgaaataaaattccggttttgaaatgcttaaattcttttattccctaatgaatttcattcaaaatttcagaagtgtattgttgtgattcttcgattatttttggtcaaaaattggacaattcagaatcaaccagtgatcaacaactgatgaaggttgtctaaatatgaacagaaacaataaaaagacatttaataaaaaacaattgtgattattctaattataggaaattagtcaaaagcttgccaggatggaaatggaattgcgggaaacggaacaattgtgcataatggaggacctcagaattgaagaggcaagtatttatacatacaaatttcttattgtattaaattatttatttactttttgcataaatatttataatttgcttttcagtaggcacttcaagcagagttagatcaacagaagcagatgatggagcaattttggttgttgcatgaaaaggtggaaaaaatggaaaaggaaaattacggtaagaaagttgattacttgaaattataataattaggctttacttttaaaaattaatcatattttttttaatatttataaaattttttgcttcctaattcaagcttctgatgatcaattcacagcacacttgcacaatgatcgaaaggcaattttggaacggatcagtgaattggagaatcggcaaaaggaggtgaataaatgggagagggaagaactgacgaaaaagatgacaaaaaattcgttaatttcgctatttattacttttaaattaaaaatgaaacttacaaatttagaaattttcaaatgtaaagcagccaaattgttgggatgcgaatgcttgtcactacgaaattgaagtcactgatgcccaaaaattgacggcggcaattcaagaatgggaaggagaccgaaggagtacgtataagacaaaataacagataaaatacctagcactttgggtttgaactcgttatgggaaatgttttcttttgctgggggggctttaattcaggggggggggggctatattaaagggaatacggtatttattttgttatggcatttatttggaaatttaattttcttcagtctttcgttctgtgttcgccaaacatccgcttccatacgccaccaccactgactttcacaacattttttactttgaaattttgatcataagaatgcgatggtaacgtaatttaaattaataaaaataataaatatttaattaataaggcaaaggttttttttattatttttaatttggcactttcaggaccattctcttcggcttttccgtcaaacagctgatgccattgaatgagaaaattcaggactacactggcacttacgtattttcaaattgcggtgaattttgggccaatggctcgaggaaaggtgaaactgccaaattttcccgtgacgatgtggttggcattggcgttgactttggcactcatcaaatattttttacgaaaaatggacaacgattgg

SEQ ID NO: 81817 - DNA, 481 bp, Heterodera glycines
atgttaggcctcggatgggaatcgaacccactcgtgcaccctttccatgggcaagctctaccattgagctaccgaggcacatccgccctttcttttatggattatcaagcccgctttccacgttttaaccgcccagccagcttcttctttcagagctatcgaatgatactaagaatgtttaatttggatgcttctagaagaagttttgaagcgttaaagttgtcattctattttgtggtcatgtttatttttatgatcgtgtaaactgcaatagagccatttaattcaattaatcaagtgaatatcggcgcgactcgtgcggatcccttcgcgacggccaaattggacgcacgatgttcagaagtggtggcacggcttggatggtctcattaatgtcgaatgaatgccacaaaacgggctaactctttttcacagctgtttacttatattattgtacctatttaatttaaaaagtaataaa

SEQ ID NO: 81818 - DNA, 2742 bp, Heterodera glycines
atgcatggcttcgaccctagactcccaagtgaagtgacactcggaaaggtggaggataatttttcggatatggcaatatatgtgcaggagttgacaaaacgaatggaagaagttaagacaacagtaaaagaaaatctgaggaaatgtgccgatcaaatgataaaacaacaaaaatggacaaaagagatcccatggagggaaggaatgctggtactgaagcggaaaattgacaaaagaaataaactggaacaaaattacgatggcccttttcgaatagttactgtagagaagccaaatttgacactcaaagagatgcatgcagacgctatggggtttacggtacacatggaccagtgcaaccgtatttttcaaaagaagaacaaattctggtaccaaacgaagagccaaatttgggatccaaaagaaaaatcggggacaaaaacttggaagatacagacggagaggaagagaccgaaataaatgcaataagcatggaaatgcttaccgaatttgatgatggaaataatttgaacaagcacggattattatttttgatggaaataattttggatggtattgtcatcaccgccctatacccgaaagactcttttgaattttcatcaatcccaaaatctatggttcaatcccagtgggaaatacacaagaccagagaaggagatgaatatttaaccgcttggatttttgacgaaaacattcaacttttcataactgaggaaagggaagacttaattattgggaacgaaattcaagcgtggttaaatcaaaacggaaatgtaatttgcgaaaatagagaagcaacctactgggagacttatttggacatggacggactcatttataaaaataaaatcacccccgaattttggataacctataatgagcccgaaatgtgtaaagaatacgaatctcgatcatgctcctcttcaacgatttttttgaatgccgaagaatgttcaaattcaaatttacaggacaaaaaaatcaatatcctacccctgtctctaataatggctaatgctgactcaccaatactaatttctgatgaggaactaagcgacgacgaaatacatttgagaaaattactattgtcggaacaacagcaacaacaactacgtgagcaacaattcaatcccgatcggccctactcgtcgacagtgcattccctgcccaccaaccaggtccaaattgtgaccccagcacaaggacaacagctaaagcgtgaccaacagctagccctgattaatcagaaaataaaagagatggaagccgcaaaaagacaaattgaagaagaagaaaccgtcgaagaagaagcacgaattgtaagagaaaaggcatggaaagcggaagaacagaagaaaaggacaaagagggaattggatgaaaagatgaagaaaagggaagaagaaaagaaagcggaagaaagggcaaaaaaagacaaggaggaagtcaaagcggcatttaagaaaattggaatgagtaccgaagtggggggaaaagaagatggaaacaaacaaaaaaagaacaaatcgaagaagaaccaaaagggaaaggatacggaaagtggaaatttggaggccgaaaaactcaatgatggacatagggaagctaagaaagatgcagaagaaaaggcgacgagagaagcagaagcgaagaaagatgcagaagaaaaggcgacgagagaagcagaagctaagaaagatgcagaagaaaaggcgacgagagaagcagaagcgaagaaagatgcagaagaaaaggcgacgagagaagcagaagctaagaaagatgcagaagaaaaggcgacgagagaagcagaagcgaagaaagatgcagaagaaaaggcgacgagagaagcagaagcgaagaaagatgcagaagaaaaggcgaatagagaagcagaagcgaagaaagatgcagaagaaaaggcgacgagagaagcagaagcgaagaaagatgcagaagaaaaggcgaatagagaagcagaagcgaagaaagatgcggaagaaaaggctaacagagaagcagaggagaagagagacgctgaggaaagggcgaagagagaggaagaggaaaaggaagcggcagcagaaacaaaaagagacgcggaagcaacggcaaaaatacacagtgaaaaagaaaaaaagggaaaaagagaagggaatgtctcaatcaatgtggagggcgcaaagaagaaaattatggagacaattagcgaaaaatggatacccaaaattgtgggaagcatttttgacccgcgaggtgaagaattgggggacgattggacgatcaaaaaaatgccaagaaaaccgggaaaaagaggaccgactgagagagggaaaaagcgaagagcgaatgaaggcgtggaaggaatggacgcagccaaaaaatcaatgggaaagtggtggcacggcacaaggagggaaaagattttttgagaacacgctgaaatccgcagtgatctcggcgaatgagacacgagccatcccaccggaaggaatgggctggaaacgtcatgtaccatgctttcaagcagcgccgcctggccccggcttcaagcgccgacaccacgacgtgagcccaatcagaagaatggacagcacgggacaagggacatcggcggcgagcggaacggaagaaaagatcgtgaaaattcgaaaactgttgctgcaggccgccgacttattgggagaaatggcggacgaattgttcccgtataagaaatag

SEQ ID NO: 81819 - DNA, 105 bp, Heterodera glycines
acgggacaaatgcgtggccaatttcaactcgaagttctgcccaaagttgggcatgccgtccacgaagactctcccgaattagtggcaaaaattttcgttacgctg

SEQ ID NO: 81820 - DNA, 937 bp, Heterodera glycines
acttaattaaaaatcgacaatgtcaccacattcgcctcatacttctttactgcctgaagttcccttctctatattaataaatcattctccagaccttattggtcccagggtaatggatgcgacagacaggacatttataacttttcataatattctgtctaaatatatcaatcccaaagagcccaatttcgatgaatttctagacgcagctaccttctgttacaatacttccattcatgaatcaactggcgaaagccccttctttctcgtgtttggcagagacccaatctttagtattgatcaaattcttgatccttccgtccatctaccactccctcacaatgacttagctgagttcaaaaccctccttgtcctttccctaagaaaagcctggaattctgcagctgactcaattaaagaggctcagaataaatcaaaagtacaatatgataagaaatttaggaatcctaatatttccattggggaccgtgttctgttacggaattatactggaaaaccgggcacttcccaaaaatttcacaatccatggaagggcgttttcagagttattaacatagaagaactccatgtcaccatcgtcagttgttcctccccacaatccaacccatttaaggtccatattaatcaactgaagaaactttttgagatttccggtcctcccagcacctcccccgtcctctcttctgctgaaaaagctgctttagaagcagctgaagccaccgagataccaaacacgataggcttcaatcatacccctgatatttcaccaaaaaccctccctcctgatacccaaaaatccaatgtaccccaaattttacctacttctattgacaaagaacaagcggttttctctcagcgggatctcttgcataaaaataaatacaatctccgctctcgcccaaggtctaacagtttt

SEQ ID NO: 81821 - DNA, 2877 bp, Heterodera glycines; identical to SEQ ID NO: 17344

SEQ ID NO: 81822 - DNA, 487 bp, Heterodera glycines
caaaagaattggtttccgaatttttgaacaaattccaaacactagcggcacagacagcagatgtcggcgcgttcatgggaaggatttccttggaagcgtatgccctactcaaagggtgctatgacgttagtcaaaaaccatcataatgggcgttagtcaaaaaaccatcaaatgaaaatattttttgatataactttgttcaaaagcatctaaatttttaattcttgatatcattaaatagcactaagagtttctattagcctacaaaaaaaggtttatacagaaaaacattaaaaaattgaatttttaattattaaaaataataccgatgaatcaaagtgaaaattttcttaactaatttgctttttatttttagaatgtgcatgttccatccgcacatttgtggcaacaaattgactttttctgggacccaaatgttgacaaaaacgctgacgatgtgaggcgttttaaacagatgcgctggtga

SEQ ID NO: 81823 - DNA, 920 bp, Heterodera glycines
atggccagaaggaactcaaaaacccagtaattcgaactttttttgctcagatttttttgtgcataaataaaaatttttgaaaatttgcaggctaatagcatttttcgaatgctttcgaataataccaagaatgtttaatttggttgagaaagaaaaaagttatggtcgaaaaattcgttcgacgacgtttcggctgacgacgttttgtcctactccgctattttcatacagtcaaagattgcacaatcgtcgagtggcacagttgcttacgattttctttgatgagctggcgtcaggtggaaaaattaaaaaatttgattacattttcaattaaagggctacacctttggtttacaaaacttgaaaacatgtggcagaaaacgttttaaaaaatggaagaatccatacgtatatttttttaaatttaattttatttgagtttggatgtttgagtataaaggaggtaaattaaaaaaacgtcgggatttcttctttccatattcaccaatgttttgacttttggtctttttcgccattaaaattcctagtgattaaattttgagagaaacaacgataattggtgaattttcgattttagaaaaattgacactacaattcggcacaaaacgcatttcgtgatgtcaaaacaattttgattggaactggcactgaacctcaagaagtgccttctccaggacataatcagtgaaaggctttttcatcgcaaagcaatccaggaaatggaaaacatcattcggctggacgtgcttagaatggtatggacgtgccgaagactgagtccactgtttttttgaaaaattctccaaaattatccgtttatctcgtattttaatccatgttttggtgttttttaatcaatataaatcccggcctttaatatatgataatagatttattaa

SEQ ID NO: 81824 - DNA, 385 bp, Heterodera glycines
cggagtaggacaaaacgtcgtcagccgaaacgtcgtcgaacgaatttttcgaccataacttttttctttctcaaccaaattaaacattcttggtattattcgaaagcattcgaaaaatgctattagcctgcaaattttcaaaaatttttatttatgcacaaaaaaatctgagcaaaaaaagttcgaattactgggtttttgagttccttctggccataacttttttaaaacttaacgaaaatttttgagattttgacaattaataataaacacatagagctatcgaacaacaccaacaattcttaatttgattgacagcgaacaaagttatggttcaaaaagttttccgacgacgtttcggccgacgacgttttggggtgcaccg

SEQ ID NO: 81825 - DNA, 488 bp, Heterodera glycines
atggcgttcaacggcatgttcgccaacattacttttgacggttctcagtcgagaatggactggtatctaaacaaagtaaaaaggcgagtcacggacatcattgaccatgttcagatatatgtatccactgaacttgtaagtcgctttttaaaagattgtcgaaataaaaaaataatgcaaaattcggcgccggaccgggagacccattttcttgattcgggtccgggttttgtttttcacaaaaaaccaaaaatgtttatggaacggagcaaaaatcgaatttaaattaaaaataatattatctttaatgtttgtcattagaatgcaaaaaataattgaaataagtagaataatttcagcaatttatagtaacacttacccaacttgactttttaaaaattcaatacccggtgtccaacgggtctaaaaggcgtggaaaaatcccagtaaaagttttcatgaaaataaagaaagaaagaaatttttga

SEQ ID NO: 81826 - DNA, 69 bp, Heterodera glycines
atggattatggggatgaacagaaaaggaacaaaatgaataaaatggtgaccaatcgaatgaagggaaaa

SEQ ID NO: 81827 - DNA, 1082 bp, Heterodera glycines
atgcaatgctttcttctgttgttcgctgcaccgattgttcttttctcgctttttgtcaccacaaatggtggccaaatgtgcttcagcagttggacatccgtccaaagtgcgtgccatcggccatttatgaatttgtatttcaaagaaatggccaaccaattctgtgcaaatgtaagaggcaattaaataacttaattgatatttgccacatcagacgtaattttatatgtatgacttttcaatttcattttcgaccatttaaagttaaacggcgtgctatgcaaatcgccggtcaacgaagagcaaaacactgaacttttcagggaaatttgtccacatttgttcgctaaaaatggtatttttcaaaaataattaattttgtatgaccaaaataaaaacggataaaaaaaatacaaaacggagaaaatggacgaaattagacaaaaatgcaaattttgaaattcgaagtcaatgctaaaatttagttgtttttttagtttgtgaagtcgtatgattttgaaaaaaccaaatataaaaattttatggtatttaaaatcaaaatattacaatcaaattgttgttgcatctttttaaatgccactctattcacttattctccaggtggtcgttcgccggcgcaactttcggtgccgttggcgcacggcggaatggaagtgatgctttgcttccacggacagccaacaacgacgtgggagcaacaggcgtggatgatgccctcctcctcctcctcagctcatcaaatgccatttcaattcggcggcttttcggccgatgctacgcagccaaaggcgggacaatctgtgcaaaatgttgcagcaccacaaatggtaccttcagcagcagcaacaggggtgggtggctcaactttggagcaacaaccgatcgttgttggaagagtcagtcattagggcgggtgggcaccgctcaaagaatcggtctcgccagaaaagtcgagactttctcggaggttttggggtctttgtcgagactcttgaaattcaattctcgggcagttttatgataatccatgcagcaatacaaaggaagtcgttcaaattaaa

SEQ ID NO: 81828 - DNA, 1366 bp, Heterodera glycines
atgaacagatatcaaacagttttcgcctattctcaagtgttggcagttgaaagtattctaaccgatttaggtatggaattggtggaaggctgcatttaaaaaatacccttttggtgaaatatttttgacacttttctatttgtttaatatttttttgaagagacggattccaaacctccggagcgtattccaataaaggcctaatataagttttatataacgtaatccaaatcttagatgatttggatttaattattctaaacaaggaacgcatacgtaaatacgcattccttgttatttggttaacatgaccggaaaattgtaatttgttatcaatatttactcctaagtccctaattgtatccacagcatttattgtattcccatcaaatttgtatgtttcttttgggttttttgaacccaaatataatacaaaagttttttgaattgaaacttttatttgccatttatttgcccattcgaataagttatgcaatgctttatgcatattttctgtgtcagatcttgctttatagcatatatatattttaacatcatcagcatattattttattttcactcctgatggcaaagcatcaggaagatcgttaatataaatcaaaaatagtaaagggcccaggacagagccctgggggacgccagaagtaactttttttacttgaggataaggaatccccaattttaactcgaaaaatcctattactcaaaaagccctttatccacaataaaagtttgccctttataccaattttcccaatttttataaaagtaaattatggggcactgagtcaaaagctttctgaaaatcaatataaatacagtcaacattttttccatttataattgctacacaactgttattagttgacttgtcgtagacctatttctaacaaaaccaaattggtattccgaaattttattgttttttaggaggaagttgtaaatattttggctaagaattctttccataaccctgcaaagtgagcaggttagagaaataggcctataattttcaggattacatttatccccttttttgaaaagaggaaaaactattgataatttagccaatgttatccatccacaaattggaaaatttactttatttatttatttttttgattatggtagagttggggctatgaccaatatatattggaattttctttgtactttacctatttagaatttttttttattatttttaatatttttttaagcaataaatcagtgcgcaagagtgaatcaacaacatcacaacactcaatggagatgcgtttggtgatcccatgctgtgtaaatgcactgattttcatcatcggtacatttttctcatttaaataaa

SEQ ID NO: 81829 - DNA, 1819 bp, Heterodera glycines
aaagttgacctaaattaatttcagtataagaggaatattaaacataaatttaaaaaagacggaaatttttttgaaatcaataaaaattgacccatttaaaaaaaatattattttcaaaatttcataatttttaaagtaatatttaaaagcaggactcccattacaaaactttcggctaaattttcagatcaataatttaaaattacaaaatttatttaaatgagaaaaatgtaccgatgatgaaaatcagtgcatttacacagcatgggatcaccaaacgcatctccattgagtgttgtgatgttgttgattcactcttgcgcactgatttattgcttaaaaaaatattaaaaataataaaaaaaaattctaaataggtaaagtacaaagaaaattccaatatatattggtcatagccccaactctaccataatcaaaaaaataaataaataaagtaaattttccaatttgtggatggataacattggctaaattatcaatagtttttcctcttttcaaaaaaggggataaatgtaatcctgaaaattataggcctatttctctaacctgctcactttgcagggttatggaaagaattcttagccaaaatatttacaacttcctcctaaaaaacaataaaatttcggaataccaatttggttttgttagaaataggtctacgacaagtcaactaataacagttgtgtagcaattataaatggaaaaaatgttgactgtatttatattgattttcagaaagcttttgactcagtgccccataatttacttttataaaaattgggaaaattggtataaagggcaaacttttattgtggataaagggctttttgagtaataggatttttcgagttaaaattggggattccttatcctcaagtaaaaaaagttacttctggcgtcccccagggctctgtcctgggccctttactatttttgatttatattaacgatcttcctgatgctttgccatcaggagtgaaaataaaataatatgctgatgatgttaaaatatatatatgctataaagcaagatctgacacagaaaatatgcataaagcattgcataacttattcgaatgggcaaataaatggcaaataaaagtttcaattcaaaaaacttttgtattatatttgggttcaaaaaacccaaaagaaacatacaaatttgatgggaatacaataaatgctgtggatacaattagggacttaggagtaaatattgataacaaattacaattttccggtcatgttaaccaaataacaaggaatgcgtatttacgtatgcgttccttgtttagaataattaaatccaaatcatctaagatttggattacgttatataaaacttatattaggcctttattggaatacgctccggaggtttggaatccgtctcttcaaaaaaatattaaacaaatagaaaagtgtcaaaaatatttcaccaaaagggtattttttaaatgcagccttccaccaattccatacctaaatcggttagaatactttcaactgccaacacttgagaataggcgaaaactgtttgatatctgttcatggcgcataaaattgtttatggccgaacagatctgaaactattttctatttttaatccctcaacgcgctttaacatccccttttacagatttaactcaaaatataaactgggcaaaaaattcattccctttgctgggagggtaacaaaattgtggaatcaactcgataaagaactaatcaaaacaaattctttaaatcaatttaaaaccaaacttagaagttcactagggtaataaaaccggaa

SEQ ID NO: 81830 - DNA, 580 bp, Heterodera glycines
atgaaaacgttagccggagtcgaactcatgacaaaagtactgttagtgttgaaacactatccaccaatccacaaataaaagaaaacacacgtaaaatttactttatttcataaaaatttctcaagatggttaaaaaaaattcaaaattgtataaattttttgccttatatcccacgaatatgccattcttaggggtgtgtttttcacccacgcgcccccgcgggggtgaaggtcacgggggcgggggttgcgggggtctgggtcgcgggggcgggggtgaggccaaaatatttgtcacgcccccggcgggggtgggggtgacgggggcggggctcgaaccctagtcaaaaataatgcaaaataaaaatttcggaaaaactttaagtaattttgattgttttagctttatgccagtatataataaatattgtacatataatttgtataatataattgagttttttcaccttttgaatgaattggtggcagatccaaattattggacggttcattatgttcaaaggctgagcgtcccaatgcaaagtgttgcatttccattagacaataaaaattaaataaa

SEQ ID NO: 81831 - DNA, 1539 bp, Heterodera glycines
  unsure (1)..(1539): unsure at all n locations
atgagcagagagaagggacaatttgagaagggatatttaccaaattatggagacgaaattctcgagattgatgaggtgttgaaagcggtgcgcccaattcgatacaaattgcgggatgaacatggtgagaaattcaagggcagcttctatgagcaggagttggcgcgcgtaagaaaggacgcggagacaagctaccgtatcgagaaggtgtacaggaagaggaaaagaacggacgggaccacagagttgcttgtaaaatttattggctatcccaatcgggagtgagttcatgagtcccaacttgtataaaagcgttcacatttttcaatatttatgcagataaacaatcatgtcgaacagtttctttgtgtttttgcctagtaatgtgagtgattaccctgacaatcagccgaataaattccgtgttcggcttccaaaacctttacattttaaaggctcgtgggtgtgcggactgcacagtatcagttacccctactcatggtcaaccattggcacattggatgagcaatggattgacattcacttcaccgaccgcagagcgaccgatgaggacagacagcgagtgatcagagtgccggtgcctaaggcatcgcatagtagggttgaacaactgagagaatttttgtccgtcactttgagaaatcatagcggtgcaaaactacaacctctccctcgtgaggtggaagagaatcggaatcgtactacaacaaagcctctcggctcgccaccgcctttgaaaagacagaaaagagatacggtgtttgacgcgagtagaaaacagattgcccctcctccattgcataatgaaaatgatgacgatgaagaaattattgaggagtcaccacctcatcatgaagaagaagatgatgaagggccaattgaggagtctccaccgcattatgatgaagagcaaaatgatacagtaacagctcctgtcacaccaaaagtgccggtaccagcgcctgtcacaagccctgcgaaaccaacaacagtaaaaacaccagctactccatctgtaacaacaccagcgcctcccacaactgcaaagctgccagtaaccgtcccttctccaaccacaaaaccaataacaccgacccctcctcctaccacaaccacacctacttcaaccacaaagtcaacaaccggtcctctacctaccacaaccacacctactccaaccacaaagtcaacaaccagccctccacctaccacaaccgtccctccagcaatcacaaagccatcaaccggccctccacctaccacaaccgtccctccaccaatcacaaagccatcaaccggccctccatcaacagaaaagccaataacaacggtccctccgccgccanagacaacaacaacaacaagtacgccagcaataagtgcagttcctagcccatctgttaagccgacgattccggtaccgccggcgcaactaaaaagctcgggactgtctccaaaatcaaaaaccccaatttctactgttaagcccgccacttccagcgttcggtttccgctaaa

SEQ ID NO: 81832 - DNA, 1897 bp, Heterodera glycines
gttcgaaacccgaccatcttcacatggcggtgcttttgcattccgctacgatgttgaaatggtgcaactgactagaaacaaaagtttgacttcgggcggtggcgacgatgggaaaaatggattgctccgcggcgtttgttttgaattgatcaagttcgtgcacgactcgacgcagggatttggacaagcggtaattccctctaaatcgcattcaccatttaccttcattttaggcacaattcgtttacgacaaccgtaaaatcttattcacgaacaaacgaatcgaacaatttgtttgctttttgtcttttaacattatgtaattatataattttaggcattggaaattgacacggaaaaagtccaaggaatcgttcgcgatttcctgcgtgggtctccagtcaaaattgaggttaggccttgtcagactgataagcatgagctggatctcaacggcattgtttcttcgatttcgcaccatcctgatcaacaatcggacagatctttgcggactttccttgaaatgctgtcttcccagccatttctcaatgcgtaattagcagtatttaattttttttaagtttattcttagtgggacccatgacatcattggcgctggtcgtctttttaagcgtcagatctgcaaagagctcgaagatggcattgtcacgcgcgagggtattgctaagggagttcgcgtcattgacaacaatggtgaaccaaaggcggctttggttgctgacggtttactttgtattttgttggttgagtgcttaagtttctctttagtgaagacttgtgcattcttcgcaagtcgtaatcttgaggaaatcgtcatggagatggtgcagaaaagacggttcaacatcaacaatgcttcccagatggaccgattctggtcccacttcaatcacttgtttcgcggcgttagcggttatctgacctatgcaccgtcgcgcgtcattgtcattgatgcgatcagtcaacggaagatgtccgagattaggttttgagggttttatggatcaaataaaacatggttttagttttgacgttgatggtcgttctatgtctatggtcgactttttccgtactaagaagaacattccgataaacggacagttgccggccgttcgccaacagcaggaccgagaggttcttattttaacaaaattagaactgtttttataaccacattttctgttgtagacactgtttccaatgtcttgtgttatcatcttacctggtcagcgagtgaccatcgacaaaatgtccgaatttatttcgcgcgaacttctcagtgtaaacttattatgtttcttttaaatttactttgaattttaaggccaatacacagcctcccgcccgtcgttatgctgccattgaaatgacaatgaaacagattggtgctacttcgtcgggttttttggccaattttggtgtcagactcagtgccgagtcaaccgttaaaattggagtccatcaaatgccaaaggtgtgtttcgagtcatttgcattttttcaaccccattccttttcattgtcagatcaaattcggcaacactgtcacctctttccaggacagagttcgaaaaaagcaaacaattttaaattaatctttttttgaagatcaatccggctgttcggtttttggagccctccgacattttgtctcaatgggtcgtcgcttttcctggtcatttggaagaatcgactgtcaggtgggtcgttgagtttatagtaaaaggcaattattattttgtaggaactttgtaacgcaaatgatacgcatgggccaacagaagggaatggtccttccacagccgacgttcgttcgaattgaaattgatcatgttttgatggcctctgcagttgtagcattttttaaatatataag

SEQ ID NO: 81833 - DNA, 570 bp, Heterodera glycines
atggcagaagataatgctcaaaatgtattggtgttactgtgattttactgtcgatttgtcactgccatcgttcgaatgccctccctaatcaatcaattaatcgctaattagtttggttcatctgatcattgcggccaatcaattgattggtccgatttactttccatttgcctttcccctttttatttaaattatcattgccttttgattgttcatcctcattaattaattaattataataccattaattttcattttcctaaaataataattttctgtttgttttattttttgttttttcagctgcgcttatttattatttgaatattattattctttctcttctcttcttccatggattttgttctgtcgtggacggacggactgttcaagggaatgtgctcatgtggaagtgacgcgacaatggccgatcggatgaaaaaggacgggtgggtgagggggagggggggaaggctggcagagggaaatgaatggcacaatttggatgggaatggcacactttcaaattggatggcattggcatatttgaatgagaaatggcacaataaa

SEQ ID NO: 81834 - DNA, 1858 bp, Heterodera glycines
atgaagaacaataaagtgatgttcagagaggcgattgaggtgtttcctttcatttaccattttcttcctttttcactgatattgcaaaatcaggtttttggttcatagccaaaaattaattcttattaatgcttttaaaattggtttgaattcgttaaggcattgctttacaattggtgttattttgtggccttgccttattttactacattttcattgtctttttagattcttcgtgcacgaatggagctcctctcaaacaaaagtcctcacgaccagtcgtttttcgagcagcaaagtgattatattcaaaatcatccggtgtttcattcttctccgtattcatttaactttctttttaggccgtaaaacgtgttgacaaagacaaattggagcgggtttggcaatacttcagaccatttgccattatcagagatcagatggtaatttgcagaaactgattcccaattgataattcttttagctgttgtcaaaaacggatttgcaagagatcgaccgatacatcgaaggggccgacatgactatgacgccttaccgattggaattgcgtaaacagattaggcagttggaatcttcaagcgttgcgcccgctcggcctggagatgtacgtttaattagggtgcacccctcgcaatcgaatttcgccgggacataatttcaccagaattttttttttgaagtcataaattttcttaaaaaatttctaaatttaatttttttctaaattatttgcggcgaaattttgtcccgtccctgcttaattaatattattacaaagcattagccttactcaccaacctttaagacgaacagcagcaagagaatttgagaagatattgagggatagacatgagaaggaaatgcaacgattgcagaaacgaatggaggaacttaaggaggtcaaaagggtgggggaatattacggaaagagacattttcagttggaagaagagacacgaaagcgaacgaaggcatagacaacgcaacaggaatcattcacccatcgcttgttttgtttgcaattgttaggttaaagcagttttgattcaaacttaaaccatgttcgtttaaacatcacaacattatttgtctgttttgtttaatatctgttggaagttgtcttccatttgtattaacaaatgtctgtccgtcgggtcatttgtgcgatttcgggtggagttgacaggtcagtttttgtggcatttgtcaatttggaatttgttctaatgatttccctttttgctttggtgctgtgagtgcgcttttgctcaaacgccgcggatttgatgtcgtcggcgtgcatatggtttaaaaccttatccgtaaagtggaaacttgccaatttctagacgaattgggaccctcaggacgaagcgagtgactcatcgtcctgcccacaggtaaattgaattttcgggttgggccaatcatcctgaacaatcagtccggactaatttccattacccattcaaatgatctcgtacactgtcataaatcgcttttttcctatttttcagagcgaggaccttacggattctgaaaagttgtgcgcttttttgggaatcaaattgcatattgtcaattttgttaagcagtattggaatgatgtttttatgttagtgattttttcgggttttatcgaagtaaataaagttttagcaattttgtggacaattgctctttcggtcggaccattgtgcccgatgttggctgtaacaagaaaatcaaattcaaccttttgcgaaaggttgccttcgaagagcttggagcggatgctcttgctaccggacactttgccagaacttcccaagggggtgcgtttgacatgagcctgtga

SEQ ID NO: 81835 - DNA, 1357 bp, Heterodera glycines
atgatgaaatgggcccgtcgtcaagaaaagataaatatgtcatttaaacttaactcaaacgaagtcgctgcagaatcgtgtgaaagtcaggattcgctgttgacggtagcccggagaaatctctgcgtcaactctgcagacgaacgaaatgtgaatgaaaagtcagaggcggctaaggttaaatttggactgattgcaaaacgttattcacatccgttttcagagactttgggacgatgacgatgaggttgaagcagcgcctcctcccgacgccgttttacccggcagaatgcgcgggcttacaaatcgccaagcgcgagttcgaattgcacgcgccgagctcagcggcggactggccgctgtcgatggtagaaattggatggcgatggactcgggacgaatcgattgttgttcttttgcgtccgactctctgccaatccctctctcctcacgggccaatgcggaaattgcctcttgctgacgcagtccctatttacagaccaacaacagcagccaacaccaattggtgatggcgccggaggacagcagcagaaacagcacaccgacactgatttgacttcttcttttgaccaagaaaaatttgttgaccggaacaaattctcatgcctcctttgccgtcgtcaatttgctaatagcgaaacattggacaaacacattcaacttagcaacttgcataaggtaacaagaaacaactgacaaattaaaacttggcagttcagagtaaggtcgttgaaaaaatacgagagctgcggaacgcgggcattgcaaaagcggcacagagtgacacgtcaacaatgcattacagggatagagccaaggaacgtcgggaacagcacggctatgatcccggtttagttgacttaaattactaattatcataggtatttaaggaataagcagtgggacgacgaatgaatcagatgcatcttcaagcatcgaattgacagccctagtgaaggcttctgtcccccttgatgcaacgaacatcggcaacaaaatgcttaaatccatgggatggacagaaggccagggactcggccgaaatgctcagggtttcaaatatttgtatatcccctcgatttttatttaataacaggcatcagagacccaatcagagctgaacaacatgtgcaaggagctggccttggtgcatccggctcaaagatggacacgaatttaccatggaaagtgcggaatagacaagcggccattcagcggttcagagacttggaagaaactactcgacaagactgatggaactcgaaagcaaatataccctcacatcctagatggccgttcataaattgctttgctttcttgtgaaatatttctttta

SEQ ID NO: 81836 - DNA, 670 bp, Heterodera glycines
atggatttagtgcttattgtgcagcaatatattaatgaaatggtgcgattagcaggaccagggatgaaagccattctaatggacaaagaaacggtttgtgagattcttcataaactacctaaatttgtttaacaattctttacaccttaaagacgagctgtgtttcttgtgcctatgcccaaagtgaaatgatgcaaaaggaaatttacctgttcgagcgattagattccgttgtcattcgcgagcctatcaaatttttgtaagtttattttcgttcatctaatatttgtcatttagaaagtgtgttgtttttgtccgtcccacacaagaaaatgtgcaattattgtcggaggaacttcaatctccgaaatattcgcagtattatatttgtaagtgatttttttattggtacagttaatccccccccccccccccctccattgtttccctctccccacatcgtttcttctccgagaaaaatttaaaagaaattttctatctaacattatttaagcctaaatatttaaataaatgattttcttaagggggaataattacctgttccatctctgaaacatgttttattttaattaaagatttttcaaatcggattccaaaagcggacgttaaaatattaccggagtcagacgaacaagagactgtgagagag

SEQ ID NO: 81837 - DNA, 312 bp, Heterodera glycines
catcagttgaataaagaacagcggtcagagtcgttttcgtacggccttttccgtatggaatttgttcggaccgggacaaatggcgatatggatcaaggtcacagattaggacgacctgctcattgtcagttaccgtgtacaaaaatagcattcaacgtgacatgctaattaaaaatggcaaataccggtcagtctccaaactcaaaattatttaatgcggactaaatcgatgaaaatagaatttggggcgcgcttgcccttttttaggctgaaaaagtgccgggaatgaagtgtccaaatccagccgttacg

SEQ ID NO: 81838 - DNA, 416 bp, Heterodera glycines
tacacaacaaatttcccgcacagtcggcaacgtacagtttatgttggaggtttcggaggagaggtcaatgaaaaaattctcacacttgcgtttataccttttggagacatcggttagataattttcatcaatacatatttaaatcttattagttggcgttagcattcctttggacaatgaaacgggcaaacatagaggttttgggtaagttttcttctttttcagttgaagtctttggttttaagatttgttgaatttgaacttccgagggatgctgctgcagcaattgacaatatgaatgacactgaaatttatggaaaaactatcagagtaaattttgcacggcctccaaaagtgaatgaacgaagtcaaagaccgatttgggctgatgatgagtggttgaaactatatggcca

SEQ ID NO: 81839 - DNA, 124 bp, Heterodera glycines
atgaagtctactggtggaaacctcgagccgatgccatttgttcgcaaatggggttcagcggttgatggcgaaaatggcgcagaggcctcgcaaccagttatttcagacgagcgattcgaaaatg

SEQ ID NO: 81840 - DNA, 2834 bp, Heterodera glycines
caacagacaacttaccatttgatgttcgacacgtgctgtgaaaagtgcgaaccatcggaggagtcggtgaagttctggtccgaattcatcgagtacatgtgagttttgggagttcaaaaattaatttcgagagtctcgagagcctttgctttgattattttcaacaattcctgacatatacaaaagggttttcaatgaaaaaatgccaaaaatatcgtcaaaaatttcgggaatttttctatatgaatttaaaaaaattatctcatgctaacataagcccggaaaaaatgcccgcatggcgctcagttggcaaaaacgggctttttggcatgccgttgtgcccgccggcatttgcctttatttaaattaaattataaggctatgagtagaaaaaagtcgcggatttttttaaatttttttttcaaattttttcattaagatatttttgagtaaaaaaaaaaatccatttcagtactaatgagcctgttcgatctcgacttttttagactttttaagcaccccaattttatgaaaagcccaaaaaggcttttataatttaaaaaaatttttttgaaattcgctaaaaagaatttttaatgactataataaaaactcaaaaaaattaattgttcatcccaacgaatgacgaaagaattataattggccaatttattttattttgccaggatgggcatcattgaagatgacaaaaacatctacacaccagtgctcagtcaatttccacaagaattaaacggtgcaattctcgaatacatttctaattgaatttttattttttttaattaaaatttattacaaaattccattcgttttattaattttgaattttttttagttggccaactgtccgctgcaactctgtggaatttgtataaaacggaccttaaagatgccttattgggtaattttcaattttgattttttcacaattttttcctcgtctcagagcatgccaaaacgaagcgatgcaaaacgccagattatatggtacgggcacgaatttaaaaattctttttacattttaaattaaattttttgcaaattttagaacctctatttccgtgtcaagtcattctactcaaaatatgtggccgaactgccccaatacaaagaatccattcccgaatttcctgagtgagttttgcggaaaattataagtaatttttaaaaaattaaaaaactgtaaaaaacgaaataacaataattaatagggcgtcaattttctgtaaaaattgtttcgaattcatagtttaacattttaattctctatttaactcccctttttattaaaaaaatgtataaaatggtctaaaattaatatttaaagcatttataattttgcaattaagtttggatgggaaaatgagaaatttattaaaaaatgatttaaaatttttcaattttaattacattttgacatattattgcttattttgttcatattttagtattctatttatttttctatcgttttcattaattttcaattagcttttatgtttagattgtttttttaaaatagattatatatttttaaaatgctaatttaaatttaaatttttaatcgttaaatatttaaagaatgatttttaatttttctgccaattttcaattatcataggtatataaaattgattttttaaattagttacatatatatttttaaaaaggttaatttaaatataaattcttaatcgataaacatttaaaaatggaatttgaaattttttcagcccttaaaatctgtgccaaatgaatttttaatgcttcaaaatgccacccatcgcattttgtcccttttttcccgtgcattttcctctcttttctaatgagcatcgaatgggtgggcagacggaccaaaaagcttaaaaataaaacatttttctccactgtttttcccaagcgacttaatttgacgattttggctttttcgcattcatttcgacgatttttttagtaatttgaaatggcaaaaaaaaaacacaatgccaaaaagcaatgggaaatgaatttatgtattatttggaaaattgaattagaaaataagggagaaaattgtcaacattccaccatttgtttttcattgtttatgaattaatgagttttcctcgcttttttttacttttggcattctgtccatgccaaaaatcaattttgttcactttaggtggtttgttccgtttgtgatggattggctaaatgagaatgacgaacattcaatggtgaggcatttcaaaatttaattttttaattaaaagcaatttgaatttaatttaattatgctttttaattttttttttaaattaccaatagtaataataagaaaataattgtgcctaaaatttttctaattcatatcaaacaatttgaatcataattcagtatgttaattatttaatcaattcaaataaagtaattaaaagcaattaagaggttcatttgactaatttttaattaccttattataatttaataaattgcttattgaataatgtctataattattaaatttagttctaatttggcaccatttaaacaaattatttcatatgagttttattgtttttaaaaaaaatttaatttaaaatttaaaaaagcattttattcctaattaaggatattttgcgaaatgcatacaatcgggacaaagtggacaatttcccacaaacatcggagcacaccaaattcagcaactccgtggtggacgtgttcacccaactcaacgaggcgcttaaagtgctcaaacaggtggccaatttcaaacatttgaattcattggcaattttaatttttagcgccgcgaaaatttattt

SEQ ID NO: 81841 - DNA, 734 bp, Heterodera glycines
atgtatgtctgtgtttttaagactttgaacgcttatcaaattactgataaaaaattgcacttgattctacgtgatgacgaaagtgcgatgaaattggcgaccaatttgctcggttataattccatgcaatgttttgcccacaaaattcaattggtaaataaaatacatttaattttgtgtatatttggctattttaaggctgttggagatggcttaaagctccttggtgggtttttcgatgtaaaggaacgaatgaaaaaagcaatccgtcgcataataaaatcgcgcataattgctgacgatttcaaagcattgcaaattgaaaatgatcttccactaaaaactttacaaaaagtaataaaattcaaataaataacaaggcaaaatctatgattaaggatgtcgaagtgcgttggaattcaacttatttaatggtcagccgttttcttgaaaacaaatcggccattgaaatgatgccagcccaagatgccaaattcccttgttttaccagtaccgagtggacaatgatgagaacgttatgcaaaatactccaaccaatttatcgcgcaacaatgcacattcagaatcggaaaagcggtatttccggtgttcttccgttatacaaagttttgaaacaaaatttgacacactggacggctgtggatgattttccagaaattagaaaaagaattgccgaatctttagaggaaagaatgaaaggtcttttgtattaa

SEQ ID NO: 81842 - DNA, 653 bp, Heterodera glycines
gaagaacaccggaaataccgcttttccgattctgaatgtgcattgttgcgcgataaattggttggagtattttgcataacgttctcatcattgtccactcggtactggtaaaacaagggaatttggcatcttgggctggcatcatttcaatggccgatttgttttcaagaaaacggctgaccattaaataagttgaattccaacgcacttcgacatccttaatcatagattttgccttgttatttatttgaattttattactttttgtaaagtttttagtggaagatcattttcaatttgcaatgctttgaaatcgtcagcaattatgcgcgattttattatgcgacggattgcttttttcattcgttcctttacatcgaaaaacccaccaaggagctttaagccatctccaacagccttaaaatagccaaatatacacaaaattaaatgtattttatttaccaattgaattttgtgggcaaaacattgcatggaattataaccgagcaaattggtcgccaatttcatcgcactttcgtcatcacgtagaatcaagtgcaattttttatcagtaatttgataagcgttcaaagtcttaaaaacacagacatacattttaagctttacccaaaaacaaacttttgaaaccatgt

SEQ ID NO: 81843 - DNA, 982 bp, Heterodera glycines
atgagcaatttgctgaaacgaaaaatggcggatggccaatcagaggaaaatgcggggcgaatcgaaactgttgatgaccaacagcagcagcaacagaaggtgggcgaatcgcattgttaagtggtgtttacattagtggtgtgacgcgaccgcgacgcgcgatcagtgaattacgacgtttttttctcgcgatttacgatgtttttttcacgatttgtggagttttttctgagttgaaaattcaaaacttttctcaggaattttgtgagaaatgtgccaagatggaaacggagctcagggagacgaaacaattgtgtaagatgaaggatctcgagaatgttcgtcgtttttaattaaaattattcatttaattattcagttttccaattttttcagagggcgcttaagtccgaattagaaaaacagaatttgatggctgaacgaaacgcgttgcaggcgaaaattgacatgatggaaaaggaaaaagagaagcaacaaaatgagcagcaggggaaatacggtaggggattatcaaaaaatataatttaaacagaacaaatattttgccgagtttaagcatccgttgatcagttcaaaaagttacaaaatttttcatttattggtttttaattcggcattcatttcgaccaatctgaatctcggaacccgaattcatgcaaaaagtcgggtttagcaattttgttaacggcttaaatgatctttcattgcagggtttatggcttttagattgtttctgtgcattgaaaccattgaatttgaaccaaaaatgttaaatccaaaaattggactttcgattttttagctgtcccggtaatctaacaaaaggcgataattttttgttttaattagcacttttcagtttctgccggccaaatgaaaccaattttggacaaaatcaatgagttggaggagaagcaaaatgagcagtcaaaaggcgagaagaattaaagcaaaaaataaa

SEQ ID NO: 81844 - DNA, 623 bp, Heterodera glycines
atgagaatttatttgtaagatattttgcaagtctttgaattccaacatttttacctatttttttacagtaggattgccattggacttgccaccgagcaaatgccattaaacgaaatggtcggcacttacaatgggacatacgcctacggcactggcctattcgattgtgccaatttctggggccattctggtaattttactgaaattaaaattatttttttacgcaatttgccttttatctctccgaaaattacaggtaatcgtcggtttatgtccggtgatttgccatctttttctgctggagatgttgtcgggtgtggggtgaatttggacactcgccaaatcatttacacaaagaatgggcatcgcttgggtaggaatatcacaaaacaattaaatttaatcgtccaaattcattttaaaattttaaattttcagatacttccggactttttgtccgcaccgtttgcaatttgtttccgtgtgtctcgctgcccttccgccacgctgaaattgtagcatattttggtccaaacttcaaatacaaccttgctaatgagttggctaatgattatgaccgcgattagcggtagaaaaccaaaatttaataataaggaaataaa

SEQ ID NO: 81845 - DNA, 1498 bp, Heterodera glycines
atggccgagtcgaagtccgaattgggcgacgaattgtggacgggcatggaagggcctccggtgaaggaaatgaaactcgagacgagggcggaggaggaagaggacgagttcgacgaacagtttctgtgagtttttacttttcatcatcgtccgtttacactttccattttttcagaaacgaacccaaaacaattccaatggacacagaaacactcactgccgcggattctctccgctcgcatttcggctcactgaccaaaggcaatcagtgccttttttattgcacttttgtaaatatttccgtctcttaggaatttcaaaccgaatgcatcgttcgtctcttctcagtgcctgggaaccgccgacttcgtccgcatctattctcaaaaatcccgaacaacagcagccttcccttttgtcggacattacagaagtgttcagtgcacaacaaaatgtactcggtccatcgacttcaattgggaaaagtgagcgaatggccaaacattgcgacaattttccattttgttttaagttacggaaatgactcacaatgttccgttccaattcaacgccaaagttaccgttaaagagctcatctcccaatcatttggagagacaaaaggcgaagaattggccaaaattgtacaagccaaaggcagaccaataacaatggcaaaagacagaagcaccgaacagtccaataaaagtggcgaaactcagaggcaggacaatttgagacggaaatcaggtgggaattaatcgaattgcttagttgtgattttgaaagaaaaatttaaaacagcaaccttccgattttcagggttggccaacgctcttctgccttccccatttacggatggttttgctggttcaaccaacaaccgattgacttcccatcgtatcgcttctcccgcctgcgcttcgacttccaattctttgtcagagccgccgtttgaggaaaatccacaaaaaaattatgaaatggtcttgacttcgacaccgtcgacacagtcactcccatgttacgaatcgctgtcggaggaaagcgacacggaaacgggcggcgaaggtcagtgtttaagtgcaataacttaatgacatttgatgccattcccccaatattgcttaattcgtttccacaattctttttttcatcctttggtgttcgtttgcagaagtgacgaccaaaaagagttcctccgtgctttgttctgcttcagtcgctgctgctccgctgaacttcttctccctgttggatctgatggacgaaaacgaacagcagtcgcagcggagaatggaggacgacgccaccgatgccacggtcgacacggccccctctttttccactgtttcaccgctgcaaaaccaacaacaatgcctttcattttttgcgacagcggggcaatgggcggaagccaacaaaagggacaaaaatgggaccgaacgaggggaagcggcggaatgcgtttatgagccgctgtcagaggacgaaacatga

SEQ ID NO: 81846 - DNA, 450 bp, Heterodera glycines
atgtctttggccctttgcgcagctccctttttcctttttgctctttcttcggcttctcctcccttcttggccactttcaacggttgtccccaactgatcgatggccaattgctcgactttgttaactccgggggcattcggctaacaaaaagcaaaacggggaattgcgatcggttgatcagctgcgatttgatcggggctccagtggaagtgagtgagagaaggaaaagggacgaaacaatgccaattgatggcactacggttcagctaacaaaagtcgaatggtacgtaaacggaaggaaaatccaacggacgaacgaagggacggaaagggaagagacagcggaaaacgcacaatcagaaaacgaacggacagaacgaagcgcaattggagtaggcgaggcgagtcgaacgaattttgagggaaagggaagcaatttggaggagtaa

SEQ ID NO: 81847 - DNA, 249 bp, Heterodera glycines
atgtccgtcccatcaaaaaacaaacaatttccaaaaaatatcgatgacggtattttatttttatttattactcataacacaaaattttgcataacttaagatgacgatgacgtggataccgatccgtcacccgaggaagttgagaaatggactcccgagcaagtgatagagtgggagaagcgaatctttgggaaaatgcctccggaagaggagctttggcaggaaattattgacagcggagacaaaaat

SEQ ID NO: 81848 - DNA, 442 bp, Heterodera glycines
atggcatatgggcgattaggtagaccttacaatgttaatgtggcggcacatttctacgttcggcaccgtattaaacttcgccatccatttcttcattgtgtcatcgaacgctttcctgaaggacaagaggatcgattttatcctcttgagttatgcaaaattgaggaagttgatgaatcaaaatggcttggtcagattttcaccgagattgacaacaacaatattagtgcaactaattcaacaaattttgctgacactcaaacttcaaatgatgattcgaaaagtgttgatgggcgcgatgaatatagccaaaatgattgctactctttgtggtagattaagcattttccattttgtatcttctctctcttaattttgccatttttcacccaaaattgacctcttctattcctaatatttttcaatttatatttccatttaa

SEQ ID NO: 81849 - DNA, 1773 bp, Heterodera glycines
atgcgtcatttccgaactaatcatttaaagcctggtcacttggctcttgttccggaaaaaggatacgatagctgcggcgacaatcaaagtgatttggcaatgagttttatgcagtggtacgccgaaaaatatgcggttcggattcaaaatgctttttcggctgaaggagagaaaaggtaattttagagtggggattctgagcaaaagttattctcaagagttggcaattttcgtttggacggttggattgagtctcaacgaaaaggactagaaatccatggctgtgtatggcatgcatgctcaaaatgttatccggatgataatgatgtaatgccttgtggcaaatctgcaggccgaattcgggagagaaacaaacagagaatggaatttatattgaccaaagttccaaatgtggaaatcttttggcaatgtgagattgaggaaatgctgtccaaggacagggaaatgaaacagaaattcaaagaatatacgggagatggcgggccaatcaatattcgtgattgttttatgggtggaagaacaggtgcattgaagctttaccacgagttggcagcggacgaagaaatcagttattatgactttaccagtctctatccattcatcaagtaaaattgaaaattttattttccccaaaaaaaaaaagttatagttgtgtaactgattatccggttggacacccaacacttcatgttccgtgtgaggacgttgattggcggagaccagaggacaatccttatccgcttgcaattctcaaagtgttcgtcattccgccacgaaaaatcgatgttccggtgttgccagttaaagtggatgatcggctatgcttccctctctgcatgagttgttgcaaaaaataccctaatggaggtgtaagggaaacatacaattgtcaacacactgataaacaaagaggatggatcagtacatgcacatccttggaggtattaaatattttattattttaattaatattttttagcttaatgccgcactggaggagggatacagagtcaccatgcttttacgcgttcttgaatacaacaaaagtgacaaccaactttttcgaccctacatgagtgaatttatggtccaaaagttacatgcatcagggtttgatgaagaaattcgcggaaattttgaagccgaggaacgattcataaaggaatgtcgggaaaattttgacataaaaattgaccgagcaaagatgataccaaacaaggggaagcgagccttggccaaattagctgtgaacaatttatgtatgttgtataaaaaaccaaaattttttaatgataaatttagggggtcgtttttccctccgtaattacggactctctcaaacttttataactgatgatccatcagagctgggaaattatcttgacaatcggaggatcgaagtgactgggctcgacatgttaactccggagcggattttaatcagctacaatcagaagaaggattgggttcaggaacacccctgctccaacgttgtcatttcacttttcacaacttctgcagctcggctgcacttgctaaaagcaatgcagaaagtcgcgcgaacctctggttgtactattttatacactggtaaatataatttattaatgaaaaaattaaattttttaagatacggattcgttgatttaagttcacccaaaaggcgcaaatcctttaaagacgggtcctcacttgggtgagtttacggacgaatttccaaaggtaattgatttttgattttaaagaaataaa

SEQ ID NO: 81850 - DNA, 319 bp, Heterodera glycines
atgtacggtagaaaaacgaaaggggaactcatcccacaactgtacacaatgtacggtagaaaaacgaaaggggaactcatcccccaactgtacacaatgtacggtagaaaaaagaaaggggaactcatcccccaactgtacacaatgtacggtagaaaaacgaaaggggaactcatcccccaactgtacacaatgtacggtagaaaaaagaaaggggaactcatcccccaactgtacacaatgtacggtagaaaacggaggaaaaagggaaggggaagtgccaaaaccgacccctactgtagttgaaagagtcctcaca

SEQ ID NO: 81851 - DNA, 433 bp, Heterodera glycines
cgatacttaagcacacatatttgtctactaattcactgttgtcagagctgccaatcaatgatgaataatcatccggttgctccgctgagttggcgcagaatagttgagcatctccagtacatcaaggtaagcaagcagcggacggacaggggggttaaatataatccccattgattgtcctgatttccgaatcttttccaggccgtctttccgtatttttaggtacacgttttggaggcatctttcgcccgtgcttgggtccatgaagttggtcatccaggtgagacaaattgacaaatcaattttaatgacccctttcttctccctcattaaggctgccattgtccgtattatgaaaatgcgcaaatcgttgaagcatcagctgttggtggccgaggtgctcaaccaattgacaacgcgtttccagccaaag

SEQ ID NO: 81852 - DNA, 2563 bp, Heterodera glycines
ttctccgtgccgccttcgtccagcggaagtctccgtgccagccgttcgaacccggacatttcggccaactccgtccattatccgtttgcttcctgttcgtcggctgtgccctctgtcgcctcacatcggcacagttccttctccacaaactgtggcggcggtgctgcaggaacaaacgccgcttttggcggtattgttcagccactgcaaatgctcaaagtgtaccgagtggaccagaacttccgttacctccccgtgttggccgagacaagcgccaaacagttgatgctcatggcactgcaggtaaattcaccacaaaaacttattcatttcccattttaaggagtttggtctccccgtgggtgagaacgatggttggtgggcgctgtacgaatgttcggtcagtcgtgatggtgtgaccaagcagggacggctgcccgactcggccgccaatttggccgaacgtgtcggactgaacgcacggctttacctgcgtgacatgcgacggcccgatgagagcaatttgctgcccgacgaactgatcccggaattggtcaaacaaacgcggctcactttgtacactctgaacgcccaatgtatcgcggcccaactgacacttcaggtgaaattcctttgagcagtcaaattgagtgggatttaaggaggacgaaaatccatgttttattgttattatttactcttttcttgttgctaggatttcgccgtttttaccgcaattgaaccgactgaatatgtgaacaatttgttccaactcatcgacaacgaagacccttgctctcttcgatcaaaagggtggccaaagttggagcagttcgaagtgcattttagcttaacaattttattttataaaatttccctaattatttggtcggagcaatttgtaaaatcgttaacataattattaagttactattcaaccgtgaaatgtggtgggtggcaacggaagtgtgctgtgaaaggaatgtgtacagacggtcaaaattggtcaaaaaattcatcaaaatcgccaaacaatgccaatgtttttattgtttatttataatttcccaacacttttctggtttagtgttccgaaacctcaactcaatgtttgcaatcattagcggactcgaaaagccggtacacttataattaacaaaaaagcatcaatttaattgaatcaaatttacaaataggccgttcggagattgttgcacacttgggaacgcgttcctgggtatgaaaaaaacacaaaaattagaaaataatttacataaaattcaggaaatatttgaaagtattggccgacttgcaacaggtattcatttttactttcactaattcaactcggttttattgcattatttttagatgatggacccgtccaggaacatgtcccgttaccgccagcaattggcccaattcgcgcaggacccaccggtcattccgatttacccggttctgcgcaaggatttgatctttgcgcacgaagccaacccgacattttgcaacgacgcgcaacagctggtcaacttcgagaagctgcggatgattgcgcagattgtgcggaacatccaacgatacagcagcgtaccctacgaccaatcggtgctcatcggcggggcaaatgtgagaaatttacgggggaacagtcacaaaattcgaattggatggcaaagactctgtcgaggtttgtttggcttattacacttttttattggtcagctgttggacccgggcacaatgcgcaaaagcggcggaaatgtcgccgcattgggccacgggagcggccgtttcgcctcgagcagtggcggggcggtgtcgcgcaaaaagctgcacgaacgcacaatgatgcagatcagggtgaaggcgtacctgcagaacatcccaatcattgattcggaggtacgccgtttatatgaagcggtaggacgaatggccaacaaattgtacagattgacctcgaccgaatttcattggattgcgaaccgccactttcctctgcctcgggtgcgagcagttcttcccaacagcaattccatcacagcaactcaaatgttccttcccggcgtcggttgccctctccttcgccgagcagtctttcttcacagtccaaccaatcaaatatagttcattcgcacgaaaggcatcgaggcatgatcaatttaccaaaatttggtgagaaatttgcactcaaatcaaataatttaaaactcctccaaattcaggagtggagagtccccaagcaatttcaaagatgttgtcccttgtgcagaactcaaaaatcaaaagtcgaacgcagggctacgggcgggcaattcactcctcgaaagacgaattgccaccgtccggtcagttgaaagggatggttaacttacaattatccttgttgatcctcctccataagtccctaattaatctaccaaatctaatctattaggctttgatcagtcgaaaagatcttccgtggccagcagcggagagaacaacaacaacgaaagggtcattctgtgaccgatggtcgtctcacaatcagcagaacgaagaacagaagacccaataa

SEQ ID NO: 81853 - DNA, 4301 bp, Heterodera glycines
  unsure (1)..(4301): unsure at all n locations
atgaccacatgcttgagtgaaggtcaagctccgcccacttgtgagggtataaatagccggctattaccagcaaaagtcaacttctcccattcattcgcgaaaattctacccacattcattgcttgcgcgctccgtcaaaaaatatttaaactaacaaatttgcaactacattaccctttcatccaatattttaccaatattcaacttataaaaaaatatattttcaataattttctattacaactataaaatttacatttttctaattcaaaatattctttcatattatatcatttataaatcataaagttttcattcatatattattcaaataaaatgaaacgtttttccctctctcaaaattcttcctcctccttccccaaaaaatcccaaccaaataaatgcattcgtaaaattgataacctcacttcaaaaagtaaaaaatatcaactggtgcgctcaaaatctaaatttgttattgatcaaattgaaaaatgtgcagatccacaggctgaattacgttcatgcgtgcacaaggcggtcgaggaggctattcaagacgcacagaacacacttggaggagcaaataaggtaggtgtcataatttcttcggaacttttagaccagggtgacatcatactgcctataactccaattacattaaatgtcgtggacgccgttttcaaccagttttgtaaagtggagcagagcaaatcgaaacacgtcaacttatatggggccccttttgttgtcaccgtaactgttctaaacactgtcggacttccccgacgacgaacaaccaaaggaagtgcccctccaattcactcttcccaatcacacatcttcaaaattaacaacaacgacaactattgccttttttatgcactggaactgatgcgctactactctttgtataaacgaggaattatcacgcgtgataactggcggtggattaacaacaaccaaacaacggttttacgacaaaaagcgcagcaactgctccgcgaggcggggatccctacaacagagacggagtacgacgcggaagtttatatacatcaagtgcaagggttatggaacgtcaaatatcccggtgagtacaaaatatttatttttaatgattatcagatgcgcccaatcaccaaatccgatatcaccgattaccaattccccattcttctctaccacaacaacaaccactttgacggcatcaaaactctttcaaaatttttcaacaaacgttactattgcatctcctgtgaatccgcctacagtcacaaatttgaacactcttcaaaatgctcttcactatgtcacgggtgccgtgaggtgggcgtcgactatccctgcgaagcccaacaaggctacttcaaaaaatgtttgcactgcaacaactatttctataacaacgactgctatgaacgccacctccacaaggatttgtgcaccaaatttcagcgttgcgaagattgtggggtaatttataatgttaaggttcacggaaatgtaggccaccaatgcggagaaaggttttgtcgtctatgtaagcagtttcatttaaaagaggaagatggcgagaacccctgcaaaagctgcttcatccaacccctaaaaccccataaacttaaaccatacaggatcatcgcatacgattttgaagcgacacaggataaaaaagtaggtaataaattcgaacacgaggtaaactttgcagcggctaccgttatttgcaccgaatgtatcaacaacgacaactggaacaaatctctacaaggaaatccctgcaaaatttgtggcccctaccgcacaatcaccttttcaccctttgactacacggagacaacagtcgaccaaaaaattgtcacacaacaaccactaagtgaattcgtccagtggcttcttttcgatcacaacaaaaaatttcccacggttgcctttgcacattttgggggccgctacgacatgacgatgatcatcaaggaggttttagcgcaaggaattcacaacccggacatcataaagcaaggaaatcgtctctacgagctgaaaatcaaggacaatgaacattgcccactcacaattctacacgacagctacaacttaatgcccatcaaattatctggcctcatcaaatcatttgggcttcatataaaagataaacaacattttccacacatgttcaacaaatcatcaaactatgacaacattctctcccatcttcctccacgtgaagaatactgtcctgatcaaatgaaaatccccgatcaacagaaatttgacaaatggtacaataataattacaaccaaccttttaaccttaaggaaaaactccctgaatattgttgcaacgacgtacaaatactcacccacgccctcgtcgaattacgccgggaattcaaacaactgacacaacggaacggaaaacacgggggaatcgacattctttggcaagccatgaccatcgccagcgcctgcgtcaagaactttgcactcaatcatttgaagcccaactcgctcgccatcgtcccggagaaaggctatacaccacaacagaaccaaagtgcactggctatcaaatacctcgactggtactcccacatcaacaatgtcaacattcaaactgcacactcccgctatggtgaatatgtctttaaacgcgagggtcaggtgtatcaagtggatggttatataaaagggactaatgggaagagggataaaattattgaggtaaatggttgtctgtggcacgggtgtgaggaatgttttgaggacttggacgacgaaacgaaaatgccgaacggaaagacgctaggacaattaagagagagggaggtaaggaagcacgagattcttagccggtacgtagacttggaggtgatctgggaacacgaaatcaatgagcagctgaagaaggacaagcaaatgagggagtttttcgacaactggaaggaccactcaccaataaaaatcagagacgcatttcatggaggacggactgggccaatgaagttactccacacagctaagccgggacaaaaaatcagctacaaggacttcaccagcctctacccatggaccaatttctctacagactatcccctcggtcacccaaaaattatcagctttagattaaatgagcaaactgtcaactggcgagctccatccgacaatccatacaagggacttttaaaagttttacttttacccccaaacaggaatatcaatgtgaccgtaatgcccataaaatttgatgagcgactactcttccctctctgcgaaaaatgtgccaaacacatcaccaatgaacacccgaatggcctcaaagacgacaactactcgtgtccacacttcaatcctaatgaccgtgcctttgtctctacctgcactcaccttgaattgaatgctgcattggaggccggctacaccgtcagaaaactcttccatgtcctgcaatacgaccaatggagcgacaacatcttcaaatcttacgttagcgaaatgatggccctgaagatccacgcaaccggcttcccttcatggtgcagcagcgaagaggagaagaaggaatacattgaggagaaccgtcatcgatttggaattttgttaaacaacgaaaagatgaaggctgaaccagggaagcggtacatcgccaagctctgcctcaactcactttggggccgcttctccatgaggaacctcctctccaaagcaataatcaacaacgacgaaagcctgattcgccaatataccgacgacaagaaaatcgaattagtggacttggaaatgatcgacgacgacaacgacgtattcatgctcacctacaagccgaaagaggagtttgtcgacgaaaataaatactccaatgttgtcatctccctcttcacgacatctgcagctcgcctctacctgtacgaagcactcaaaaaagtcgccgacacccccgactgtgaaattctctactttgacacggacagcgtcatctacgttcaccccgaggaaaacgacccactaccaacaggaaagggacaccttggagaactaacagacgaaaaccccgaccacaatatattggagtttattagtgctggctgcaagaattatgggttgaagctgcaacgcaaggacaccggtgaaatagaacacgatttgaaaataagagggttcacccttgatgcacaaactgttcaaaaaattcattacgatactgttaaggaccaaatcttacgctatggctccgaagacccccctgaccctatcattgtaaattacctccattttattcgccctaatnctaatccaag

SEQ ID NO: 81854 - DNA, 1270 bp, Heterodera glycines
ggtcgtttcggacggaattggtggctattccgccgagaaacaccaattttcattgattgaaaagaagcactcgtctgctggtttctcttaattttcattcgcttttctcgtgtcatctctttagataatttaccatgaatggttttcatttcaaattcttcgaatttctctcccaactctttctaaaacgattttccttttcaccgattcgcactttcccttaaatttttagatttgatctgcgtcaaatggctaatgattctcgcagttcttcgagcgcttcctcccgttctcgctcgcgtagtcgcagtcgttcgccacgccgtcgcgagcagcgtcggcgccgctcgcgttccaccttttcacgttctccatcacctggccaaaaacgactgcacatcggtttgctcactggaaaataggaatgcaaataattaaatggacaagggttgactttcgcctttatggtttgctgatgttttatgttaaggcaatttggacgagtcggtccgtcgtcgggacattgaagacgtttttggaaagtatggacggatcagcgactgttggatggccaggtttgattcgatgttgaaatatttaaattggcaattagcaatttaaaagaaatgcgggttgcaagttgtatttttcaaaaataatcagaaaaagatacaattgcatggaataaatatatttttcacccttttcggacacattatactacataactcagaaaacttaccaaaaatctgctatctactccaaatccccattcagttaccctcccttctacgcttttgtcgtgttcgaaaacaacaaagatgcgtccgcctgcatgaaagacttgggcaacacggcgtacatcaaagggtgtcgtgcgcgtgttacggtggctcttccaaggtaagcatttctccacgattattgtcgcgcaatagcattttcgtgttaagaaaaggatcttcacttgatgccaattcaatgttctacaaaattcagagccagtttttcatttttagcccaatattttccaggaatggtgcgacttatcgtcgcggaccgccgcctcctccgcgacgttattacgacgaggaggacagtcaccgacgccgtcgtcgttcgcgtactcgctcgccccgtcgtaggcgctcgcccagtcgctcgcgcagtcgcacaccgccgcgccgcagtcgttcgcctcgccgttcggcgcgtcgccagcgctcgccgtcgccgaagagagaacgcagagacagggaggagaaggtga

SEQ ID NO: 81855 - DNA, 310 bp, Heterodera glycines
atggcacagcccaatgaattcagaattcaaaaatataaagcccgcccaaccattcaaatttcaggtatataataatgccttagaaaatgaaaaatttagtgccattttcagagctaaaacattatttttaaaatttagatttttctttttgtaaaaatatcacgaaaagcctatgtaacgaagaataattttcgccattttcacacattataaacacagtttaattgctaaggtattattatagtaaatacacaacaaagtgagcagttaggtaattgggctttgggggtaattaggggcaattaataaa

SEQ ID NO: 81856 - DNA, 1158 bp, Heterodera glycines
atgttgagcttcatttatacaggcgatttggccaaattgaacggatacaatgcaatggcagtgctttacgccggtgaatttatttttaaatttgatttattaattatttttttaattagccaaaaagtacaacatccctggcttggtcgacgcatctttgcaagttccagtttcatcactacgcaatgttttcttggcttatgcccaggccggtcttttcgaattggaggtgggaagaacaaattgaaaaaggccgaaagaatcaaaaatttttggtgtttaaccggctgggccagttatataactattttttattttcacatttcgaatttagaattttgccaatgattgtttggcttacattgacagaaatgcggatgatttgttcaaatcggaggaatttttacaaattgaccaaaaattgttgtgtgaaattttgggacatgacgaattgcaaatcgatggagaaatttcaatttggaaagcagtaattttagaaaacagaaattaataaatattaatgaatccttttatttattttcattaaatttttttttttggcactccgttgggctgacgccaaatgcttcgaaaatgccaaaaaatgttcagcagagaatcgtcgtgccatgctcggtcctgcgctttacgaaattcgttttccactcatctcaacagaagaatttacgaagaaaattggtaaaataaatcataattttaactcattcgataagctgccgattttaaacttttatttgtgatgaatagaatcttcattttattttattaattaaaaaaaacttttttattttatttttatagtaccatcagatgtattatcaaaagatgaagtgatcgccgtttatcagttccattcccttccaaattatcgttggatatccgatggacttttcccaatgcaatttccgactaatagaaggatttctaatcgcaaaacgggcacaattttaatggacattgaaaatgtgtccgaatttgcacgagaggacgttgagagcagtcggtacagcgaaaaaatgaccataaatggactatcatggaaaataatggcacaaataaaaacaaaaaacggaagcactgacaataacgagaaatggttgggcatttaccttttgggtgttgcaagagaagctcaag

SEQ ID NO: 81857 - DNA, 335 bp, Heterodera glycines
atggcaatgagcaaggttaattgaaaactaattaatataattagtagaatctaattgaatttttttattattgatttatgtgaccattttctcgttgttcttaggcctggatccagaaacattccaattttaccaattaattatttaatcttattataattaatattttttttaccgaattccgctttttcatttttagcatcaaaacggaacattgccgcaaatacttcagaagtgtgcttcaaaatcagtctatgtgctgacaaaagctgaagaggattaaagtaaaaatcaaacaaaaaaagaacaattcactaaaattaattttaaaaata

SEQ ID NO: 81858 - DNA, 422 bp, Heterodera glycines
atgccgacacttcaagctgagcaacatccgccaccactgtcgccacaaacaaacaatgtacagcagcaacaaccaactgtaccgagtccgctgaacgagcgccaacagagtgtacaaccaacgcagggtgaacatccacaaatccgggcaaacgccaccttgcaaccaaacgtggttcaagcgcagcagcagcagcagcaaagtcatcagtttttgggacttgaccacgacaatgacgatcagcttttgaaccaaatttttttggtagcaaaatttaaaaaaacaagcaattgacatgccaattacaggatctcaccacttccgctgaaatgcaacctatcgccttggataacaacaacaacaacaacaacaacaacaacaatatggttgttaacgatttttggttttgtctatttgtttaa

SEQ ID NO: 81859 - DNA, 59 bp, Heterodera glycines
atgccaatgccaatgccggacgtggccgaggaagaggaggaggaaccagacgcaaagcg

SEQ ID NO: 81860 - DNA, 143 bp, Heterodera glycines
aaaagcgtggctacgattacatccgattcgggcgccgttcttccgctgtcgctgctatccccaaattggccaaacagcagaggaaaaagtcggcggacaccagcggcgcccgcaccgcttacgattacatccgatttggctga

SEQ ID NO: 81861 - DNA, 465 bp, Heterodera glycines
atgcatgtcaccgagtttttgccacaatcaccacgccgcgacaacattttgatggctcttgaactcttggcaaaactccaatcatttgccgtcgccgatttgctttctgctgatcaaatcgctgatttccgcgccactgctgatcaattccgtgttcaaatgttggagcactttcgccgccattgttcgacttcaaaatttcatcatttggtccaccatgcccctgaatttgctgaaaaccatggattttggggccttctcagtgagcatcaatgacgatctcgcgcgcaaagcaaacacaaagatctccacgatattttgatgttctgtgctagagaatctgccattcgaaacgccatttttgattcaaatgaactctgatcaatcttttgtagtttttttataagtttgttatgtttttgttgttattctaagcagttttctcaattttttatatttaataaa

SEQ ID NO: 81862 - DNA, 156 bp, Heterodera glycines; identical to SEQ ID NO: 57938

SEQ ID NO: 81863 - DNA, 805 bp, Heterodera glycines
atggacgcatttggcctgctggacgatttaaaaaggaaaatcagcaattccgcgattaatttgtgtgaaaacatcaattcaagtgcaacatttacgaccgaggccgccgataaatttattcgggaattaaaggcaactttctccaccacttttgaggaaggactcggactctgcaccaaggaattggcacaccttcaattaaaggatggtgccactccaatttacagaaaggcacgaccaatgccacatcattcaaaggaaatcgtcgaaatggaattggaccgattggaacagctgggaattatccgtaaagccgaacatttgacttgggctgccccgattttggtggtcaagaaaggagacggatcagcacgattgtgcatcgattattccacgggattaaatgatgcactgctggattttcaacacccgctgccaattcctgacgacatttttgcgactttgaacggaggaaaatttttctcccaaattgatctcaaagacgcatatttccaaattcaattggatgacgattcaaagaaaatttgcggcatctccacccacaagggcaattattttatggagcgcctgccttttggagtaaaatcggcacccggcattttccaatcaatcatggacaaaatgctcgccggtctgaattttgcgacggcatatttagacgacatcatcgtcgccagccgaacattcgacgaacacaccgatcatttaaaggaagtgttcgatcggctgcaatcattcggattcagggtcaaaatttcgaagtgcgccttcttccaataggaaa

SEQ ID NO: 81864 - DNA, 1653 bp, Heterodera glycines
atggtaacaaagaacatcaatgccacttcactgctgaaagtcggagttttcgtcaacaaaaagaaaacaaaatttgttgccgacagcggcacggaagtgaacataatcgacgaagacgcctatgacaaaattggccgtccaaaaattcaggaatgcgaagaaaaaggcaaactcttcgacggaacaaaggtcgcattcatcggcaaaggagttgccacattccaatttggcgacattgccatcgaccaggagttttacgtcgcaaaaagagggtctttaaatttgctgagcatttcaacgatggacgcatttggcctgctggacgatttaaaaaggaaaatcagcaattccgcgattaatttgtgtgcaaacattaattcaagtgcaacatttacgaccgaggccgccgataaatttattcgggaattaaaggcaactttctccaccacttttgaggaaggactcggactctgcaccaaggaattggcacaccttcaattaaaggatggtgccactccaatttacagaaaggcacgaccaatgccacatcattcaaaggaaatcgtcgaaatggaattggaccgattggaacagctgggaattatccgtaaagccgaacatttgacttgggctgccccgattttggtggtcaagaaaggagacggatcagcacgattgtgcatcgattattccacgggattaaatgatgcactgctggattttcaacacccgctgccaattcctgacgacatctttgcgactttgaacggaggaaaattgttctcccaaattgacctcaaggacgcatatttccaaattcaattggatgacgattcaaagaaaatttgcggcatctccacccacaagggcaattatttaatggagcgcctgcctttcggagtcaaatcggcgcccggcattttccaatcaatcatggacaaaatgctcgccggactgaattttgctacggcatatttagacgacatcatcgtcgccagccgaacattcaacgaacacactgatcatttaaaagaagtgttagaacggctgcaatcatttggttatcgggtcaaaatttcgaaatgcgccttcttccaagaggaaattaaatatcttggattaattattgataagaatggacgccgacccgacccatcaaagatacaagccattgttgacatgcccgcgccgaccaatatttcgtcattgcgctcatttttgggtatggtcaaccattaccagcaattcgtcaggaacatgcgcttcattcgcaagccgctggacgatctgctcaagcacgaagcaaaatggaattggtgcgacaattgtcgcaaatcatttcaaaagttgaaaaacattttgacttcggatttattattgacacattatgatccaaaattggaaataattgtgtccgccgatgcttcggagcttggaatcggcgccgtcatttcccatcgattcgcaaatgggacaattaaggccatcgcacatgcatcaaagtcattcgcgcccgccgaaaagaattactctcaaattgagaaggaaggactggccttgatcttcgctgtgcagaaattccacaaaattatttatggtcggaaatttattctccaaatcgatcataagccgttctctccatttcggaaataa

SEQ ID NO: 81865 - DNA, 1373 bp, Heterodera glycines
atgaagagaatgaagcagctcgcccgccaatacatattctggccgaaattggacaaagaaattgaggattatgtccaaaactgtgagccgtgccaattggctgcaaaggcaccgatcaaaaccgatctccattcatggccaaaaccaactggcccgtggcaacgaattcacatcgactttgctgggccattcttcggcaaaacatttttaattgtcgttgattcattttccaaatacccggaagtatttgagatggcaaattcaacagcatcggccacaatcgaaaaattgcgttatttatttacgcgccatggcatcccagaaacaattgtttctgacattggcacgcaattttccagttcggaatttgccaaattcgttgcggccaacggcatcacacacttattttcggccccatataatccaatgtcaaatggacaagtggagagatttgtcgacacatttaagagagcattcagaaaattaaaaggggaggggaagcctaacaaggagatcatcgacacttttctgatcacctaccgtacaaccccaaacgattcacttccggacttgaagtgccccgctgaactgctgctcggtcgaaggccaaggacaacaattgatctgcttcggccaccaccacaccaaccatttgaaattgatttggagatggaaaggcaattcaacaagaaatttggcaccaaaaatcgaagatttattttgaatgagaaagtcttcgctcgccatcgctcctcgcaacattggaagacaggagtgatcagcggcacatctggagtgatttttgaagtcaaatttcccgacggatcattcggccgttttcacgcgaatcaattgcgcaacaggaaaacagccgacaattttgatcagtccttggccatattaaatgaggcatttgagttgccattgcctccggccctgcccaatcaaccacccgacgcagaaaatgccaatttagggcccaatcaattggaaaacgaggtggcagaacccattcaggacaatttggctgctccaattgaggacgtcccaattcaacgacgctatcctcaacgccaacgtcgtaaaccgaaccgcttttcacccgggccatgaactgatcagcctaaaaggggaggtgttcgggcaggcacattttgcccccgatttatttatttccctctcttcattttccttcactgtttgcagtgtctgttctctccgtgttagagacagacacacacatgcatattgattgacctttgcccttcccaattattcctccccattcatggctgaattcattctgttgtttccccaatttatttgctccgctcccccgtttttggatttatttttaatttattatttgcgta

SEQ ID NO: 81866 - DNA, 1135 bp, Heterodera glycines
atgccctacaaaggcgaaaaggagttcatgttcgttttgttgcccaagaaacgctttggactgaccgaagtgttggctcaattggacggcaaaaggctggtgaaactgatcaaaaagcgggacaaatgcaaagtgaaggtagataaaccccaggaggaggacaatttctccgaaaaaatcacaaaaaatagagctgggctgaaaaggcagaattttgtagcgatttgtgccaaaaggcactaatttttccatttttgggccaatttttcaaaatataatgcttcaatggagtccagcggtgccgatggcgccgctggggaaattttttttaaaagatttaatggagcatgataagaatttttcaaaaaatttgccaaaattttaaaaaattgcccatttttgcttgaagaatttttctttttcatttcggggggatcccccccccctggatacgggcctggcctaaatgaactgtcctaaaacacaatgacaatcctcttcttttcacaggtgcagttgcccaagttcacgttgaaagccacgcacgaattgaacgaaccgttgaccaacatgggcatggccaccgcgttcaccgacagcgccaattttgagggcatttccaacaataaaccgttgctgatcagcaaagtggtgcagaaggcggtcattgaggtacggtgattgcccacaattagtgcccttatttttgtggattccatttatacaaatttgccaccatcgaattgcaaaataaaaaaaagtcaccagccggtccagagaaaatttatatatttttgaccagttttagctcaattctcaaaaaaaaaaactaatttaaacaacgaaatttaggtgaatgaggagggcaccgtcgctgcggcagtcacagaagaagaagtggagtgtggttcgagcaaagaagaacgttttgttgctaaccatccgttctgtgcctttctgattcgcgatgacactgtgcttttcagtgcgattttccgcaaatgattccattccatttatattaaatgtctttgattttaggatttggtgatttgtaaaaacattttgtgtatatttttttgtctgtttttggcctttttggatttggtcacaattaaatatgtatcgaaataaa

SEQ ID NO: 81867 - DNA, 1654 bp, Heterodera glycines
atggtcaaccattaccagcaattcgtcaggaacatgcgcttcattcgcaaaccgctggacgatctgctcaagcacgaagcaaaatggaattggtgcgacaattgtcgcaaatcatttcaaaagttgaaaaacattttgacttcggatttattattgacacattatgatccaaaattggaaataattgtggccgccgatgcttcggagcttggaatcggcgccgtcatttcccatcgattcgcaaatgggacaattaaggccatcgcacatgcatcaaagtcactcgcgcccgccgaaaagaattactctcaaattgagaaggaagggctggccttgatcttcgctgtgcagaaattccacaaaatgatttatggtcggaaatttattctccaaaccgatcataagccgttgctctccattttcggaaataaaaagggcattcggcagtgcagcgtcaaccgattgttacgctggtcactcattttgttggcatatgacttcaaaattgaatatgtcaaaccacggattttggacaggcagacgcactctcccgtctcattgcaaaaggcggagaagaggaaaacgaacgcgtcattgccttgatcaccgccgaaccaattttggaagaaattctccattcagcctcgaaaaatttgccgatcaaattcgaagatttggtcatcgccagcaaaaatgactacaacattcaaaaagtcataaaattcatccgccaaggctggccaaatgaaaagcaaattgagaaagaatcggataccatcaaactcttccatcggcgcaaaagtgatctgacaattttgaaaggctgcctcatgtatggcgaaagagtcgtcattccgaaaatttttcagcccaaaattctccgactttttcacaagggccatccaggaatgaaacggatgaaacaactcgcccgacaatacatatttggccaaaattggacaaagaaattgaggaatttgttcaaaattgtgagccgtgccaattggctgcaaaggcaccgatcaaaaccgatctccattcatggccaaaaccaactggcccgtggcaacgaattcacatcgactttgctgggccattctttggcaaaatattttttattgtcgttgactcattttccaaataccccgaggtatttgagatgacaaattcatcagcaactgccacaatcgaaaaattgcgttatttattcacacgccatggaattccagaaacaattgtttctgacaatggcacgcaattttcgagctcagaattcgccaaatttgttgcggccaacggtatcactcattttttctccgccccatataatccaatgtcaaatggacaagtggaaagatttgtcgacacatttaagagagcattcagaaaattaaaaggggaggggaagccaaacaaggagatcatcgacacttttctgatcacctatcggacgactccaaacacaacgattgatctccttcggccaccgccacaccaaccatttgaaattgatttggagatggaaaggcaattcaacaagaaatttggcaccaaaaatcgaagatttattttgaatgagaaagtcttcgctcgccatcgctcctcgcaacattggaagacagataatttttttgaacgttccattacattataa

SEQ ID NO: 81868 - DNA, 321 bp, Heterodera glycines
atggctttgaccatcgagcaacttttgcaggaaatttcgcagcaaaatcaaaacccgtcgctttcaggcattgacgtatttgaattgtgcgacgaaaccaccaacatcgaagattggctgcaacaattctgctttgcgttggattgttcggcgcccaatctgaaagatgagcaaaaagtcaagctactgatgacgaaattgagcaaagcggcattcagcgagtacaagaagtcgtgcttgccgaaagatgtgaccgactccaattttgccaaaacggagcagcaactcaaggcattgttcgccaaaccacagtcggtgtag

SEQ ID NO: 81869 - DNA, 49 bp, Heterodera glycines
atgcaagtggctgggatgcaatatccaataaaggccgacttgggagaag

SEQ ID NO: 81870 - DNA, 1418 bp, Heterodera glycines
atgatccccctctttctgaggatatcgcaaggttaatcaatctgggggggggggggggggtaattagagataatacggtacacatactccctaatccttgatttagcataaacttaatggagagatagttacctttatgcagttggaccaatgtgccaatcacatccatcaccattttgttgaatttgtctgtgggaaaattgcctttcacaagtgctaactcctcttctaaatctctttcgccaagttccattatggccaccaccggttcaaatatttttgcaaagtgttctgattcatccatcgtaccactaaaagcatcaaaaaatcaattaatttattttttattttttgtaaattaattaaaacaataaataaattaatgtgtttttattttaatttactggtccataaaggtgacaaagaattcttcgttcttcgaatcttctcttaatttatccgatacctctacgctttcacggtatatatttccaaatcctttttggtaaaatttgatgataacacatttatttttgggcagcttttcattttcagcagtaaatccgatgaagggagccggaaaatccgacactggaaaatccgacaccggaaaatccgacactggaaaatccgacacaagcggaaaatccgacaccgctggaaaatccgacactagcggaaaatccgacactagcggaaaatccgacaccgctggaaaatccgacactcgaaaatccgacaccgactttaatttttaaaaataatttaaccggcctgctttatttccgatgccattgtggaacatgtgcgagcggtaattacaaacaaacaaagaaaatgatcagtttgtattgaagattggaggctgatctttgcctcacaaacaatagcgtcgagtcgtggcatcgaaatctgaatgctttgtttcgttcacactcgcctcgcctaagcattttccttcgtaaagttgcacaggaagaaaatcattggcagcaacaattggaggaatttgtaaataatccggcacatggaatcagaggaaagggcatgaagcgtaagcaagtgtacgtggagcaagacatgaatctcacagagatttatgcgactcgcaacaatcgacaaccccttcaatatttgcgggcaatatcccatagaatggcggaaccaatttaattttcttaaattaaattcgaaaacttggctaacttatacagatattaactcaaataatcgaaaattatttttaaaatttaaagtcggtgtcggattttccagtgtcggattttccgctagtgtcggattttccagcggtgtcggattttccgcttgtgtcggattttccagtgtcggattttccggtgtcggattttccagtgtcggattttcctagagccgccgatgaaaaccttaaaaataaa

SEQ ID NO: 81871 - DNA, 339 bp, Heterodera glycines
atgaatgaaagcacttgcgaaaagccggtgaacagctccaaatcctccgcaacaattgagtcgggatcggagagaaagccctccggcaccggaaaagcgaccgaaagtgttagcaccaaaaaaaagggtagagaagtgaaacgaggaacggatgaccaaataaccgaccaaatactcgagggagtcgagactgatcagattcggacagagcagggcatcatcacggacaagctgaagaaggcaaaacaacaagggcagaacaaagccatagaaggcacttttagttttgcatccttaaaatatcataatcccaacgaaggaaagcgcttttctggggaa

SEQ ID NO: 81872 - DNA, 394 bp, Heterodera glycines
atggacttttgtgcttctaaagtttggaattgtttcgaaaaaatttcacaatcaacgaatgtacaatgcaatttatgtcaaaaggttttgaaccgaagcgatacatcgaccaaaggaatgtggagccatttgaagtcgatgcatttaaaggaatacaaagaattgcaattacaggagccgaaaaggtcaaaaaataaggtaataatttaaggctattttatttatttaacaaattcagacaattgattcctttttacttaaaaaacatgacgagcaaaaggaagttgaggaaatgttgactaattttatggtccagcaaaactgcgccttttcagtttttgaaaattcaattctaaaattaacgcaacgtgcataccctaattttgaggtttga

SEQ ID NO: 81873 - DNA, 1636 bp, Heterodera glycines
atgaactccttttctctattgaccgtctttctgagcttggtcattaattgctcaccgatacggtaatttcttaattgaaaataaattattatctttgtaaatttttcaaattttcaatttttcagccctttgtcatccgacgttggcatttggaaaacgtgcaatggcaaaaatgggataattatggtggaaaatggatgtacaaagtaaaataattgaaaaaatatattttatttatttttaatcattttaggctccttctctgctaccaaagcgaaatggccaaaaacaaaaaaattggaaaacgttttggggtgggcaaaggaaacattggcaaactgaaatttgtggaatgtgccgaagagattgccgaagaccaatggcacggtctgatcattgccaagcaccaagacggagtgatcagctacgaatcgaggcaaatttcaaatgaaaaatattttaaaatttggatttaattaattaagccatggattcgacgacattttcggcaccgaacaaataaaacaaacggaaaaatatttggaaattaatttgaccaaaagtaaagccaaattaataataatattttaatagtaattaccattttacagatgctgaaccacttggaaacgaacttcaagaagcgctttcttctgctgcatttttggacgattttatgccatttgttttggcatttgaatttggcgcaacattttgcgcagaaaacggcggcaccaacaaattgtgcaaagagaaagtcatcttttcatatttaaaattcatattttaaaataattttattttttagtgccttacattggcaccgtttgttggcacaaccaaatcccatggcaaaacaacagtaacaacaacttcaatcccaacgaccaccgaacggcaaacatttgcatttgccgaatttgtgccccattttggcacgaattgttcgaaaatcgttttccccgtggaagtggccaaattcattttgaacatcaccgcagtgccctaccgaattgcatgcaatgtgtatgaacaacattacgagatcggacaatcggtggaggattatttggtaaattcaaacaaaagttttttcatgcttgcatggaagtgccgacaaccaaatgcgcaaagtgattgaaattccggcaaaaaattaggtgcaaaattctcacaaattgtttttaggcatgtggaactgagcgcatgctataaaagcatgaaaacagtggggccaaacgacaatgtcgtcgccaaattatgccaagaccatcttaatgaatcgaatgttgccggattttctgtacaaatttgcatccatcgggatgaaaaggaacagaagcttgtctttgaaacattcttgaacctttccaccaccaacgaattgtatggccaaataatgagagattagatgatgtaattacttaattgggttaattaagcatcaaaatgacgcgcaatttcccaatttccgttgaacaaattatggagataaaagaaactgttcccattttctttctcgaatttggcaccgatgagcagcaaagcgcaatccgagaaaaagccaatgggaaagtgatcagcggaccattgaatgaaaatgtgaaaacaaatggatttttataattaatttaaa

SEQ ID NO: 81874 - DNA, 1224 bp, Heterodera glycines
atgaccgagcacgcaaaagtgggtttgggaaagaagcataggcttactgtagttgattgtttacggtacaaaagtgggtttgataagtgtagtataaacctactgtcgttggcctttacattacaaaaggttattttgttcttttgattggaatgaatggaggggattacttactgtaatctttacagtcagtagaaaatgggtccgtttttcactgggggaggggcggttttggataaaattcgggattagtcccgacgcgatatccctcccgtccaacataatcttcaaaaaacggggtgttagcaaatggcgggacctaaataattatgtgatcaatcaatcaatcatcatcaatcacaaaggatgcgggctcgagcctgaaaatctgatcagccgtcggcggaaaaggcaatttcgtccgtttcatggcacacaaaagggcaaatggacttcgtttccgatcgtgatcagttttttggaagataaacgtaagtcgcctttaaaattgaaagccaaaatttatacattttaaaatggtttcagtgccaaaagattaccgagcatgggaagcggcgataaaagtcggtgccgacatgataatgtaggtgatcaaaatggaaaaatatttaatttggtgaataattttttaaattttaagaaagtttaaattttacaagaaatttcataaaaatttttatatgaaaaaatattttttgaaatttacaaaatcaaactatatcggaaaaatattcaatcttttcttaaaatctttgcttgaagacccagagtaagattctcgagagttttttctttcaaaattttaattttctctaaaaagatttttcgtcaaaaaagtctcataaaaatttataatattttgaaagcttcaatcaatgggttgcttttataaaacattttttgccgtgattaaggagcattttgtgctaaaaataataatttttggcgtcaaatttgttgtgtaaaaattttcagggcattttgtttcgcttaataatttgtgccgttttttgaatttctaatttaaaatttgtttatcctttttaattttcaaaacaggcaacacacatgcgttcaattcaaaattgttaatgttgaagcaaaggacaattacagtgaaggcattttaattagagaaattgagtttgccgaagctcacaaacttttaaagatttgccgtaagttttaagaaatgatttttaa

SEQ ID NO: 81875 - DNA, 939 bp, Heterodera glycines
atggacacggcacaaaattgcaagaatctgtcggacgaccagcaagtggccgccttccaagtgttggcagaggagcagggtggcgatttgaaggcacggattgatcaaattttaatcatttcggggctaaatttgccaaataataagcaagtggcctatgactaagttttttaaaactgattgctcttacagaaaacttagtttttcaattgaggctcgcccaaaccaacttttccctattggtttaaagaaatttaatcacaccatttcgatcatttccgatcacaattttcatgaacaaggccatcctatttattttaaataatgaagaacttttaggcaaacattgacaacgtgctgatgaaagtgaatgtgtcggacgaccagttcaagcagaacattgaggaggcgaagcagaagctgagttcgtctaaggctaaggagaccgctgatcaggtgggcaaaattaaaaacaaaattaacgaagtaattaccataatttacagtgaaatattgtcctaaatcgaatttagctcgaagacctctttttggacggctccctcccattcattgacaaagtgaagaagtccgtcgaacttgttcaagaattgcccgaagaaatccgagtaaatcatttattttaattgttaaccaattaaatttatccacttaatatatttgtagacggaatgtgaacccgtgctgatggtgatcaattcgatcacgcgatgtcccttcaaagaacagtgcacaccgtcagaagaaattgggggcggaaacattggcaatgttggccagggaggaggaggaggaattgggctgcaacaggggcagaacaagcagggacagcaacaactgcagcagaaccaacaggaacagccgtgcttccacatcaaactgctcaaagtgtgcaccatttcgaagaaccaaaaagaatga

SEQ ID NO: 81876 - DNA, 93 bp, Heterodera glycines
atgggcaaagaaatgcacgatttgaaggcggaggccgaatccatcagaaatgttgcaatttttggcgtttgcatttgcacggtggccagtttt

SEQ ID NO: 81877 - DNA, 198 bp, Heterodera glycines
atgtaaaaattaacagaaattcacgggttcataaggtaatttggacaataaaacaaaaaatcacggttcattcgatagttgcgagaaattcccaggagaaactccaaaataatgtgaaattgattttttgaactcgcatctccaaaattttgtcatcccatcagaactcattttagcgaaggtgtgaaggtggccttc

SEQ ID NO: 81878 - DNA, 958 bp, Heterodera glycines
atgctttttctcctttttatatttgtgttcttaatcataaacaattcaactgacaaaacattgtcagttaatctgtgtaaaaaatgtcgaccaacttttgctgaaatatttggcgaagaatggcaaaatgaaataataattggagaaaatgaaaatgagactgatcaaaatgcaaattttcatcaaaatgatcaaaatgaatcaactgatcagaacgatcagttggattttcaacaaaaaaacgaaattattcacaaatttcatgcaataaaagaaggaattaagaaacggggaaaatattcggcaaaagttaggaataaaactgagcaaaaaatagcggaaaaattgggaattaatcgaccaaaaatttacaaatggaaaaaagaaattggaatttattattataaaaagaaaaaacaggaatttattgaccaaattgatgaaattaaaagaatgccaaaaaatggaagacagaagcaatttgcgaaagagttgggcattagcaaagaaacattaagaaaatggaaaaaggaatttggcattgaaatgagcaaaagtaaatttgaaattaattttcaatttaattattaatattaaattttattatattcttaggtccaattcgattcaccgaagaacaaaaaatgagcaaaatgaatgattattatgaaatgaaaaaagcaaatccttctttaagtgacaaagaaattgctgacattttgaaaattggaactgccaccctaaagagatggaaaaaggaaaataattcgtaatttttcgtttttcttatttgtattggtttcaaatgatgctttttattctaattgttgttttttaaaattttttcgctcttttatatgtttgtttcttaattgacccgccaccatataaatttcgatttgacaaaacatcgaccaaaaaaacatgattgagtaataattaaatgcaaccaaataaa

SEQ ID NO: 81879 - DNA, 1620 bp, Heterodera glycines
atggtgagggactaccgagaggcgtggattcacttcagaactcacaaaacgcccagaaaagcggtgatggacacaattgaggtagacagtgcagctgattccccttcaaattgttcaattaaaatttaatcgcatattattattgcctttttactctgaaaagcacttactctgttcacaggaggctgaggatgcgctggacgtgttcaacttgaacatcgcgcgacaacaagccgagttcgaaatcgacaaacagactgacctcgtccgtgtcgaggaccaaccgcaggagggatgggttggttgggccaaaaattggtggttcggcggttcgccaaagggcaaagaggcggctgctccggaagacgcacaaattttcgaaaaattggagaaggaattgacccctcaggagaaggagcgcctctttgatgccattgactaccaagtgagagtgaaaatggcaatttaaatgttaaatttggcaaaattatgtcaggaaaatatgccaccgacggactatccgaagcattttgtggaaaatctgttcaaattgaacctaaaaacactcatgctgaagttggatgatgtgatggaactgcgtttttctcaactgtccgctaaattggagcagagatcggctgcgagcgcaatgcggtaaaacaacattttgccacttttatgagttttttaggttccaaagctaattaattaccttttaaatacttcttattgttaatccttctaagttttctggttattcgcctatttagcttcacttccgccgtcaagtcacttgaaatgcatgctggcaccgagtccatgctgcacatgacagagactgatcgggcttggttgaccttggaatttgaaacaaatccgctagagggcgactttgatcaacgcgtttccctaaacattgctccggttggaacattcgtttttttaatttaaaaaatataacctagctaatttttaggtgatgttcaaataccatgccccggcggtgaacaaagcactcgacgtctttagaccgccaaaatctgtccgtcttcaccaactgactacgctggccattgcgcgttacgaggacgtcaaggcaattggcttacaattagcaaatttacctaatcataactcattaactaatgttatttttaggcccgttctgcgacagcccttcagcacatggttgacgtgcgcaagaagctgaagttgaaggtcaaaattgaccctgccatttttgtcgtttgttccggcggtgcttttgacccaacaaaaacgacattaatcgccgaacttggtcaattgaaactgaacactttggacgagccgtccacaaaggcatacgaacatgtgagggaattgctaagggcatcattaaatttaagaaaataataatatttgcagataaccgatcagcgattgcgttcattggtggccaaggcatacgacaatttccaactgcgcctctccaatctccgactgatcttttccgactcttttgccaattgcatgaaggcccggggggacaaatcgtcggatgaccatttgctgaaacccacggggatgtgcatcgacatgctcagagccaccatcgatgacgtccaaattccgatgtga

SEQ ID NO: 81880 - DNA, 623 bp, Heterodera glycines
cgcagaaaaagcgcacaaaaatgagcgtgaagccaagcagaaaaaattgttacgattggaggagaacagacgaagccgccaaagtcgacaaaaagggtcaattgttaaccaatttaaaatttcagagccaaatatgccatcggacgacacttttaccgagaaattaatagcacaaattatcaaaaatctccaagtgcatattaaacgggtccatattcgttacgaggacaaattctcgaatcgcgagcgcccatttgccacaggaattactttggactcgttgaattttcaggtgttgcgaaacgatggataaataatttactacagcaactttttagactacggatgagaatttcaaactgatagtgcagaaagaaactgtcaaaatcttttacaagtgagtacatcgttttactattatcattatttgttagttatgtgttcatttgtatcatcagttttgttttagattggtgtccatgagcagtttaagcatttattcaaacgccaactccaatttcatctccgacaacaaaggcaaagagaagataatcaactctttgcaacggacaatcgcagttaatgaggagaagcccgaggggtacagatacggtgggtactga

SEQ ID NO: 81881 - DNA, 371 bp, Heterodera glycines
atgcgcaggcaatgggaaaacaaattcgcgcgccttgccgaaacttcccggaagacgcgccgctcaaacaaagccggcaccgcctcccatgaggtcggccatagcgttatcatttggcttcttggggtgcgacaatttttgaaggttagtttagggcgaggcttatggggtcggggtcacttcggcgcagaccatttcggcgccgcaaattttgaaacgctataacttttttatttgtcattaactttagctaatctggcatcattcgaaagctctgggtgcgctctttttataaactgactaaattttttgaaattttgcaggctaataaagtatctcaaaagctatcgaatgataacaaaaatatttaa

SEQ ID NO: 81882 - DNA, 268 bp, Heterodera glycines
cattcttggtattattcgaaagcattcgaaaaatgctattagcctgcaaatttttaaaaatttttatttatgcacaaaaaaatcagagcaaaaaaaagttcgaattaatgggtttttgagttccttctggccataacttttttgaaacttaaccaaaatttttgagattttgcaaattaataataaacacatagagctatcgaacaacaccaacaattcttaatttgattgacagtgaacaaagttatggttcaaaaagtcttccgac

SEQ ID NO: 81883 - DNA, 1409 bp, Heterodera glycines
  unsure (1)..(1409): unsure at all n locations
atgaccttatcaaaaaagtttttgccaagaccatacgtttcggcatcggtaagggcaaatctattggatttattggtcataaatctgcggattatttttcttcaacggaaatatgtattgaaaaaatgaaattttatctttttatatttaaaagcaaaaaaaaaaaatgttggataatctgttaccttcagaggcagtaagggaacctgagagagtaaagtgttgaggaattaattttaaaaatgagagcatacatgtacaaggggtgcgccagtcagacccccatacgtcggacgtttggcgcaggggggggtgcgccgacgcacnccttgttcatgtatgaatgagagaatgccaaaataaaaagaattgctacacatgacatcatacagttgacatgaattagtgggaaaaagaaaggggtcgggaattaaaaatatgaatgaattttactgatccgacaatttgcgcttcgtcccttttttctcctcttccacagtgatgtcaacggccaatgtcactttgtccccgtctttgtcataaaatcctctgcttgggtccattaattgcttaattatgctcatttattaaatgagggtttacgaatggaaaaagctcaccgcaaaagtgatgaaagtggggaatcccaaattgttcaatttattgttgaaaatacggccattgaattgcccaattaaattctccgccccgcccttttgtgagacaatttgaatcgttgccgaacatttgcaactccaattttcaccttattgccaatttgtcggaagactttttgaaccataactttgttcactgtcaatcaaattaagaattgttggtgttgttcgatagctctatgtgtttattattaatttgcaaaatctcaaaaattttggttaagtttcaaaaaagttatggccagaaggaactcaaaaacccattaattcgaacttttttttgctctgatttttttgtgcataaataaaaatttttaaaaatttgcaggctaatagcatttttcgaatgctttcgaataataccaagaatgaaaagcaattgcattgtgacagggcgggcctcatcagtacagaccctgtcagaatgctaaagaaaatgtgtttcggccctttctgtagacacaatcaaataaaaacaaaaataaataaatgtgatccaaatgtgatcaaacctaaaaatggggaaaaaataagtgaaatttggcacttaattagaaagtaatttacaagtgatcaatgggatttactcaaatgcaaacttacgcccaccacgccgatccaatcattccgtcacggcttcttgaattggctggcacgctgtcggcggcacgcagttgacaactcgcggatttgcacccatcgtagcagcacctgaatttgaaaaacaataaa

SEQ ID NO: 81884 - DNA, 126 bp, Heterodera glycines
gatttctctcgtcgctgcttggattacattgaccaaaatgcggaatcgctgatccaatcggatgcctttttggaagtggaacaaaatttgctgtatgaaattctcgaacgtgaccagttgaaaatc

SEQ ID NO: 81885 - DNA, 309 bp, Heterodera glycines
  unsure (1)..(309): unsure at all n locations
atggcgctagtaagttttgacttattcccgaaaagagctgacattcaattggcaatcatggaaatggaacaagatggatatgcgaattttggaagaaaaggaaaatcatgggtgatcaatagggatgccaaaaaatatgaacataaaatcgtaaaatatgtgcataaaatatgcaccaaaaatcgtgaaatatgcgcataaaaagtgaaaaatatgcacataaaattttccaattgagggtgtaatttctcaaaatttcttttcaattgtanacataaagtaaaatcttcaaaatggctaaatgtggta

SEQ ID NO: 81886 - DNA, 682 bp, Heterodera glycines
atgcataggcgcccaaaggtcggccgcagtccgaaaacaaccgaacggcagcagcgtcagctcgtccgactcgtcaaaaccgacccgaagaagacggctggtgatgttcgacggcactcagctgatgttctcggcgtccaaatttcgcacagcacggcccaacgcattctccgccgccacaatctgaatgccagacgtccggcgcgcaaaccactgctgaaagagtgccaccgaatggcacgtctggcgtttgcaagggcacatgcacattggacagttgaagactggcggaaggtgatctggtcagatgagtcaaaattaaatttgttcaattcggacggggcaattcacgttcggcgaccacccggaaagcgattcgaccctaaatacaccagagggaccatgaaattcggagggggagacggtgtaatggtgtggggtaggtcggacaaatttggccatttttggagagaatgttcagggtgctttaccggcgacacattgggtccattggtgcggatagaaggcaatttgacatcggagggctaccgcaacattctcgaggaccaaatgctgccatttgcgcgtgatcatctcgcgcccggatggacttttcagcaggatggggcggccatccataccagccaacttttgatgggtcccgttcggcgacttcctggcg

SEQ ID NO: 81887 - DNA, 1118 bp, Heterodera glycines
ggatttcaaagtgagctcaatggactccaaaaatgtcgacaaactaaaaacatttgtgcgagaacactttggtagcgcggacaaatttcttgataggtaaaatgagtgaaattgtttaaaaaagaactgaatgtacatatttattcaatattattttaagcccacaaccggtcgattggaaggaaaatccaccgaaattgcaaaacattgctgacccagaattgaagacctttgcaaatcaactgcatgagctttggaagaaattggggaaaaaaatgccagaatcggtaaaacggaaagaaacgaaaagcattgtttggcaatttcaggcgaaagaaaataagtcgacgctgatttacgttccgaacccttttgtggttccggggggccgtttccgcgagttttattattgggacgcttattggatcgtccggggactgctcgcttcaggtcaaaataatgggctattggggtgggtgaattagggagtgattaggagtgaatgccaaagctaaagtgatcggagaaaggcaggaaagtgatcggaaaactgatagtgccttttgagctgccgtattcatttgtcagctggtcaaatgtccgtccttaaatggtaaagcattggaattcaattcacaggaatgaccgaatcggtgaagcacatgtgtaacaattatgccgagatggtcaataagtttggctttgtgcccaacggcggtcgcatttactacaacaaacgttcgcagccgccctttctcactttgtccgttcgtttcgcatagttttaagagtgcactttagttttattagtaagacaatgcttttggccaattttcagaataccgtatttactgaattagtacccccccccccccgggggttctatttttcaaccccgctcgaaagtggggtactaatgcagtaagtacggtatttgttaattttgaataataatgttttatttgctctctcatcagcatggtcaacgattattttgcggagaccggtgacacggaatacctcaagaccattttgccagttcttgaaaaggtccatttggaggggtgtcatggcagttcgtacaatggcgtttcgtgtacagacccatttggaggggg

SEQ ID NO: 81888 - DNA, 1110 bp, Heterodera glycines
  unsure (1)..(1110): unsure at all n locations
aaaccggcttaccaaaaccgatcgtcgagtgccatgccgagctggccaaactgctcaacgactcgaagattgaggtcagcagcattgatcagctgacggaaaagttctggatggtctactacaaggccaaagatgagcatgtggtggagcacagcacaagcaatgtaagaaaagttttaaaatatttaaaaaagacaattggtgtatggccctgcaccaggtgtagagcgctacgacacccgcattctctacatggtaaaattcagaaaataaaatgaaaatgtgaagtaattttttaaaatcaggacacggacagcatcttttacgactacctgacgcggctgggggacccacttccgggtggtgagcagctcggggaactcgcggacgagtacccgaatcatacgatcatggagtttatttgtggtaagattagttaaaatttgaccaaaataaatggaaactttttgtttagctgggcccaaggcgtacggcctgtggttgcgcaacaacgcgacgggggaggacgagtacaagctgaaggtgcgcggcatcacgctggattcggatgcctgcgaaagaatgaccttcgagaagatgaaagatatggttttgaacaagctgggccaagcagacaacaacgtccgcttcaactacccttcgaagaacttcaagataacgaagaaaggagaaatttttaccgtgccgctggtaaaacagttcaacccgaccgtcaataagggagtggtcagggacaaagggttgagggtggtgccctttgggttcagcaaccaagagtggtgtaagtggaattgcccaggcgcttgtacctgtctgttcaacccagacctcaatgtgaacatgttcacagaagaggagttaaatgaccccgatattatgccataactgtttttattgtttcaattgattttcttcatttagtaatatttttattcatttatttcttcatttgtcacccctatatttttccggaaagccaatanatttcaccaatatttcactttttccatctctcactcgttctttgtatttcttttcaatccgatacattgtgttttccttcacttgtactttttgtaattctggtaa

SEQ ID NO: 81889 - DNA, 1225 bp, Heterodera glycines
atggttaccgacgaagatgaagatgaagaaattgaagtgtcaaagtttttaaccccaacaagccagacgcagggaagcaatcgatcacccaggaccaataagaaagcagcaaaacagcaaaaattgatcgagaagaaggaccacctgttggccatcattatgtctgatccgcagagattcggcgcaactgaccgtgggaaaatcattaacccaaagacgggccgagagtttatcgactcggacctggcctggtcaattgaacgcctggtggaccctcgcccggagaatgccccttcgccacgcggaaccaaagagttgaagaggaaactcgcacagaatccgcttgccagtagcctactcaatcgactgtttgttgggtctgggttcgtcggacaagtcaaacaaacgagaggatttgttctctcaaaatggacaagaaaataaacaaaatatacaccgacccggccaatccgggcgggtatgcgggtgcgagtgccctgtacgcggcggtgaagaagaagcacccaaagttgaagcgtatcgagtttgaagacttttgcagaggaacaccacctacacgctgttcaagccaaagagggagaagttccgacgcctacgcactgtgcctacgggtttcatgaccggtaagttgtactggggcttattgcgcacaattcagggttcagatgttcaggcggacttggcagatttccaggcactttcgcgcaagaacagcggctaccggtacctgctgttggcggtggatgttctatcgaggcgaatgttcggcgcgcccgtaaagagtaagcgcccagtggacatgaaaagagcttttgaagagctatttgagcaaatgccaagggtgccagacacaatgtacaccgatcgagggctggagtttgtggcaaaaccgttgaaggagttttacgcggagaagggcattcaaaagtttgagaccagttcaaagaaaaaggccgccgtggcggagcgtgccatccgcaccgtaaagactcggctgtacaaatatttttccgccaacaatacgtcggtgtgggtggatgtgctgccaaagtttttgagtgccatcaacaactcggtgtgccgcgcgaccggtcttagaccgaacgaaatcagcgacaccaatgcgagggaggtgtggaagagggtgtacggcgaagggctcgcacaattggacaagtcaccaaagatcagagccggggaaacg

SEQ ID NO: 81890 - DNA, 472 bp, Heterodera glycines
gtgacaccaaaaggcccaacggcgggtgtcttacttttatgcaaatttcataatactttcatcatttaattaaaatataatttaaattaattaccgattcatagctaaggatggcattaaaattgaatttggacactcaaattttgacacgccttctgtcattatgtgactgaagctgactacatccgtcaattggtcaaaatgcaacaattgcagtcgaattcgtctgtcaacaaagtcacaaaattgttccaaatgaatggaattggcgacaatgcaacacacagcgaagaagtggtcgtacttaattaattagtgagttaattaattattactaagaattaattaattaaaaagtttctttattatttaattcattcccaaattaccttctctgtaaagttagcagtcggaaataattggccccaattttcggagggatttgaattttgaatctttcggactttaatta

SEQ ID NO: 81891 - DNA, 2101 bp, Heterodera glycines
atgggtcgtgacaacacattgcctcaagcattgttcagaccattggacaaattgcgcgaattgttcctgtcgggcaacggacttcgaaccgtacgcattgaaattggtgggtacgtacagaacgacgttggcatgaagatttttatataattgtaggcttattaaaggaccgaaattaagctagccaatgaccaaggcttaatcagtttagcaggcccaattctcgaccgattggacttgagccgaaaccgattatgcccttctcgaaaaaattcaaacgacactttcggcatcgaatggcctccggcaagacaactgagccttgaaaatgccaatgtgttagaactgaacagcacacattggacatttggggaagtcaaagtcgaacaacagcagaaggtgcctgataattaattgcttaatcatagcaattcatttgatcagcttaaaatttcactaaaaacggtggagtgccatgtgtcaattactgagagccattggaaggcgtttgaacagctccgaattggaggaaaccacgcacttcgactacacccttctgtactgccacggtatctgctgaatgccgacaaataacaaataattatgtcaattgggcggattatcaattaattggctaattaaatgcctcttactcaccgccgttgatttgcatttgcatttatgcctacaattagactgctcactcttcatcatttggacttttccgatgccgcgtccgtgccggaagagttgtttttggaatggacacgacaggcggaaacgcaatggcatcacattgggctgagaagagcaaaaatcaaagccaaagctggtgctgatcagccaaatctgcgccaaaatcagtggacattttgctcagccaaattggaatggttggacatctcagaaatgggcagcattggtaattaattaataattaattaattggggaaaaggcagcaacaaaaaacagctgaagtcggcacattacgattggacggatgcgttcagctcaaatggctttatgcggacgcaaatgccctgggggacattcaaatcggcgactcgggccctgcggcgcttctgtctttgtccgcacgcgacaaccgccttcgccgttggccagcgggtctgttgcgctcggctcgctctttgtcgtctgttcagttggccaacaattccatcgcgcgactgccgcccgaacttttcgagcagtacacgcagctgaactcgttggacctatcgcaaaatgcattctatcacttccattttggcgattcgtcccatcagcagcagaccacactcatattcctcaacctcagccaaaaccgactccgttccgtttcactcccaacactgtctagtctgaccctcttggacctatcgtacaacattttgacggagttcgcctctttgagttcgctgccctccctggagcatctccacctgagtgggaacgcgggcattcgtctgaccatcgcagcggaacatcccgcgctccttcggcttcacttagccaactgttctcttacgaaaatgcccgatttgagtcggctaatcgcactccgagaattggatttacgtaccaatgggtatggttgttttcattggtttgcttttaattgttttggcacaggctcgagtcagtgccgggccatttgctgccttcgcgcggagtcaatgcgttggacgtcgaggggaacgctctgcgggaattgggctgggattggcgagccgaacaattggccgcgttgcgcgacttgcgcgccgtgggaaatccatgggaatgcgcgtgcgaattcgcaccaccggtggtgcagcaactgttcaccccacaaacacagcaaacgaccgtaagagcagcaacagagggaaaagccggactgtggccattcccatggcttatgaccccccggggcatttggaagaatggcactcaccttcccaaaaggaattgactaaatgcgaaccaatgaacgaatgccattcgaacattttcagaatcaaaggacacttttctgtggggggaaatgttcacgcggagacaaacacagaaaagttgagaatgagcacagagaagcagcagaacagcagcaaaacg

SEQ ID NO: 81892 - DNA, 1628 bp, Heterodera glycines
atgctcccactggacggcatcaaactgaaggacctcgaggccggcttcatgtcccggcagcacaaatttgcacttttctacccggacggaaagtgagacgggaagggaacggggtggccgggcccattcattcattcattccttgccgtttcccttcccttgtattttttttacaaaatgcgcaatcattgaatgaaaagtgtgcatttagcatgtgagtgagtcttcatcccttccgattttcccccaatttttggtctgtgtcggagtggacgaagccatcagccaaaaacagtgccaagtttcattaaacttttatttggcacaaatgcgcaaaaccaatacattcttccctctttccaattttccctttgtgaattcggtcctgtccatttttgggcattattttacatgcattaacaagggatgcttcaaaaactgaacagtttgacccgggaattgctgtttttatacagccctatctgccccctcccttttacaatttccaccttttatccctaattatgtgtgttcatttgtctctccatttttacgtttttcgcttccaggaggtgagtgggcggaaagggccaaatcgcacataactcgcgatgatagtgagctgcctttttgccgttctgtcctcgtcccaattgtcgtccctttgggttgcccctttctgtccttttccttttgttgcgttttgtctccaatttccccatttttcttttgtgcctttgcttttcgttgctttgtttttttgggttttgttatttttgcatttccttattgaaatttgttccttccttctcaggaacatttacaaagactacaaagaattggagctgagtgctaaaaacttggacgaagtggacgcatggaaggccagctttctccgtgccggagtttatcctgagaaggagcatcagccgacatcggacgaagtgagcggacggagaacggcggggggggggagggccttcattagcaaattcggaaaattagtccatcatttacgttttggtcttttgattgtcgcatttaatcaaatccgaatgtttgctttatttatccttcccttaaagcaagaggtcagtttccttccgttggttggccattgagtgggttcatttttcgtcttttcgtttgtccttttttgttttttgtccgtttctcctttttaaatttatttttatttattttttgtgttttttaatttcaattttacattttcagaatggtcatgtggaggagccgagcagtttggacccgcagttggagcgtcaggtggaaaccattcgaaatttggtggactcgtacatgcgcattatcaacaaaaccatccgcgacttggtcccgaaggcgataatgcatcttatcgtaaacaaggtaagcaaagaaaaagttttacaagtaattttattacttaaattatattttcattgattaaaaatcacatattttttcagttgggcgactttctgaaggatgaactgttggcgagtctgtaccaacatggcggggatacggtagcccccttcggttttatttttgttcatattaaaaacgcattttgctgcttaggaacaattgatggaggagtcgccgctcgaggctcaaaagcgtga

SEQ ID NO: 81893 - DNA, 313 bp, Heterodera glycines
cttcaaaaagtgggcatcaacccgagcagtatcagtttcggaaatgttacaatggagtctgacaagtacattgttgttcgtgaaactgttggggacacggctcaggtggtgatagtggatgtggcgaaccccaccgatgtgacccggcgcccagtcagtgcagaaacggcattgatgaaccccgtttcgaaaattctcgcactgaaatgtatgtatagcattactggacttgtatatgatagaatcacgtttttaagccgggaagaccttacaaatattcgatctcgaactgaaggccaaagtcaagactcat

SEQ ID NO: 81894 - DNA, 1336 bp, Heterodera glycines
atgatcaccaaatatggatacgttcatttgttcgacctcgaaactggcatttccatctatactgtgcgtgtgtcgactgaaactgtttttgcgtcgactgaatacaaagtgaacaacggagtgctcggcatcaaccgttctgggcaggtatcaattggttttacatttggtgaaggctaaattcccagattatcgctctatgtttcatttgatttgtaggtcatcagtgttggtcttgatgagaccacaatcattccatacgtcacacaacagcttcaaaatccggatttggcactcaaattggcctctcgttgcaaccttcctggtgccgaggaattgtttgtgcgcaaatttaacttgctcatgggaaatggaaattacgccgatgctgccaaagttgctgcgactgcaccacagaaaattctgagaacaccgcaaacactgcaaaagtttcaaagtgctgtccaaccgcaggggaaaggcgctgcaccgattctgatttacttcaccacccttcttgagcaaggctcattgaacaaatacgagtcgttggaattgtgtcggccagtgcttgcgcaggtttgcgtttttatcgctgcgtttcaaagattatgttttgaaccgttgtaaaaatttgcagggaaagaagcaggtcgtggagaagtggatttcggaaggcagtttggactgcagtgaagaattgggagatttggtcaagcaatacgacatcaacttggcgttaagcatttacttgcgtggcaatgttcctcacaaagtcgtccaatgctttgctgagttgggacagttcgaaaaaattatcctctacgcaaagaaagtgaatttcgagccggattatcttttccaaatgcgccaagttcttcgcacacatcccgaaaattcctcaaaattcgctctgatgttgctgaatgaaggtccaagtggcgaaccattggcggacattaatcaggtgatagggttttccatttaaattccggtcgatttgcatacaaaaattgttgtttagattgttgattgttttgccgaggctggaaacatccaacaatgcaccgcttttttgcttgaagcgctcaaaagtgacgacgagtcccaagggcattttcagactcgtctgctggaaatgaatctgatgtcaaatcctcaagtgtccgatgctattctgggcaaccgaatgtttaatcactacgacagagcctcgattggtcaattgtgtgaaaaagctggtcttccgcaaagggcgttggaacatttctccgatttgtatgacatcaagcggtcacgttgtgcacacacaacatttcaattcagaggttattaa

SEQ ID NO: 81895 - DNA, 978 bp, Heterodera glycines
atgccgaggctaacttcaagaaagacgcaaaatacaaggctctcaatgatgccgaggctaaagcccataaagacgcagaagacaacgttataatggatgctgaggctaacgccaataaagacgccgaatagaatgttaaaaaggatgccgaggctaatgccaagaaagacgcagaatagaaggctaagaaaggatgcccaggctaaagccaccaaagacccagaagagaacgctataaaggatgcccaggctacagccccgaaagacgcaaaagcaaagaacaaggaggaagaaattaggaaggaaaaggctaagcctcgaagaaaaacctgaggcacctgccgaaggcgtatccgtaatgcctgaatctattaatgcggaagagacactggataagctgaagcaggaatagagaccagtggaagtgcctccatctacttctttaatcacaggataaagaaagctgcacaggagaaggctcaaaaggatgccgaggctaaagccaagaaagacgcagaagagaaggctaaaaaggatgccgaggctaaagccaagaaagacgcagaagagaaggctaaaaaggatgccgaggctaaagccaagaaagacgcagaagagaaggctaaaaaggatgccgaggctaaagccaagaaagacgcagaagagaaggctaaaaaggatgccgaggctaaagccaagaaagacgcagaagagaaggctaaaacggatgccgagactaaagccaagaaagacgcagaagagaaggctaaaaaggatgccgaggctaaagccaagaaagacgcagaagagaaggctaaaaaggatgccgaggctaaagccaagaaagacgcagaagagaaggctaaaaaggatgccgaggctaaagccaagaaagacgcagaagcaaagaaaaaggaggaagaaggaagaagcaaagaaagacccgaagagaaggctgaggcacctgccgaaggctaa

SEQ ID NO: 81896 - DNA, 835 bp, Heterodera glycines
atgttgcgctctgtgtttctgctgcttttggtccttctgatcggctggctgatcgcatcggctgcacgcaaccaaatcaccgattttatcagttttatcacaccgcttattgtaaatttgttcatcgctgaacctgtggctcattcggttatgtgtaccaacatcaaaagtgtactgatcggcattatcacttgcgtgccaattttggcatccgccagtggggcgcccatccttttgctgaacaggtgtaaaaaggacaaaaattcaattaaaaaaatattattaataattttatttatatttaatttagcagcgattatcggactgcgtacaaaaaggcgattatgcgaagaaaaggcaattcttctacggttggaccgctttttcgtccacgccaaattgtggtggtttcgaatgagcgaaaatgatctttttgggcacacaatttttggacaaaatttaacccaagcttaattttactgaatttattgattttcagaaaaatgattcgtcttcaaaattttgtgatttgttcgctaagatttttgttgtactattttttaaacatttatcatttctttcaatgtcaagaatgtttaatttggttgactctgacaaaagtcatgggaagtttttgttcaaaattttcatttgatgatttttcatataaccctcttattcgagcgtggtggtcgcattctgctgactttaacattacctttacatcatgaggaccggtaaattggacaccaagcggaaaactggacaccgtcggaattttggacaccaagcggaaaactggacaccggaaaactggacaccatcctaaaataaa

SEQ ID NO: 81897 - DNA, 848 bp, Heterodera glycines
atgattagaagaggtacaactgtgattagaagaggtacaacagcgattagaagattgattagaagaggttcaacagtgattagaagtagtacaacagtgattagaagtagtacaacaatgattagaagaggtacaaatgtgattagaagaggtagaaaagtgataaaagaggtacaaatctgattaaaagaggtacaaaagtgattagaagagtgattagaagaggttcaacagtgattagaagtagtacaacagtgattagatttgaaattaaattattttttttacaaattcaaaaaataaataatgaaattctttaattaaaaaaaataaataaatttaaatattttataaaaaatatttgaaattaataaaacatgtaaaagtaatcaaaaatgcacagaaaaataatgtacaccgatcggatccgaacttcgccccccccccctcaaaatgatgcctcagaatccccaatcacacagggattctgagggcttaacgatgtcaaaagtaaaaactgattatgtattcatgatcagcggcccaaattacccataatgacatgtttttagaagatttttgttgaaaaaaatttttcactcaaaaatcctgtccaccccctttggtcccgaatgccaaaatcacttttatttttgtatctttattttaaaagatgataaaaatgtcaaataaaatttatattatagagaaaaaaattgcggatttttgtagtattttacttttccctaatgacttttcagaaccgagatataaatttttttctgaaaaatcgaaaatttccagaatttctggaataactttttttgtttttgaggtataaatttcaa

SEQ ID NO: 81898 - DNA, 885 bp, Heterodera glycines
atggtcggaaatggaaatgaattagtggaaacagaagatgacgaaaattctgttaatttcatgaacttgtttgcgaatttggaactgacggattctgaaaaattgcctagtcatatggaaattgagaaaatattttctgacaccacaccaccgccagctgatctgccaccaattgaaagctcagttcttgggtttgtgttcatctcacaccccatattgtgggcactggtacaaccggacattttgggcgaacaaaatgagctattggaccaaaaaaatctaagcttagaatcggatcaattagtcttccaaagtacaccaagttatgtgacgacaattacacttgaccctaacaataactggccacatttcacacaaatttcgttgaattggaacaaacaatctctgttaggaactcggctcaaaacaattgatctgaagcaaatgacttctcctccaaaactgggaccatcagtaagtcaaattgtcccttcgagctgctgcggaataattagggaagtgatccaaaataaaatcacctcagaaattatggccattgatgtctttttgtatggggaagaaactaatcagcgttttttcccccaccaactcgattcaagcgttaacctgacggagttagaagaaggcacacgggttcaaactacgggattttgggccaaaacttctgctatggaatggccaacttcgagtgatggagttcgcgattggtggattgagcagatttatgtaggaacgaacttaaaaatatttggcgctgatgaacatgaagacattcatcaatggctccaaaatgaacaatttcgactatcataccgttacctatgtgccgccatggacttgcaacaatcaccaaaacgcagatga

SEQ ID NO: 81899 - DNA, 612 bp, Heterodera glycines
atgccaaaaaaactattaaaaaaagagggtattcggaaaatgagagattttgtaagttttccctaaattagaaaaattttgtatgaaatgtaaaaattagtcaaatattaaagtaatttgttaaaataacaatgatcgtttggcttaaaatagtctgaaatacgaaacttaaaaaatgaggtttttagaagggcaattatagttagacacttgctttaaattttggcagaaaaaatagaatgttttggcgtaatgttatatatttcttttcaagaaaaataataaataaataaactcaaaaaaaaaaataaataaataaaattagttttgccaaatccgctattgtttgagcttttcacttattatttatattattattttttattctcatttcagataattaaaattggcaataaaccacaaatgctgtttgcgggtgtaattgttctaccaatattcgttttgcaacattgtgtgtggaagtgtcgccctgtgtgcataatgatgcagggaacgaaggaagtcctctagttatgaaggttttttttttttttaattagtcgggaggcaaagaaataacaagaagaaaaaaaatctcgagagaaaaaaaca

SEQ ID NO: 81900 - DNA, 1347 bp, Heterodera glycines
atgggcaaagaacagtttcgcgaggcggacacgacgcgcaaagtgtgagtagttgcttggttttgggctcaagtccagtttatgcgtccaatcgacttttgtgcgtcccatcaatttttatgcgtccaatcaatattatcagctaagtgaaaaccgattttttttccgtttgttggcaaaaagaaagtaaaaaacccgtacaggaatagaattgttacaattttttggtaaaaccacgtcagagtacaatttgaggaaatgctgcatatatatttgtttcagtaaatatatgcatgttcagagataccatggaaaacagaaatatttaccatatattggagtagatacggctgaattatcccgtatatttagaaatactgtcaatgcaattcaattaattagatgtataaaattgaatggacgcataaactgaactagagcctggttgtgtgcctttttatgggacccaattgttatggtgtaaactctgaagcgcggcacatatgcctaaaattccggaaatacaaaaaaaaaccggcagggactccccaaaagtcggcaaatgccgggttttccaagcataaacattccgggcacaacccccccagtcactcctcctcatggctgtccttaaaaatggcgacataaaacttttttttagtgtgggcgtcaaattcacggccggcagctcggagctgatccgtcaggcggcgcacctgcaaattttcagcaaccgactgtaccaggatgtgcagggcaatcgctggctgcccgccccgtacggtccgctggacacgcgactggtaaatcctgttttaaagcatttgttttccgacttattggacagccccatgttttctctcctattattgcaaaattttcttcccaaaaatcgtaatgaaaccgaaaaattgtgttttccgagggttcaaccagggaccgttccaggattccaacttggaggagggggcggcgaaattttctaaattttctttcgatttgtaatctgtttcatcaaaaagtggtaattttgtggattttcggaaaaatttcgctgttgaggaaggtcttgtaaggggtgccaacaaggtttggcactgattaccagcaatatttcaatttgttttgctcatttcgattccctccagggcaccttccaacaagcggtgctgtgcaacacgtgcggtgagaagttggacacgtgcgtcggccatttcggcttcatcgacctcgagtacccggtgttccatgtcggcttcttccgtctcgtcatccaaacattgcagtgcatttgcaaggtttgcgagcagcaccatggaaaatgaaaagtggcatttcagcaataaa

SEQ ID NO: 81901 - DNA, 917 bp, Heterodera glycines
atgctcccgtcggaaagcttgaattggtattttggctgttttttggctttgcattcaacgcattctgccagtttgtcgttttccttgctcttctcaaacaacccaattttccaaatagggtgaaatggcgccattaattatgaattattaaaatcttaactaaattggaagaaagaatatcaaaaatattattcctcatgagaaagttgacaagcaaatattaatctgactatttaattttggcaaaatgttttgccaaaaattcaaaaaattccaattcttaccagtgcatttttactcccgtttttgggtaaaaatttccgggagcgggatcgggagttcaaaattttccgggacgggagtcccgaacgggaatcccgtaaaaatcccgatcccgtaaaaaatcccgttcaccgaaaaaagcgggagtcgggagcgggaatcccgtaaaatcccgcgggagtcccgatcccgccgggctctagttgatatcattcgaaagcttaacaaaaattttgaagttttttcttaataaattttttccaggcttgaaaattttgttgcttttgtaaggctaataaagcatgttatgtcaccaaagcgactaagaaagtggagaaaaagaagaaatgaagaaaattgaggaagagaaatttaattgatttaaattggataattttaaatattgtgattaattttattatttaattggtgatctttgaaattgtgattttgtccctccattgaacattttgtacatttttagcattagtcactctttttgttgttgatcgctctgtccaaaattgctccacctacgctttttctttctatttaaacacgcacatttctcactcctcacatcttatccagacatcttattcatcttatcttatttatattttaaattaaataaa

SEQ ID NO: 81902 - DNA, 372 bp, Heterodera glycines
atgacgacagaatgggctactgtaacagtagcaaaggtcggcctaaacgttcttggcttccgctaccagagcaacagcatgaaaatcacaaaaaatttggctcatcggttggtgaaaatttcaaacaaaaaatgtggtgacaaaaactcaaacaaaaaaaaacgacaaaatttttcaaaaatctggcaaaaagccggcaactttttaaaaaaaaacaaaaaatcattaaaacagtaaaattttcgaaatttttcaaattttatgctaaattttaaggagatcaagtgcaaaatagtaaacttggcaaaacccggcatggcctcaaatgacggtttttccaggcaaaatcgcatcccctgagaaaaatattta

SEQ ID NO: 81903 - DNA, 667 bp, Heterodera glycines
atggtcaaacattggtcatgcccatacgaaatttggtgtgacaaatttttacgggagcacaactgtcggcgggaagagctgtgcaaagaggtgggatgcccagaggggatgacgacaaaatcgaaaatttgtatttttaaaaatttcttgaattttaaaccctaagtcccgggctgagtatttttagtcacaaaatgaaaatcttgcttataagaaacaattttcatcagtaaaaattagaagcctccataaaaccaaatttcatggtttctcaccaaaaataaataaaatattgccaaaatgaaaaatctaaaatttttgttactttaaaagcatttactctcctatagctgggtctaacccagaaaatagacaaattttcaataaatttaaattttcttgtccgggaattattggttcgcctcactccgaggctgggacctgtctgagaaaattgacaaattttcaataaatttaaattttcaggtgtttctgtccgccctgccccattttggcgtgttttttgttgtttccgcttacatttttcttggctctttggcgttccgtcaacttgacactcaaatggccaagcttccattccacgatgtgctgctgttcgcattcaccacaatcacaacaattggtgggtgaaaaataatgaaattaa

SEQ ID NO: 81904 - DNA, 399 bp, Heterodera glycines
gaaagattggcattttttgtatccaaaaatggaaaattagtccacccaacagggaatggaacagtatcagcaacacaaccactttcaacggcaaacgacatggaccgtccggatggagctggtcatcggcaccagcattctcctgaacagtattggtaaattctgtcatgtgaataactcgttaatattgggaaaatatgacaaaatgccaaaaattggacaatgttcaaatgggtagggacaaatgatcaactcgggcagtggagaagagggatttggggacaaatgattaacagataggactttttgagagccgagaaatggattttcttatgaaagtgtttgtttgacacgcattttttaaagttttcattcgcaaaaattctgcctaaaaataaa

SEQ ID NO: 81905 - DNA, 842 bp, Heterodera glycines
ttagaggatggggaggaggagaaattgaagttagaggatggggaggaggagaaattgaagttaaaggatggggaggaggagaaattgaagttagaggatggggaggaggagaaattgaagttagaggatggggaggaggagaaattgaagttagaggatggggaggaggagaaattgaagttagaggatggggaggaggagaaattgaagttagaggatggggaggaggagaaattgaagttaaaggatggggaggaggagaaattgaagttagaggatggggaggaggagaaattgaagttaaaggatggggaggaggagaaattgaagttagaggatggggaggaggagaaattgaagttagaggatggggaggatgaggaggaaaaatgaaaatgagaatggtcacattcaattaaattccaaaatttattcattaactcattcatttgtcttatcatagtttcaattttggagaacaacacttcgtttgcttctccactccctgcaaacaaaaacattcaatcacttactccatactccaattaacatttaatcattagagtgctcatttttaagcacaaaaaatcaccgattaagcactgttaaaagcagcaccaaatttcccaaaataagcatgaaaaaagcacaaaaaagccaaaatcagcacaaaaaaagggaaaaaagcacaaaaactaagagattaaaggcacaaaaaattgaaaaaggtattaaaaaaacatttaggtatttgctcccttattataaaaaaccctaaaaataggtgctaaaaacgatgatgataacataattttaaaaatcaaaaaattcttgtcaagaaa

SEQ ID NO: 81906 - DNA, 676 bp, Heterodera glycines
ctcatcctccccatcctctaacttcaatttctcctcctccccatcctctaacttcaatttctcctcctccccatcctttaacttcaatttctcctcctccccatcctctaacttcaatttctcctcctccccatcctttaacttcaatttctcctcctccccatcctctaacttcaatttctcctcctccccatcctctaacttcaatttctcctcctccccatcctctaacttcaatttctcctcctccccatcctctaacttcaatttctcctcctccccatcctctaacttcaatttctcctcctccccatcctttaacttcaatttctcctcctccccatcctctaacttcaatttctcctcctccccatcctctaactgtcaattgctcctcctccccatcctctaacttcgttttctcctcctccccagcctctaagttcagtttctgctcctccgcatccgttgacttcagtttctgctcctccccatcctttagggtcaatgtctcctcctccccatcctgtaacttcaagttctccgcctccccatccgctaacttcggtttctcctcctccccatccgctaactgcaagttctcgtcctccgcatccgttaactgcgatttctcctcctccccatgcgctagcttcgatttctcctcctccccatc

SEQ ID NO: 81907 - DNA, 573 bp, Heterodera glycines
atggcaaaaaatgtacgaaaacacacaaatttgagatttgcacaaaataatcgacaaaaattgcgggtaagactatggatggtggtgggcccccttttttcgaatcccgaattcgaacaaaaagttcaaaattaaattttttgtaagtcatgaaaatacattttcaaaggttttcggggacgctgatcacgagtccgtcatccatttcggccaaatccgcggattcaaacaaaaatttaaattttaaaaattcacatttgtaaattgttgagcttttaactatgttttcagcgcttaatatacctaaatggctgtattggaagagtttcaaaattttacattgaaaaaattgcatgaaaaactggctttgaatgacaatgattttgtcgaatggcttgagcatttgggactcgtgcattcgcgtcgctcatgtccttgatgtggtggaaatacttcgattgtagcagttggtggaaattggcgttgcactacaaagaattgtcgggcaaaaacagggttcttggttcgtagtgcgacttttgcggaccactatttctcgatagaactgtctaa

SEQ ID NO: 81908 - DNA, 559 bp, Heterodera glycines
atgccaactgtacgcgaaatacttgagagtctgcaaaagcgagtaaaaagaccccgcattgctacaaatgaagacagcgtactgaatgttgagaggacagacgcagaacaacaaattgaaggcacttcacccaggaacaatttggacgtcgcttcgagtgatgacgaagaaaattgtgagcccgttcaattcaaacgtggagaaacaatccggggagctctttgtctttggtatcaaggtgttaatagttttttttttttgatttttggacgagcagaacgtctccagaaaagcacaaaacgacgacaacggtacatcatcaaagaacaaaatgtggtgcgtatccttgacgaggctgactttgaatcgcaagaaggattgacaaacgccttgaatctgatcggacttgtaatgcaaggctttgttgagggacttcacatccgtggaaatgaagacagtgaggaagaaactgatgatacggatggaaattgaatttatgattttaacaatttttacttttatgatttttaacattttacttttttttctttggagttta

SEQ ID NO: 81909 - DNA, 1027 bp, Heterodera glycines
gccgctgacaaggaaaatatccataccctcttacacattcaattccaacttggccacaaagtggcccaagcagctcgacatatcaatgaggctgttggagctaatgtttgcaaagaacgaacggctcgacattggttccagcaatttcgcgagggccgcaccagctcaaaaacgcaagggagggtcggggcggccgctgatggttgacaagaacgttttggcacagcggttgcgacgacagccggacagttcaagtgcagaattgtcggcgcgacattgccacaaaacaacagcatggcgatggcttcgaaagtccggtcgtcggccgaggaggaccaaatgggtggcacaccatctgacggatcaacagaagcagcgacggctggacctgtatctttcgaacatcgccagacaccgaaggggtcatgtgctcaaccggattgtcacttgtgatgaaagctaactacatatgttatgacggcacaacgcagaaaattgtttggcggaagaagaatgaagacccgattttggtcctccgtcccaacatccatcaaaaaaagcgaatgttgtgtattttttggttcgtgcatggcccactgtattgggaactgctgcctcccgggaccattttggagagtacctctatattaaccaactgcgggcggttgtatcgcataccgcatccagaggcagcagggccaatttgatggacccatggtcttccgccaagacaatgcccctccacactgctcacgtttgaccacccagtacatcactaacacattgaattggaaagtgctaccccagccgccttatagcccagaccttgctccctcggattaccaccttttcctttctctcaaaaatttcttacgggacaagcgcttcactgaagatgccgaggtcgaggaggcggtggggcagtacctcacctcaaagatcggcacagactttttccgtagggggattcgcaaacttccttcccgttggagaaatgttaagggttcggggaaactattttgttgag

SEQ ID NO: 81910 - DNA, 778 bp, Heterodera glycines
atgtcggtacaccatcactccgtcatcgcttttcttcgttcaaatcaccaaattttcgacaaaagaggcaccaatttatatttgtggattccatcaccacactctacgaatggccaaccaatttgggatgttttggcccgtgaaatttggccaattttttcggcaaacattcgctgtttgggcttttcccgtggtgatcatttggacaatttgcgtcgtcgcacttcgccaacaattctcactgatctcaaccaattgacttcaatcgattcatatggtctgtcgcccgctgcgtttggtgatgattttgatgggccaaatgcaacaatttctgctggccaagcattgtccaaatggttgcactctccgagaaaagatggacaacccaagcgattgcgttgcgaagattacaacgaacaagggaacaccaattggatcgacagtttcaaggaggtgtggcccaacatttttgtgatttttgttttatcaaattgtttagcattttcttcgtgccaatgccatttcttccgtcagttaccaaattcatttttcttttcgcgtgccgtcaatgccaatggtgccgtttgaattggtgaacgaatggacaaaggaaaagctgacattgaccaaagaaaacgaaaatgacttggagaattggataatgaagcgatgcaaaattggagaggccgcggatgttcagcttcagaaagatgaaaattggggcaacaattttaacaatgtggccatttggcttttcagtactgattgcattgggtga

SEQ ID NO: 81911 - DNA, 546 bp, Heterodera glycines
gtataaaaacccgggattgacaattgattggactcataaaggtcgattggactcataaactgcactagagcaaaatccgttccctaatcatgacacataaacaaaaagatacaaaaacattcatcaatcccttttcatgtctataaaaatgtttgttttttcactttgtctcgcatttgaaaaaaaaataaaaatttctaacgcaattaattattctgctctttgttgtgtgatatcattcggaactcggccaaaattgtgctaattgccacaaaaatgaaccgacggtaagcaatttgaaaagtcacacaaattcatcatttatttagctaaactgttttccataatttcagttggatttgcaacgacgtttggatggacattttcccatcctttgaccatgctcaactcggcctcaaattggcacttctttcgccacgtttcaatgcgttggtggacaaacatttcgatggcaaaagcgaattgacaatttggagaccaatcgaaattcgtcgcaaggacaaaggaccagaaccgaaactatct

SEQ ID NO: 81912 - DNA, 633 bp, Heterodera glycines
atgattgttggaaagacacgaaagaaaaattctaattggcatggtaaaaacgaataaaataaatattaaagctaaacttgtttaagctaattagcaaaaaaaaaatattagaaacttataaaaaaataaagtttaatgaattttttttctattaataaatataatcatgcaatagcttctttatatttaaataaaataaaaattggatcgatcgagaatcaaattataaaataatagtcaaaagtttaaaatggtataatgttgagggatatacaaactaaatatatttagatttaaaaaataacaattttaaagataaaacggaagtctttcaagaattttttaagcggataattaattgttttagtataataatagaatacatttttgatcgaataaatgtaaaaatatttgtagcaattttgcaaaatgttcttatttttgaccctaaaatcttattttttggcctttattcttattttgaaaattttgaaatagaaaccctggatttagataaaaacacccataaaaattgactattctgacataatttataatccttaaatttggtcatttttagacaatatctatgaaattataccaaaaaagaattgaatcgaggcgatacatcga

SEQ ID NO: 81913 - DNA, 334 bp, Heterodera glycines
atggcttggacacccgacggccgtgtgttggccgtttcctcgatggaagggttcaactcgttcatcacagtcgattcgtccaaatttggcaccacaattgaactacagaatgcggtaacacctttcggagacgaagtagcaatgtcccctctaaacaaagcaaagaaaaacattcgtaagcgatgccctgaaaaatagtgataaaaaagcttaatttctttcctttatttattattatattgtccagataaaatgttttatcttgcaaagaaaccggacacattctgagtttttaacacagtatttatttatgattttaaaattatatttacta

SEQ ID NO: 81914 - DNA, 1370 bp, Heterodera glycines
atggcacgaatgcacaaaattccgctggaccctgactcggcaaatgtgccaatgtttgttgctaaatgcgagcaatggttggccaatttgccaacacactttgaacaggtcgaaatgcagcaaaacttcgatcaaaattttaatggtaaagaatttaaaaaataaaaaattctttttttaaattaaatttttaaggctcttctttgtctgagcagttaactgagctaattaaagcattggaaacttctgaatcaccgttggtggtgtttgcgcacaacgatttgctgctctttaacagtaagacaaaaacaaattctcatttatgttaatttaataatataattttggcacttaattttgctagaactatgattgatcaatttttgggctaatcaagacataaaaaatgtgtgattggctttttgggaacagttgatcacaagctcaattaggtgattacggtctgatcaaagggacaattcaaattttgaaatattatttttctattattttttggtgatcaattgggcaatccttggattatcaatttgattagattactcctaataaataacaaatggacagtttattatggcgatcaaggacaattttgatcagtagacttcttgagctgtcaaagattcgaatttttcatgcttcgagaacgggactgaaatttgatcacaaatgagttatataaatctcgacccattaattaatctactaattgccaaaaaagctaacaataaggatcgatttcccgagttttagagataaaaacaaattaattaattgcctaatttagtcctttttgacgaggaaggcactggcgatgtccatttcattgactacgaatatgcgggccaaaactaccaactgttcgacattgcaaatcacttttgcgagtacgcaggttgtgcacacagaatcggttgcacttcatttatgactacgtattggttttcaggtgttgatgagtgtcccgattatggaatgaattcggccagtgaagacgaacgtcggcactttctgcgccgttatttcgtctattttggccaaccaattgaggaagagtgtgaaatggacaaaatgttgtgcaaaattcggcactttgaagcggtacattcataatcacaataaaatagtgttaacttttcatttacaggcagcccatttttctggactctgtgggccatccatcaggcagcaaaatccgcgattcaatttgattacatgcgttacgcgatcacccgccatcgttactgcactcggcttatgacctcatcaggcattgctaaaaataattagccacaaaagcacaacattattgatttttggttttcgttatctgtactttatcaactctctta

SEQ ID NO: 81915 - DNA, 132 bp, Heterodera glycines
tcgcaggaaggcgtccttcagcagcagggaacagctcaaaatgggaataaagaggaggaagccaagagacaagcggaacggcaggaaatggcaaagaactccattttgacacaggcaaaggctgagaattaa

SEQ ID NO: 81916 - DNA, 1952 bp, Heterodera glycines
  unsure (1)..(1952): unsure at all n locations
atgcgctgcgtgcggcgtccggtgacccgacgcganctggatgacagtcgcaagcagttcaaggagctcaccgaacacattttggtcagttttatcacttcacggtttttaaattattttttggctttttaaaaaatttaaattgttaaaataattttgatttaatatttatttatttattttattttttatttaatatttttaaatatgcaaaattttatttacatatttttttaaataaaatatttattttagatatttcatttaaaacatataacctaacttatttattttatattttgtttctatttttaatttataggccttataaatttttattttaaaaaatatttaaaatacatttttttaaattatgaataataatttaagagttttttcgcctaaataatttattttttatattattgttcattattggcacgaattgcttaaataattaatgttaaaatttaagtcaaagcgaggcgaactgagtgccatcgctcagctggcgcagcgcattgaaggcgagatcagcgcttatttggcggagctcagtcggcgcaatgagtcaccggcgccgggattgcaacggcatcactgtgtggaggcggcgcagcgggcacaggacgattatgaggtaaatttaaaagaaaaaacactaaattctttttcaaaaaataaaaatcttgttttcataaaggatctttgctgaaacgaaacttgcaattttgttagattagtatgaaaaattctctatgttttcaaagacctaaaaaattttgtctaaaattaaggcatagcaaatttaagccgaaataagcaattttaggagtcttaatcaaaatttaaaaaattatcttaagtttgagtcttacgattccggaaaatgaaaattgttgaaattttcaaatatttccagtttaaatgtttacaaattaaggcacttttgggcgccaaacaggagctgtctcaactgttgcgccgagtggcgaactgttcaatgcaatatgagcaaaaggtggaggaagtgaacggatggatggccgaactggagcgagcaatttcgcatgccaatgtcggcacatcgggcgcaacaggtggaaacttggaaaaaaattttgcattttattttaaaacgaaattttaaattcagttttcaatcatattttgatcagttatgtgaatattttcaactttttgttcggctaactttttgggctttgtcattttttggctaatcgcaattctttcaaattctcattaggtagggtcgcgatttttaggttttaactaaattttttgctcaattgatttgaaaatgaaaaatttttctcaaaaatgtattttttggcaagaattttttaaaattatttttttagttattattttggttttttgctcttaaaaatcccagtcctactcatttgcaactgcaaatagtgaataaaaattatttttgctcaatttttggctgaaaattatgtcactatttgtcactaattcgtactttttgccactattatgtcactattttggcatttttactcactattttagttaactattttgggatttttcgtcactaaaagtcgcgaccctactcattagtctaaatttagcggttatgtttaattttgtaataaggttaattttctttttattttctgaccaatttttgataaatttttatttaaaatttatttttggccaatataattgaaaactttggcccaattcaaatatttccaatttcattttttgctcactttttctatacataaaatgattgctaaatttattattttggcatttaagccgatcgtcttgacctgttgagccgtctgaaccaaaaagcggttgaagggcagccgagaattgaagcggtcgaagccactgggcaacagttggacgaagcgacggcacagaccgatgcccatcagcgattacag

SEQ ID NO: 81917 - DNA, 540 bp, Heterodera glycines
atgattcattttaaatttccccgtaaattaagtttcaaaactgaaaaaattgacaaagtttttgcttcaccgttcaaacgaactgttcatacagccagtttattacttgatggtaacccaaaccatcacaacacttacataaacgttgagccgggatttggcgaggtatttaaaataaaaattgtttttttaaatactattataaaataatatttaaatattattttaaattaatttacagttttataaactctgttctgccaaacttggcttcatggacacagcgaaattaaaagaatattttccactaattgaccttaattatttgcctgtttacaacaaaaggtgggttaatgaagtgcaaaataatacaattaataatattaataattgacaatattacaaatattatttcgatcgtgggtccaaaatttatatctgttttgaaaggagcattagttttggcgttttgaaacagtacattcaatggtgatgacagcatttttattcaaaaacaccaaaattaaaatttttaataaa

SEQ ID NO: 81918 - DNA, 623 bp, Heterodera glycines
gccaatttgaattttttctgaaatttcctagtgaaaaatatggaaaattataaaaaatcaaaatttttaatttatttaaataaaaaaaaatagttttttaaacatatctttttaataatattattatttgctataaaaaagcattaaattcaaaaattttcctcgatttttaatgtcaatttaaatatatccaattttaagaatttttggtccgatttcacttattcaaatttagcataaaaaaatcagctcatacaaagcctatcaaccgaaaatgaaaatgagtgcaatttcacaaattcaccaagcacaaaatgtcataattgcacgttattttctggccaaatttctctccaccgaagcggagcattggcacaatattagcaaagtccattaattgcttttgcatggtgccgctaggcgccgtcgaatttttctttttgaaaatgtagtcgaaatttatgttgctaagtggtttcgtaaaaaatcactaattagggtgtttaccaaataattaccataacttttgctcaaaattaacaaaatttaatccttttgataccgtttgacagctgataatgcctgctaaaaattttcaacaactatacaaatttttgtatttg

SEQ ID NO: 81919 - DNA, 315 bp, Heterodera glycines
atgggaatttatgatgctgtgctgaagaatatccgatatcagctgaaggaaaaggaggaattctgcgacaaatgcaccgaaactgtaaaattaattaaatttaaattagtaaacatttaaaattcaaattttttgaattaatttatatattttttttaaggattacggtatatcgtacaaatatgaggattttttgcaatcattggacttaattgaacatgagttgcgcaacattcaaattacaatgacagatgaagacacaaataatgtgcagcaatattggacaataggcaaattaaaataataaaaaataaa

SEQ ID NO: 81920 - DNA, 1144 bp, Heterodera glycines
atggatgtccatgacgaggaagttgaaattattgggactaggtcaaatgagaggcaaatggaccgggctcatcgacaagaacaacagcaggaaaaattttactcccaacaacaaatgtctgaggaaagtgaagaagcattgttttgcatttctaagcatgacgttaaagaaataagccaagtggtcaaagcaatggcattccgagacgtgagaagcaatggcaaaaccatggcagaaaacattccgttttagcattgcacattaaatgtaagcaatgagggcattcgcttggcagtggacgaccaacacaatcagcaaggcagtgcctacttcagatccgagcacttccaagacttcaactttcgtacccaaacatgcagcattaaaataccgatgaggcctcttatggtaaatttatcaaaaaatgtacacttttggattcttggccaaattttgaacattaataggaagcactgaatatgttttccggtacgatgacaatggtgcaaatttcgtggaatggcgaaggctttccattgctcgtcattttggaagacgaaggcaggtgcttacaattagcaatcatcctcttccattttgtcttttaaggagttgttgtccacaccgaaattcgaactttgatagcgcccgaggtgtaaaaaatattttccatttagtatgagtattctgccgcttcagattctcgaattcgatttcgacaatgaaaatgtgacggccaaggcaattctgaactctctaccaattcgggagattatgcgcgacttggacgactccgccgaaacggtggtgctcactttcactcccggttatctgcaattttatgtggccggcggaatgggacgaatgaaggcactctcttcgagttttgaaatgcattatcacaaaaataggcatgaagcatttaatcatcaaatttcatcagacccattttctttattgataatatttttaggtggaattacccacaaattgtgaccaattggagcttttgaatgtgaccactgatcgcgttcaacaccggtatcgaatgagcctatttaaacggctcaaagacagcattcgcttgtgcaacaaactttcatttcgcatcgacaagaatgggattctcagttcacagatgatg

SEQ ID NO: 81921 - DNA, 46 bp, Heterodera glycines
atgtggtcatacgtatcattaccaatgcatcgacaaatggattgcg

SEQ ID NO: 81922 - DNA, 426 bp, Heterodera glycines
ttggcgtgaccaactcgtccagtatttcccacataagtatcaggaccttcgctatctcaacgagtattgtaagttctcattacaattaaaaaaatactacaaaggctataaatatttcttccattggcagatgacccatggggcattggtgttaatgacaccaattggcgcgagcgtttcaaggacttccaggtttgctttttcaaacgaatcatcatatatcatgatcattttttgattagtaaaaaaaattgttcagagtcgtcctcgagagggtgcaacgcttcactgatcgcatgattttacaatttaggaaattcaacgtgattttatttggaagaagttattcaatagagatgttattaaatggacattctcttttgcacaaattggtttagatgataaaaatttgttgctctcaaaata

SEQ ID NO: 81923 - DNA, 724 bp, Heterodera glycines
atgccgtcgcgaaatttgtcagcaaagaaaaaacaacagaattcgttagttcgggatgagtcgacctcttcacccagcagaacgcccaaatcggtgtcgaaagcgagtaacagcaacagtagccaacagaaacttcagaagaagcataattcatcagaactgtccacgattagcagtgaaagtgtcgagtacgacttcttttgttttttgagaaaatacagctaatgtttagaaaggatctcagctcttcaatgtctaccaatccgcacggacatccgacggacaaaaaatggaccattggggagaaagtgttatgccgttatctgaactcggagcacatttattatgaggctaaagtgatgtttctgaaagacttgtctggcggagatgtcggctatggcattcattatccggtcattttaatttaatccattttatcgcattgaagattttagggttggagcaaccgtcacgacgaagttgtaccacaacatgaagcactaattcgcttcaagaattactccgatgaagaggcaaccaaggcaaaggttatttttcgagtattttacgatgagtgttaagaaaaacaaattttaggaagacgtgaaaagggctcagcagatgctaaatgccaaaaaaagaaagcaatcggaactgaagaaccgctcgcaagcgcatgatgaaagtagtcgctccagcacaccaggaagcgccgacaacgcat

SEQ ID NO: 81924 - DNA, 863 bp, Heterodera glycines
atgccttccacacggaacacccatttcgcctcatttgtcgggtccgaaggatgtggaaaacgtttccacattggttttttctgtaaacaaaaaagcagttagtctaattaaaaattacaaaattgaaaaaaacatatttgatgcctcattttctccaaccaaattttggtgcgcttcatttcgattaagtttctcgtccaaaatttgtgtcaatacattaaaaacaaaagttattaatataaaaaagataatactcaaaatcagagcccatgttttaaaaaaaaaccggttatcggattcgtgaaatccaatgaccatcctcaggttcttaagtcatgtctcttttttggctctattgcagttcacacgaccacaaaataaattggcaactttaatacaacataatttttgctaggagcacccaaattaaatattcttggtatcattcgatagcattaagagtcctctattaatatgtgaaattgcaaaaaatttcgttttgttgcaaaaaagttatgatcaaaaatgtttagaaaaccaattttttgaagtcttcggccattactttcttgaaacacaacgaagttcttttaaattattacagaccaatatagaacttttagggctatcgaatgataccaagaaagtttaatttgggtgtttttagaaaaagttatgatgaattaaagtaaactgaactataggtcgcccttgggctctgaacaaaatccatgtaattttcggggactttaaacagcaaaagtggccaaaaataccaaaaagtgtgaagatgaaataattttggttctccgacatcccaaaagccccggcgaattccatcaacattcggcgacagccaaaaa

SEQ ID NO: 81925 - DNA, 2994 bp, Heterodera glycines
atgagtgacatcaaacagtctttatacgcagtgttgggaaaacgcaaattgggaactcctaattacaacatcaagcctgaaaatcgaggtggtaagccacgcttcatctgccaactgacagtcgccggactaaattatggttgagtttaaaagataaaatcgtctttattcttttttttaagttggattgggaaattccacttctaaaaaagatgcgcagtctaacgcaggtccgaggaagtcaaattatttaatcataaattcttttagcaagggactttagccaatttcttgtgcgtgagggtttaattaatgcgtcggaagtaccacaactgcagcttctggtgcttttattcagttttctttccaaaaacaagcattatatttctgtttaggaatctgcatcgaatattgataatgctcctcaaaatggaaatgattctgtttccgctgatgcaattggtcaaccttatcatcagcaacaaaatgccgcccaaatggattttacggatgacaattttgaaacaaatattgttcctttaccgccgcaatgggcaccttatgaaaagacagcgcatgaccaatatgttgaacagaaggcggaagaaatcattcaggtacaaaaaactaaaaattgaaaatattatggaatttagtctgaatccgttgacatgacgtccgatattcatggtataagtttttgttttttttttcttttttaaaatacacttaaaggtggatggacaatggagaactgcaaacaagcactaaacgaattttgccagaaaaatcgcattccaaccaacgaatatcgcactgttgctacaggttctgatcacaacaggtttgggtttttgttgttatcatgcactttatataaagtttagaacatttgtgtccgaacatggaatatttataccgtcgcttaacaaaagtaacaattcaccaccgatttaataacagattattttagctgtcaatggtcgcggcgtcggttcgaacaaaaaagttgcagaaacgagctgtgcactttcaattgtccgtcagctttatcatatgggtaactggttaatcccccacaaatgtaatgcaataaactccggtttagggactttgcctggggccaccggttatcagctgtcgaagaagaaggcatctcccgaaaatgtaaggcttccagcgacttactacgagaattatgtggttcattccctgtttcagttgcccgagatcaaagtgagcgtcgacccttctctggtggagcgtatcgacgcacatttgacgcaaaatggcatagaatcagtcgacaatctcattgattttgcgtccgattcgaaaccaaaaacgctttttatggagaagaaagttgaagagtttccattttcggacaacgaagctctccccagccaaaacattgtgtgggctccgccccaggaaaattggaatgcgtggaagtaagtctcataataaagttaaaattataaaaaaatataaacattatttacagcgcttcaaatattgacaatcaaacattggcatttcgttccttggaatggataagcaacgatttgttaacgcgggaaaagatcaaaaagattcctgcccgtttgactgcttcacgtcaagccctccccgtttttcaggttttattcaatggaaactggaaattgtttgttttttattataccattagcatcgggatgaaatcatgcacaatgtgcagcaaaattccgtagtattggtcaaaggcgcaactggatgtggaaagtccacccaaatctgtcaatatttgttggaaagccatctcacccagggcaaaggtgcccatttcaattgcgttgtcacccaacccaggcgcatttcggccattactttggccgagagagtggccgaggagcgctgtgagtcggtcggcgagtccgtgggttattctgtgcgctttgaatggatgggtccgcgaccttatggggcaataatgtgagttacttaaacggcataaacgacccctttttctctactgtcaaggttcatgactgtcggagtgttaatgcgaaaaatggaacatggccttcgcggaatttcgcatctgatcattgacgagattcacgaaagggacatcaacaccgacttcatgttgatcgtcgttcgcgacatggtcaaggcaaatccgaagctcaaagtgctgctcatgtccgccacgatcgatgtgggattttcaatttatccaattatagtagattgtttatttagacaactttgttcacgaattatttcggcaattgtcccatcatcgaaatcactcaacgtgtacaccccgtccaatatttctttatggaggatgtaattcaaatgctcaagtacatgcctcccgtgccagaacctgaacggaaaaagaagaaaaaacggaaatcaaattcggactcaaaagcggctggtgccaccgcgaaaaatggcgaaaatactgaagaaatgaatgaaacggaagactcaatggaactttcggagaacttaatgagatgtggggatgggtacgggcctgaagtgaacaaagcactgcgaaggatggacgaaagggaaattccactggacattattgaagtgacttcacacgacaaatctgtagttaacaaattgggtcatttagctactgctcaatgacattgacgcgaatggtcgtcccggggcggttctgatctttttgccaggttcgttaaaaaacaactgctgctgccgtgttttatagaaaagcattttcatcgactaattgttaggttggaatttgatctctctgctgctgaatcgtctcaccatgcatcaccccgtcttctccaaccaacaacgctttctcgtgctcccacttcattctcaactgacagcccgggagcagcaccgcgtttttgagcatgtcccggacggagttcgaaaggtttttcagtgttttaaggttaaatttgcaaattttttacaaacggaggaccgggctgaattattaaa

SEQ ID NO: 81926 - DNA, 433 bp, Heterodera glycines
atggtttggtcaacatttaaacctatattgtcttttaaagcccccatcaaaaatggacagccgtttgattgtttggtgtgtcataaacagaatgccaaactcatgaagctcaaccgccatctgaatcctgagctgagtgcattgtttcgctcgcccaacgatttgatgcacgaattcggagtcaaactgaatcaggtcatcgcattccaacaggcgcatcagcagaaactcgaaggacatttgatgaatgaggtagatagaagaacccaattaaacatttacgattacattttgtttattgaatttaggcacaaagggccaacgaatggacgaagtcaatgcaaaagaaaatgcaaaaattgtcagtggatcgtgacaaaatgaaggccgatttggagaagagcaaggaggagatgaacaaaacggagggaat

SEQ ID NO: 81927 - DNA, 250 bp, Heterodera glycines
atgcagcaacaacaacaagtaagaggacgaggttttgttttgtggaatctgttgagtgcttcggcttgctctatttttctagtctgatcagcagccgatggctcagccgacgctcttcccaattggtgcgatgccttcaatgtcttcttcgtcgatttcctccacgaaacagccgagagatgtgagtggtattttctcaattgactcactcccattcgattgtcaaaatatgggcgtcggagggtggtga

SEQ ID NO: 81928 - DNA, 974 bp, Heterodera glycines
atgcactacacggagacattcagccggaacaacagcaacagcagcattgccgagctgaaccaacaacagcaacaacaacagcagcagcaacggttgcaattacagcagcaacaacaacagcagcaacgtgcgagaagtgcagcgcaacagcaacaacaactgcagctgcagcagcaggcaacagagtttgaagttggcattggactgaaccagcggcgcaagagcggcgtgtacatgctaggaagtgagttgtgctgctgtttcttatattgatataatattttggaccactgatcgtacccccccccaagacccctccatacctgaattttgaatggaaaaatcgtttttttgttgaaatttccgaatttcttattggcaccttctcgaaagttctcattcacccaaatttccataaaaattgataaattattttctaaaaaacttaattagctttaaaaaaacgccgcaaaaaatggcgtacattcaccttcaatatgctaatttgtcaataagcaaatcaatcacaaatcactaagatgatcatattgattattttttattgctttttaaatcgctattgatctgtagtgatcattgtttttcctctttgttcagacatgaacggcaaggagcatcaggacatcaaacccacactgaacggcggtgttttagttggtggtgctggttcagctgctggtggtagtggtggtggcggtggtgctgctattgcgggtactgcttgccctcttcccgttgctgctgctgcaccaaatgcggcggcactctccgcctcaaacaatgctaccgcgaccgttgccgcaaccagcacaccgatgtcgaccagtgtgatgatgaacttcatgaacaacatgttgacaacggccaagtccacattgcagggccaaggcgtatctgtgttctacgaccaaaacggacttccggtagaagaaaaaaatatatgttttttataa

SEQ ID NO: 81929 - DNA, 110 bp, Heterodera glycines
gtcagtctgttcgatttgtttttcaatgccactgaaccgtgctcgttgtcagcacttcgaattggcacgacagattacgaaattgtgcgcgattcggcttggctggataa

SEQ ID NO: 81930 - DNA, 737 bp, Heterodera glycines
atggctgaagacgacaaagttgaagcgctcttcagacgggcagaaaagtgtgtgttgtgttttacgaaaacaatggggacgaattcctccgacgagggcttttttaaatttttttgggccctaattagcaaaagtgccactaacccttccttaaatttaatggttttttaaaagcaccgaaatttttctaaacctaaattaatatccaaataaaacaaagtttaggaccctccatctaattagcctggatattgttgtgccatgcttaaattcttcgatttctacattaactaacccccccccattttttaaatatatttttaccatttctaaccaaacattgaaacccaaatgtattttagttctaccaaagagcaacggctggaggccattcgacagcgcaatttcatcgacgccaaatttgggtaccagccgtacactgagtcgacggcacgggatgcgtggctgatcaacgtccaacaggcactattactgattggaaaatgaaattttcaacaaatttaaatgccatggcatttttggaaaatccggtttaaacgcgacaaaaatttgccgattttacatcacatgacagaggcgacgaagaatttcacaatttttgaccatttttgtttgaatgcgggttccgtaatagtcaaaatgaatgtccctttttcaaattattagcaaaaaaaaaccctaacaaaaatttcatgacaaaaaaattccatttaaaa

SEQ ID NO: 81931 - DNA, 471 bp, Heterodera glycines
atgcaacaattaaactaccgtttgttgaacgcgtgcagaaccggaaatgttgaacaaggtacgtaagtgttaacagtaataatattcagcttccaagtgggtaataagggcacgaatgggcgtcgaccaaatgggcgccagctcggtttttggggtataactcctttcatagttgaccgaattgaatgcatttaatattattcaatagtcctaatgttctctatttgcctgcaaaatttcaaaaaaattcgttaactttcaagatagggccaaaaaacataaaaaaacagactttttcgtaatttttttattttaacatttatgaaagttaacaaaaatttttcgaaattttgcaagcaaatagagaacacttagggctatccaatgaaatcaaattcattcagttcggtcaacaatgaaagaagttctactgcaaaaaccgagctggcgccctttagtcgcccaatttaa

SEQ ID NO: 81932 - DNA, 502 bp, Heterodera glycines
  unsure (1)..(502): unsure at all n locations
atgtcggggttttatgaaagccgtcaattgcacctgaaattagagatcggaccggtcgattatttttttaattactcgccgtttgatatgagcaacaagttgatggtcctcttgacccaaattcttcatccaatgctcaacgttttttattcacctgctgcgccaagcgttggcgccttagctgggcgcctggcgtgcccttcagcggccgcagctcctccggcaaacagcaaatagcggcgcgccaaacgccaatcaccggtcggcgctcacacgtcacgctcggcgtgccgatgctggtcgtcaacatgcagagatatcagagaaaaaaaaattaaaaattattttagcaaaaattttttaggtgaatcttgcgacgaagacgacgagttataggttgataatgaagaaacggaggatgagcctaattgcttttgttgtaatctatcgaacaatttctgaaaaagatttattttgaattttattaatatttttancaaaa

SEQ ID NO: 81933 - DNA, 178 bp, Heterodera glycines
tgatgatgaggaagacggtgacgaatcggaagaggatgaggaggaaggaggtgacgaattggaagaggaggagcaggaaggaggtgacgaatcggaagaggatgaggaggaaggaggtgacaaatcggaagggtccgacatggacatcgatgaattgtccgagggaatggaaatgtaa

SEQ ID NO: 81934 - DNA, 1331 bp, Heterodera glycines
atgccactccaatcagtggccttttatatgggcgaattgccaaaattgccgccagcctttgaaagtgccaatgataatggtaattataatgccaatgccaatgtgccgtggaacggaagcgaagctttgaccaaatggttgttctcctctcgtccggagaatgatttgccgcccaaagtgttgcgatgccgtgtctataactctgatattgagagttggattgcgagaattgaacaatacaaaacggtgatggtcaattttggttttaaatttgtgctgtttgtagtttaacatttctggggatgggtacggtagatccaaagactcaaaaacattttctagtaatggggatatggtagagttaggcggtacgatagatcggcaaaaaggttgttaccacattggcaccttttgaatatttaggcgagtgtacggtaggctcaaaaaatgtaccgtttgctaaccatcgattgattggcccctttgtttaggcatttgtgaatggcacttctcctcgtgccaatttcatcgtccttttcaaacgccggcctctcatttcttaccgcaatcgctcaatggcggacttcgctttgacaaatcatttaacggcggaacgactaagatttagaacattaaaaccagggtagccaactgaaaatttcaaaatcaacatttcaaaatttgaaaatttaaacaatttttggggccggcgatgccaagacgaaagtgcgggcgaattgaggggtgagggaagtcgagccccgccctctccccccccccattcattttgtaagagaaaatgacatagaaaaatcaacaaatcgccataaatttgaaaacttgggagttttgtgtagcaattttacataaaattggccattttgagatttacaaaaacaaaaaattaaatccagttttgacacttcaaaaagcaaaaaatttgataaatcagcagagttgttaaaaccccaaaagagtttcagtcaatttttgcttgtccgttctccaattgcgcgcgacgagaagaaatggatcaaatggatttcggcggcgattgaagggcaatatgttcttccacgaaatctaattaccatttgggaaaacgatgataacgccgaaaagggtcagtgaaattgtgggagtcgtaattgttcaaactgttcgagagtgagcgaaatttggcagagtttcgagaaccaacacctgttggaattgaccacctccaaaagcgagactctcgaacagccttttaactaattttgagaaaatatttttccttttcagctttcctttcgcaattcgctgctcaattggtcagcaaaaatgaatga

SEQ ID NO: 81935 - DNA, 522 bp, Heterodera glycines
cggcgatagtaccagatgggttggcaccgaaagcggtgaatgaacgaaggagcttttggggcctgaaaagcctatggcataagagggagtgccgagttagaaagtgatacgaaaagcattaaaaaatgagaaaagactttgagcaggaccatttgaggaaaaaaaagacgaagagtaagaccaagttacagtattctcatttaaaaattagagaagggagaaagcacagtatcccatccgatcagaatggggatgagagttacggtaggcatttaaaatatttctgcaatttacgacctgcttaacagcatctgctgccggccgcagaagcttgtaccgaagctgttgctgctcaaccggttccgcctcgtggatcagttcgagcgcgtggtgccgtcgttggtgctgtgccgcttccgcgtcggcgctgttccgcctgctgttttcgcacttctgcggaccctttggccgccgcgccccaccgtgcggacatttgcctaattgggccgggccccgtgggga

SEQ ID NO: 81936 - DNA, 943 bp, Heterodera glycines
aattgtattttgtataattaggtgaaatttcttacagtttattgcaactcttttatatataattttgtttctttttttcatgacaaatgattatttaaaatatggccactgtttttattgttctattttgctcgtcgtactttatcggcatttcatctcttgaaatgtttaatttacaattaattttattttttatttatttttatttaaatttacaattttattttatttttgttttttcgtgtttctccgctattattttcccccttttctgctcattgtcagatacattgctctgatgctcatttatttgggcgttggcctcgccgtcaccacaatgtgcattgatctcgtcggcatccaatacatccaaaagtgacaattctctcctcctcccaattttaatcactatgttttgcctgtctctctgatcagaatccattactttgggcgcaaattcaaaggcactgacattttgcaaattttgcgccgaaagcgaatgttggaacggcgatttgcgatgggcgagggcaaagagctgatcgaatatgtgatcaaacaggagagggagtgagttgggggggggggagggtcattaattgaacgaatgggcgggggaggagggcataaaatgcgatttttaggtaaattaacgatcaatttggcaattagcaaatttcacgaaaattgaatgagtcagcaggaccccgatcactgagggagtgatcttttctgagtgatcggagaggaaggatttctatttgaatctgtccaaatatattttctaaattgacgctctgccacagagcgttgttcccctcgcatcagccccgcgggttggcgcaacccgcgttccatttggccaaccaggcgcacgcgcgggagcaaacggagaatgagaaaatatcgctcagatcggagcagcaggaaatggtgccaacag

SEQ ID NO: 81937 - DNA, 1114 bp, Heterodera glycines
atggaaccttttcaattctttggcagatcaaatggagaaagtgttgaagaaaggagaatattcggatgttcattttttggttgggaaggatgacaaaaaggaggcgagtcaaaaaaagcaaaaaccatatcttaatgcccaaggataaacaattacatttttagaacatatttttatggaaatcttgtaaattctcgaaaaattttctgcaaaatctataagcgaatgcatataaattttgaatatagtttaatgatcaatataagatcaaaatttcaatgttgataagaccaataaatatgcctcggtagctcaatggtcggatgcccacggattgggatttagggtgggttcgattcccacccgagtcctaacatattatcattatttatttgtaggaaaaattactttaattctctaaatttttccgtcagccttttaaattgaattttttgaccttttttaagattgtaacagctcatagagcaattctctccagtgcttccgatgtatttgaagcaatgttccattacgatgaaggtcaaattgaggtccccgacattgaaattggtgcgttcaaagtgatgctaacatttgcttacacgaagcgttttaacggattgaatgccaataatttgttggaagttttaaaagctggtgaaaatttattaattgaattttaaataaattggaattttaattatagcagacaaatataacatcactggcctggtaaaagaatgtgccaatgtttcaattcaaaagttgccaaatgtttttgtggcttttgaacaggctttgttgctgaagatggaggtgaagaaagaattttaattattaatctcattaacactaattaatgggacttgaaagtttggggtgagaaaacaaaaaaatgtgattaataataagagcccggacaggaaagaatcaagtacagagacccacagattcttatgaaaaatttgattcgaaaaatatacccctaaagaaagaaaaaatttttgaaaacatgccattaaaaccgaaaaaattggaaaaataccataattgtgaaaaacaaaaatttatgaccgaaattcgagtaaaaatatctaattttgcaaataataaa

SEQ ID NO: 81938 - DNA, 932 bp, Heterodera glycines
atgcctggggacgtctcccaggcggggatcgattggccaagtctcttaggtggctcccgactgactcgactgatcccgttggctggctctccattgccttttaagcgcccttcggaatgggaggagtttatcggagtaataaatgggcgtgggaaaatgccatttccggtcaatgccttacacctccgaccctccaaaagaccgtcccttaatttcaagatttcacgaagtactcagacttttttttcattttattttgagaagactactttttttgagttgagcctaaacaaaagactatatttttttaaatttaattaattaaaataagaattggaaaatgttaggtctctggtgtaaacggctcattcctccaaccaatccgtggaacctctaacattgagattaccgaggcacaaccgcctatttttgtctaataaaacatttatttttcgtttgaccacgcccctttgaaattctgagtcgattggatttgaattaattgattattgattttagagatatgggcccaagaaagtttgcgatgaagttaaaaaaaatatataaattaaacaattatttgtttcgcttccaatcgatgaaattagatttttagtatatttcggggtgttgaatccaagttccagaccacagcaaatgaccaagcgtgaccgtatgattatacctccccttcatatcagcggatcgtccctgatccaaaaacttaaattccacgggattcatatattccttcatttatttaattaatttttttttaaattcataatttttgaacattcgcctttgagttatcaatttctccagtttttattattcattaattagctccgcagggcttagacagaagtatgtgagtaatatgttttgtttcaaaaaaaattgaaaagaattagcttttatatttaaataaa

SEQ ID NO: 81939 - DNA, 667 bp, Heterodera glycines
atgcctccggcatcgttggccgatttggcgtccacggccagctcgctgctgtacgcgttgcagtcgtcccagtccagcgcggtgatggcggccaacacaattttggtaagaatggccgaataaattgcaatgatatggtggttccttaaccatggcttggcatatcgccattttgattaatgtttaatgattattgttgatgcttttagcaaaatttcgtcagcggtgtgcagccttcgctggtgtcggcgctgaacaacagctcccccgccctaaacgttcatcaccacaaagttgaacccgctgaacaccaatcacagcaacaacaacaacagcagcaccagtccgtttttgttacaactgccgctaccgtaccacccccggctacagtcaacaccgtgtcgccaacggtttccaccgcggtgccgcctttcccgatggccagcaagtcgctgtccccgtcctcctcttcgcgttccgtcacaccgacggtctcgggcccaacgagcgcgggaccgttgcatcaccaccatctgatgagcagcaacagatccgaaagctgtttggaacagtttgggcaacagcacagcaaacacttccaagcaatgcacggcggacaatcgcagggaaaaggggaaacgattggccaattggagagcaatatttg

SEQ ID NO: 81940 - DNA, 1212 bp, Heterodera glycines
ctcgtataccatccaacaactacacccccactccaaatatcgcatcggagtcgccgcccgcactcagttgggcgccggcgaacgcgtaacgcgggaggtccaggtaatcggggaacgcgtcaccagggaagttcaggtggggagcgaagggcatgggtggacgggtgatcagtgtccgatttgctcagactgatgagtcggcgccgaccgcgcctccggcaaatttccgcgtggacaatgtgggggaacaaaatgccgaactgagttggcacgcgccgccatgtgagaaaatggagaacggattggcttgaccagacttccctttaggcgttcacaccaacggagacattactgaatatgaagtctgtgctttttctctttccacttaccgtattccatttgctattacagtacgaaatagccgctgccgatcgtctttccgcccaaattccgcgtctgacggacgtgacacggaccactcgagtgcacttgaccggcctgctgccctccaccgcttattccgctcgtgtgcgcgcgttcaccgctcgcggggcggggccatggtcgcccgaagtgcgcttccaaacgcgacccgtcgcgctgtccgtcgtacaatacgacccgaaaccacgcgtttactcaacggggccacaggaggcgcaattggtgtggcagacggaccagcaaggggccaactacttcgacaagttcgcctgcaaatgggcacctgttggcactcagcaatatgtggtgagtgtcagaatatcaaagaagcgattactgtaacaaaatcaatgacaggaggaacgcgtgttccccgcgtacaatccatgcgacgtccaactcgtgcagcgctaccagttgcctcccagcaccacccaagtgcaaacgcactgtggacagatcactggactgtcacgggatccggccgtgttcgattttagcgtgagtgtactgctccaactcttcggtgtataaaattcctctgcttttcaggttagagccaagccgcgagaacagtcctggcagccgtggagtccgccccaacggccggtgcctccgccaccgccgcccgtccgtccgcgcccggcgccgccgccccctctgccctcgctaatcgtcgagtgcgagcggctgtcctcgttgcacaagacgggcggttcgcccatcaaagagcacttcacctggtcccttctgccacagtgacttgct

SEQ ID NO: 81941 - DNA, 700 bp, Heterodera glycines
atgatgaatcgtaaaaaaattgaaaatcttcaaaaatgtcgtaagcgcaagtttttggataacaatgacagtgaaaacgaaacgctatctgctgatcaccgtgagcaaaatgagaacaacaacgaccgcgacgatgattttgaagaccgcccctatggagatggagcagtttctcctctactttgcgaagacgtacatcggaatgacgcagcaacagctgcttgatggtgaaaatgcgtttggagttcgtcctggtggtctttctccattttcgtgtccgtttttttcattttgttttatttttattaatttgcttttaagcgtttgctgggacatcatttgcgtccgttggatctgaccatacgtactcacggcagcccttgcaatttggcatcgactcgcccgccccctcaacactatcatggccgtcaacagtggagcaaaattcgccgttggtgcagtactcattgagtccatcatcaacgacgacattgcagccaggcacagaaaaattcccaaaattgttgatttaaaaaattttaagcccgtccttgggaagaacccgtcgttcgtcgcgcactgttcccaattccatattggaacgtgcactcgcatgcggcttctgccctcgctcggaccaacaatggcctcgaagcaacccatcttcatttctctgtatttattacttataaaaccccaa

SEQ ID NO: 81942 - DNA, 1158 bp, Heterodera glycines
cgcaaatgcactctctcctctttctctccttctcttccgtctcctccccacctccactcccttccagctgccgttcgatttcgtcgttccatcatctgcgatccgcgcactgacttttggtgtcgtccggacactttcagcaccaacaaatccgaacaaaatggtcgaggtaaacactgtgtgtggcgtgccgtgatgtctgtcccctccctcccctccctccccgccccctatttactcaattaactcattctttctctacgctgattactctaatcatttttgttccctgccctttgatcgtttgcctttttctcttccgctctctcacttttcaccgtcttttgcttgctttcccttttccgctttttccctgctttccatctttctcatgccatctcccctttttagcactcatctccgcgccgactttctcccaaagttccgatggttccctacaggtcaaatggcgttcagaaggcagtggccgcggggtgttcggttaccgccttttgtaccgcgcccccggcgccggatggaacccttttgggtgaattttgtccacatttaagatcataatagggcgatgatttataactccgattttgcagtcaaattgtgccgtacgttggcgaaggggaggagaacagcgttttgctgagcggactttctgttggggtgccgtacgaagtgaaaattcaggcattggacaggaactcttacgtgctgtacacatcgccagaggtaaaaacaaaaacaaacaacttgccattggaaccagtagtgatctgataatttggcgcttcattcgtccttttctttcatttgccttgttgatcggcattttctccccccccccccaaaggtccgttcttcgcccacctgtctcgtccctctgctccctccgtccaatttggccattgacactcccgacccaggccatgtccgtgtcacttggatgccgcctccgcaaagcgcgtggcgatgtgctaatgccgaagtggaacttcaggcgagcacagaagtgagaaggtcaacaacagtgctccattcggcaggtggacgaacaaagtgggcgttctatcggtcagcgcgtgcgagtctcacgcggatcagccatgttttggagtcggaaacggaccacccgtgggcgatcag

SEQ ID NO: 81943 - DNA, 2033 bp, Heterodera glycines
tgccggaagagtctggagaaatgcgcttggaatacgcgggaaataacgaaattcgaattgattggcctcatttggaggaccctttgctgcaacattacgaggtgaaaatgttggtgctgatgcgccattttaaacatttacaggtcgttttgtccgaaatggtgacggatgagcagcagaaaaagacagacgaagccgcgaaaggggcgggcgaaggggagagaatggagcgcagccgagtgggtcccaagcagcacaccgcttattttgccgaactgcgccccgacactcagtaccgagtcggcgtggtcgcatacgcgtgagtcacgggcaaatggccaaaaaataaatttaaaatggcaaaacagacaaaacaatgtgaaatgaatgactgatcaaatcacagggaccatgaaccgaaacgcatctaccacatgttaattcgaacgaacacagaaccaatgcaaaagctgtcgcaaaagccagtgattgtcgaaatgagagagggaaggcacgaggtgatcaggggaagagagtgggagaggaaatgagagacggtgaggaagagagagagagacagagaaagcgggggagagagagagagggggagaaagagagacatgacgatagaaagagcaagagtgatagtgagtgataaagaagaaaggaagaaagggtaaggggagagagagaaagaagagaaagagagggaggggggggggtagggagaaaggagagagagcgacagtggccaaaggtgatcaaccgtttggaagtgatcaaaaacgaacaattgaaggtacgaatggtcaaaaccaagtcgaatttcattaataacaggtgcactggaagtccgagccgactgttcccgccactcatttcgtcgttgagtttcgccttggcaatgattcaaaatggcgccgtgcggcggcagagattaaaccgcccaaagagaatgggcaccaaagtttggctgcgcgtctcactgagctggaggacaacgctttatccgtccgcgttgtgttcgtcgacgagcgaagccgagcagtggcggtgaccggggagcagctaatcgcgcacagagcggacgaaaagtcatgcgaaagaatggcaccggcggtgccaaaagcggacgaagttggcacggaaagcgtacggttcagctgggagcagtccaagtgcgagggcgatatacagggatacgaacacgcggtcggtggttatcgactgatgcatcggcatgccgaaatcgaaaataacgctgccaaccatttaccttagatttggccttccgaccaatcgccccccgagacgactgccttctctgcggatacttccgccaccgtcggtgacctcgaagcggccaccgcgtacactttccgtgtccgcacacgtcttcagcacgggcacagtccgtggagtgttgcgattggagtgacaaccgccgagggcaaagatgaggacgaactgctgaagttggaggaccaaaagacggacgcggtacagccaaaggcatctgctgagaatttataccgcctgcgcattgttttggcaccacctcactcctttttggtgtggagtccgccgccggaacaccgcgagaacattgcgcgctttaagtgggtccaaactggcaaaagggcatcattcttcttccattaagagtgtcttacaaaccgaccgcttctgcttccgccccgtggacttcgttggttcagtcccccgccgaattgcaatgtccgccggggctgagcacctacgcggagacggactactgcttgaacctgcagggattggactttggacggcaatacgaagcggaagtgacgtacgaactgaaagagccgaagggtcgttggagccaaaggggcagcccactgttcttcattttggtcaagacttcgtcggaagaacagcgcattggcattacttcgccggacgaccaactgccgggcatttcagtaagcgaagtgcgcgtcgaaccgacggagggcgccaaaacgattgtgcgatggaaagtgaacggacaatcg

SEQ ID NO: 81944 - DNA, 423 bp, Heterodera glycines
atggctattgaacattcatttgtcggtggcctactgtttgcaccgtttcattgctttgttcgcccattttcaacaacacgagccttcggcacaatcaccggcattggcacaatcgccaccatcggacgattcagtaccaaatgccgtgccaatgccaacaaaatttgcgcaaaattccacggcaccaaacagaagcagcgaagaagaccaatgccagcagagaaattgatgaaagcaataagagatagagagagagaaaaggaccatttttaaaattaaaatgccaatgctggcacccaatttttgttttaagtatgccaaaatgcctaattagccttttttgcatttcttttaaattcattctttccatctttcgttgtatctgatctctaaattttttgaatattgttttatttcaataaa

SEQ ID NO: 81945 - DNA, 309 bp, Heterodera glycines
atggcacaggtccgtgtcgcgtaccaagccgtcgtcaaacggtgccaattcggttgtcgcttagactgtaatcggcacttttacattggcacggacattggcggacagcagcaacgggcggtagaaatggaagcggatgaagagccgcttaattatgaccgtgccgaagaggaagatgaagaagccataaatgctgatgccaacaatgtgccaaaaccaacggaaaacgaaaacggtgccaattttgcatccatgaggcagaaaagagctgatcaaaatgaggattggcaccaagactcgagaatttaa

SEQ ID NO: 81946 - DNA, 1528 bp, Heterodera glycines
gtccatcaacgttccgtgcacaatttgttgggtctgtccgcccgcccctggtggactgttgagcaaagcgaatgtgccaaacagctcaaaaccatggaacgtcaatggaccgcgatcagaggtgggaccaaactccggagattaattcaggatcagcagaggataagattggataattcggcacggatcggatctcaggattaaaatgcctgttttaggattcctgctgatccgagtcaattttacaaaataccgtatttactgaaatagaacccctctcccccctgtaataaagcccctccaccgaggggggttgaaaaacaaagttccccccctgaaataaagtcacttttttttgaaattttaaatttctaaaatttgaattttttaaaattttattttagaagaagcattgaaagtgtggagcaaaaggaaaagcctctttgttgaagaagccctaccaataggcagcagtggaatgatgggaggaggtgaattggcactcgttttgagaagcaatgccatcggcggattcagagaagaggtaaagagagaaaaatgtcaaaatttaaaattgctaaattaaattaatttaattaataaaggttaaaattatatttttaaatagaattttgaaaattatattttttttgtatggaaaattattttttaagtattaaatttattaaaaggtttacgactgaaaaaatgctattttatttaaattaaaaattgttaaattttttattaattttaaatatagttttcaaattaatgaaaaaaaaaattcattaaagatttgcgaccgattgatgcagtcaacatgtgaactgcttaagcaatttgaaacagcaagctgtgccaaggacaaggtgaaaaatttaaaaataataaatcagaatttaagaaaaggattcgaattaaaaagtttaaaataattttaaaaacgaaatttaaaagggaataaaattacaaagtttttttttaaaaatgaaattaattccaaagggtccgaattaaaatatgaaataatttattaaattgaaatttaaaaggggtccgaattaaaatttcaaaataatttaaaaaatgaacactctcagataaaattgtccgttttgttggccggcacgcgaacttggcccttttgtgggcccaccaattatgtgctggaggcacagcttggcctggtggcacattcggatgcacgaattcgggtgggcaacgagacaaggtccacccacaaaagttttttgaggaatttaaccaaaaatttttttttaattttttaggggttggcgcccgggccgattcctcgtgttcgacacgagttttgagcgggaaatcagcttcgaaggggtgggctgaaaaaaaaacgtttttttaaatttaaattttatggaattcccaggccccctccaacgcaatacgactcgcgctgaccatggaactgtggcacccgcaaatgccaatggaattgcgcggcaaaatccgtgccgccgatggcagtgatgaagagagaaaatga

SEQ ID NO: 81947 - DNA, 187 bp, Heterodera glycines
atgtacaaaagtgacatcacccgttcatttcaacgaaacagggtaattagcttatcgaaaaaaaatctcaaaaatctaaaaaaaaaaaaaaaatttaatttttcagttggatatccctcgcgctcctggcctcggtcttctgttaggtgatgatgttttttgaatgaaaaccaagttttataataaa

SEQ ID NO: 81948 - DNA, 1361 bp, Heterodera glycines
atgaaacaaatggccgacgaaaaggcatttttggacaccgttcgcaattctttggtgcttctcattgtcggcatcattacaattttattggccatgaatgccaaaaatgtttggcactttttcgcgcctgctattgttgtaaaaagcactaagaaaaagcggaaaaattcaccgacggcttcaattgggacaaaatcaaaaatgaactccgttattaaggtagcgcgaatttgttgacactaattattccattacagtatattacttatatatcccccgcccctcctcaactgttaaatcaaaaattgaaaaaaaaatgaaaaaaggccatttacttagtgtcatttaatttaagtgctcaaatgaagaaatggaacagaaagaaacggtgctgcaccagttgcctttgccagtcaaaaaacaaattattgaaaaagccgaagattttgaggtaaattaaattgttttatttattttttgatttttgtgtcaaaaagtatgtataaaaaaaatataaatagagattagactttaggtatttatactttttgcaaataatatttgctaataccacgaaaatcacttttggcattgtcattaatatattaaaattttaactgtgccttttttcaaataaattgatatttttaaggcgcaaattgatgaaatcgaacacaacggagttgaatctgctcaaccaaaaataatcaaggttaaaacagaaaaatttttgcttttctaatttattttatctttttatttaattatttagaaatcaaatttataattttgccttattttttgtattacaattaattattaaacttattaagggtgaagataatgccgatgattctattcaaattctatctgtcaaacaaccgaaacgcaaaatgcgtatgacaaaaacgagggtaataaacaatttaaacttattaattaattatttaactaattaaaaaggtttttttaagtttcaagacgatgaagaaactgttgatcaaaaagaagtgccgcctcacaatttttcattggtgttgagcacacaaaaggaatctgaacagcaaaaacgtgccgaatcggttcctccaaaagagaaaaaggcaaaaaaaaaaaaaaattttttttattgccttttttaatttggcacttttttagccagaagttgacttggacaccgttgtcaaactgatggagagcggactttcacaggcggacattgcgcgtcagctgaatgttcacaacatttactacattgtaacaaagtgccgaaagcagggcctaattacggggagtcgaccaattacgaggaaaaaggcgggcaaaacataaaaggacagcaaaacaataatttaaataaa

SEQ ID NO: 81949 - DNA, 413 bp, Heterodera glycines
atgtggccagagatgttatcactaataaacattttgtctacattttcggctttgggtaaaaatgccattttgtttagaaaccggtaagatttttttgggagcgggagtatgggatttgtgggagcggagtacgggatttgcgggagctggatcaagaatcccgaaatctctgaaatttcaacgagggttggggtaacccaaaaattaatcttaaatatattattgctcaatttcaaagtcccttttatatctcaatctgttctctatacatttattttcaacatttggatcagctttgcaaattgatgagataaaaaatttgttgaaatttttgaaaaaataaaataaaattcttattcagaccctttcaaattcaacaaaataaggagaaaattcagatctgtgaactttaa

SEQ ID NO: 81950 - DNA, 384 bp, Heterodera glycines
  unsure (1)..(384): unsure at all n locations
atggtgagtaagcactaattaaaacaaaatcattatccaaatttcctgacagcaattttaagcaaattcttttttcagccaaaaaaatgcagaaaataaaaataataattattattataaattttacttttcagaaacttggacaaaactttatttttttatcaaataaactttgtttttgccaaattaactctgaatgcttanattanataaattgatatgatgtactcttgatagctctattattttaaaatttcaaaacttttagttcgggtacaaacatgttattgccaaaaatcaaaaaaatgatttttttaaattgcagttttggcgccgcttaacttttttaaaaaaggttgaaacattttaattttgtctaataaa

SEQ ID NO: 81951 - DNA, 1722 bp, Heterodera glycines
atggtactaattattattctcatatttttcgccacttttaatggaatttttggggttggagaaggtggtgaagaaaacgatttgttcagtgatttgtggaagaattatttcaacgcaaaaaacgtgcagaaggcaaatgttggccgaaacggaggacaaaaagtgaccaatcgcgtaaagatggaagaaagggacggtggtgtagaaatgggtgcggtcggcattcgcatgccacccaaattggcacaaatggtgatcaagagtgaaccaaccgcagcagcagcagtttttgatcagctattgaaaaatgtaaagcatgagccaaaagaggaggagtttgagcaattggacattggaaaaatgggtgtggttggcattcgcatgccacctaaattggcacactctgtgatcaaagatgaaccgccatttgatcagcagagagagcatcaacaaaagcaagcaaataaagagccaaatcatttggactatgggatagaaagaatggaagaaacagaaaattcattggaatcgaatgggaaaattagccaaaaaagtgccaaaaagttggcaaaaaagaaaagacaatggcaaaaggaagtggacagaacgccacaacaatttaaaaaggaggagaattccaaaagcgacataaaagtattgatagaacaatttgatcaaatgaagaagaaatttagaaaaaaaatccattttgttgacagaaaaattaatgtgaatttggaaagtaaaattgcaaaaagattgggcacttgcagaaccaaattatacaaaatgaaaagagaaaatggtaaataaacaaaaaaaaaaatttttaattttaaatatttttaaatgaaaaattcatattattgtttttttaataaaaaattatttttttttaatattttcacataactatttacttgaaaaaattcacccgttttaaaaacttaaaatttaataataaaaaataaaaaaattttttggtatttaaaaaagtttaaatttttcaaagagaaaatatataaaattttaagtcattagaaggattttatacttttaaaataattaagcaaaaataaataaacactttcaaaataaaatttactaaacttttttaatttttaggattattgaccagaaatttttcaaatgaacaaaagaaggaaataatccatcgatttgaaataataaaagaagaatttatgcgcaaattcaaaataaaaaccaatgccaaaattagcgataaaattgcgcgaaaagttggcgtcaatttggagacaattaatcgttggaagaggtcatttggctcaactggtaaaaaataataatcaaaataaaactaaatcttttgtttttaaaagatttttgcatagctttttggggataaatgtttaatttttacagcaaagccaatctatacgagcgcagaacaattggaattcatccgaaaatatgatgcactgaaaattcaaaacccactgatcagcgatcagaacaccgcccaaatgatcggaacaaacgcaataagcataaaaagatggaagaagaagtttggtatcgcgtatccttgcaaaagaagacggatcacgtgaattgattgggcagtgatcagcaatggcagttgcttgaacatcacagaagcggaagagtgatcggtggcttctgctcagaattggtctgctgacctggtctgagtgatctgcttaatttgtatgctcttaa

SEQ ID NO: 81952 - DNA, 249 bp, Heterodera glycines
cgctgacccacaaaatgtccagcctacgaaatgtccaagtctcgaatttgagttttttattattcagatgggcctaaggttaggcaaggggtaatataaagggtatattcgtattcagcgaccccgaaaaccctaaaaatccgaaattagactcattttgtttttataaattttgaaaaattttggacatttcgtgggtttttactcttttggacatttcgtggcttggacactttgtggggatgccat

SEQ ID NO: 81953 - DNA, 890 bp, Heterodera glycines
atgaggcaacacacttcattctcccggcttccggccgccgacagcatttcccaacaaaaccaacaccaacaacagcaggacatcaacaacaacaatgccgtagtcgatgataatgatgttgaagccgaagatgaagcggcggcagcggaaatgccgggggcgccggcggcgacggcacagcagcgctgggaggactcaaccggcggcggcgacgatggcatggaggaacagcgacgggacggaaatggcggggacgaagaggaggtcgccggcgatgaacaacaacagttacaacaacgacgacaacagatgttcaagcggaagttgttgttggcgcaggacaacgacggcacggcggcggcgagcggtgccaacgacagcggcgaaacgtcgccgcgggcgttggcacgctcgcatgtggagctgttcacgcgaatgcgcagcatttgcggtcggatgaaccgcctgaagcgcaagcggacaccgcggcctggctcacccgagtcgttggtcgctttcctgtgcgacagtgccaaattccagtgaggggcacggcacaaaaaaaaacatgggggacagacggacggcacaatttgatcattgatctccaaaaaacggaaaaaaatatttgtttttttttttgcccggatgcaatttttgtgttctcctctttgtccaacaaatctcaaatatgtaatgaaaattgtgtgttcattttgcgttgtgtaaacattctctcctggcgaaaaaaatagccgaaggcacaaaactttaattttgccgatctctgttttgtactgactccccatgaaaaaaaatcaaatcctttcaatttggcacaacgattttggtacggtaattaattaattaatcagcctgttcctgcacca

SEQ ID NO: 81954 - DNA, 958 bp, Heterodera glycines
atgagcaatggactaattatgtcccatttaagtgccgagtgcacggaccttgcccagggctacacctgcaagtgccgaagcggcttccgcgacgtgtccccgtccaaggaaaagccgggtcgtgtctgccgggcaagtaagtgccgcccactatcgttttgggcctttataccgtattcaatctcccccaaaataccgtaatgccattttcctcattttcagtggtcaatgagtgccaatttgcgcatctcaacgactgccatcagaatgcgcaatgtttggacttggaggtaaatttgtgaaaacacaatcacttgatataatcctttttagaaatttaaaaattaaatttacgcccggtaaatttggaaaaaaaactaaaaacccatttttgccaggacggctatcagtgtaagtgtgaaaacggcttcaaagacgttcgaccggaaaggccgggccgactgtgccaacagatggtcaatgaatgcgcacgtgcggacacaaattcatgcgacaaaaatgctaaatgcgtggacgaagaggcaagttcagaagagaggcacacaaaactggcatttgtcattaaaaaattgtgtgtgtctaaagttagggtattacagtaccatgaacttttgggatttactgttttttggatattacagtattcagaacaattccttgactttaccgtatttattttatttccggtgataaatttccatgctgtacttttcttttaaattcagccagccatggaaacggcctaacacagtaaaaccctggttataaccaatgcataccgtatctctcaaccgcatgacgattagttacagtcttcccgacttgaatatacagtatcaattatccatgaaaattcatagcgcataattaattgttcatggcacggttttcatttctcccccatctccctgcttcgtcccctctgtgtgttactgta

SEQ ID NO: 81955 - DNA, 564 bp, Heterodera glycines
tcccccgatggattgcaaggccgaatttgtgtgcgcaactcattttgccgtgacccgaagctgaacaattgttcccggaaagctgtatgttatgaggaaggccaaggctaccgatgcgaatgtgcccgaggctatgtggacaagtcgccggacggcacgccaaaaggccgagtttgcgaattgccgccggcgccggcacagccccagcgacacccgtgccaagacgggagccacgactgtcacaccaaggtggataggacattttgtgtataactcagaaacaaaatgcaattgtgtacatatttggtgctattcgttgtagaataacgagatgaatccattgaagctattgtaattgtttgtcgaattttacagcacatcagttaggaaaagcagcggaagtcatttaaaaatatcctggaaaatcagagttctgctacccaaattgaaattgacttttctctaggcatcctgccgagctgtcggcgccactgggttcgtctgcgaatgtttgcccggctatgaggacaaatcgccggatccgaagaacaaaggcggaagagt

SEQ ID NO: 81956 - DNA, 1268 bp, Heterodera glycines
tttttcttcaattggaccatggacgcgcaacagcttcaacaattgctaaatgcactccagcaaaggtcaccaatgccgcaccgcaaaacgccgcaccagcaaatttgagcaatgccaatttggcaagctctatcgatgctcgcctttcaacctttcattacaatccggaggtcggtaccacatttgaatgctggttcaaacggtacggaaaattgatcgaggacgacggaagcacactgcctgaggcctcaaaagtgcgactccttctcggcaaactcggagaggaggagtacagcaaatatcgggacacgatcagcccaacccagccggaccaagtgaattggaatgacaccatttcacagctcaaacagctttttgccgagacacgttcgctattcgtccgtcgcttcgaatgttttaaaattcgacagcaacaagggcaagacatctcatcactaattgcgcagatcaacgcatcatgtgaaaatgccgacctgagtctgacaaaggagcagctcaagtgcattattttggtcatcgcactcaacgatgaacaccatgatttgcgacaaaaggcattgaaaatgttggaggactctcagaaaaatggcaccaacatttcgctcaagaaaattgaggaggaattaagggcaattcaacttgtcaaggagagcgccctttcgctggtcaacccaccaattgccacaaacgccattcgcacaaggccacggcaatgggccgacccagcgcaaagacaaagcggcggctccaatcaaaagcaaactccaaatgccaattcaagcggaaagccaacgcgtggtcaaccgacgcatccatgcggatcatgtggcaaatccgaccattggcgctccgactgcacattcagggacgccacttgcctcaagtgcaacaaaaaaggacacatttcaacaatttgccggcaaaagaaagcaaaggcggcaccgaacaaccacagggcatttcacactgtcaaagtcgacgcaaattgcctgcatgtcggcacgactcaaggacgatggtggaaattatgcattttgattaatggaaggcaaacttccatgaatggcgacaccggcgctcaggccacaattatttcattgcaaacatggcgagagttgggagaaccggaactgactccatccgacatcgatgccaaaaattgcaatgaccagccattcgctttgcttggcaaattccaatgcaccgtccaaattgccgacaaaccaccgcaaactctgatcgcctat

SEQ ID NO: 81957 - DNA, 632 bp, Heterodera glycines
ttttttgttgcacttgaggcaagtggcgtccctgaatgtgcagtcggagcgccaatggtcggatttgccacatgatccgcatggatgcgtcggttgaccacgcgttggctttccgcttgaattggcatttggagtttgcttttgattggagccgccgctttgtctttgcgctgggtcggcccattgccgtggccttgtgcgaatggcgtttgtggcaattggtgggttgaccagcgaaagggcgctctccttgacaagttgaattgcccttaattcctcctcaattttcttgagcgaaatgttggtgccatttttctgagagtcctccaacattttcaatgccttttgtcgcaaatcatggtgttcatcgttgagtgcgatgaccaaaataatgcacttgagctgctcctttgtcagactcaggtcggcattttcacatgatgcgttgatctgcgcaattagtgatgagatgtcttgcccttgttgctgtcgaattttaaaacattcgaagcgacggacgaatagcgaacgtgtctcggcaaaaagctgtttgagctgtgaaatggtgtcattccaattcacttggtccggctgggttgggctgatcgtgtcccgatatttgctgtactcct

SEQ ID NO: 81958 - DNA, 692 bp, Heterodera glycines
atgagaactgagatattttcacaaatttttttcatttgtattttgtctttatattctattgacacagcacctcccaaaaatgaatcaactgaaaaagaagcaagttcatcaggttcagcaggtgataattttaaggaatatttaataaaaataaaaaagctttaataaattaattaaccgaaatctcaccaattataagctaagttttgtgcttttcaattataatttaaagggtaattcacccattcaaaacaaaatctgattgaattttattaaaataatcattttatattaccaaacattttaatacacctataaattactcaaattaaggcacatacacaataagagattatgcgatggacattaaaaaacatttggcaaaagttgaaattgaaaaactaattcaagaagcgaaagaatgggcacaagacttgggacttgttgttattcatagggttgcaaccccgaccccgccccgaccccgacccccgacatttttggccattttcggggaaaaccccgaccccgaaccccgacgcttcataccccgacaaccccgacccttaaccccgatcggggtcggggttaaatatacacccctaagaatggcattttcgtgggagaaaatgcaaaaaagttagacgaaatttgaatttttttaaccatttgccaaatttttattaaataaa

SEQ ID NO: 81959 - DNA, 2272 bp, Heterodera glycines
atggccgagacgaacttggacaaagtggtgtccactcgggaccaggagcagcgtgagaagttgatcagcaaagcaaaggagggccttgtggagaccacgaccgagccggatgggtccaagcgagcgccgccaccggtcaaggcacgtgttggcaagcaaaatttggatgagttcattcgtggtagtgggttgaagttttgggatgatttcaaaatgataaaaatccaactcgtcctgtcccgactcgtactgtttttcgacaaaaatgaccataacttttgtaaaaatcgcctgttttaaacatttttggcattattcaatcgattaagccttaatcttctctttctaaaagcacaattcaagtttattatgttagaaaaaaaataaaaggattaacaattttttttttaattttgtcgcttttgataaaagtcgaaaaacaatacgagtcggatttcgtcctttaaaaatatacgcaaaacggacccgttttgaatttgtcgggcatttcagtaccaattaacacatgaatttgaccaaatttaaccgtcttcaattttttggtcgtatcattttgtttcttggtcatttgaatttcgaactcttcattttcttgctatacgcagggccgactcaccggcattttggcatttgctgtttttgtggtagctttcggcagttcattccaaatgggctatcacattggctgcatcaatattccaggttcggattttactgccttttatgatgcatttgttgcaaaacaagactcatttgaaattcttagtttttgcattttttgaaaattttgaaacaaaaaattttaatttttttaaattttagatttaaaaaactagaatttttcttcacctcaaatctctaacatttcctttttaaattttccaggggacataatcaaagaatggatctctgaatcgtacacgaacatgacaggggtttcgacaacagtggaagagatggactcgacatggtaaaaattgactatcggagttttctaaaacaatatactaattaattctttgaaaaattgtcattattattcgagaaatgaattcaattaattatgaattaattgtccagggcacttgcggtcggcattattgccgttggcggaatgtttggtggcattatggttggcactgttgcggacaaattagggcgccgtaaatcacttctgtacaacaatattttggcgatcattgctgcggcactgatgacactggcaaaatatgtgaatgtttattatttgatcaccattggacgattcattattggactgaacacgggtatgtatgtgtatgacgaaaatattttgttaaattaataatataagcgtaattatttgaatttttattgaaaaaataaatgaaatttaatcaaaaacaataaataaaatctgggattaaacgaaatagctcattgtttttttctactagcataaaaattttcagaaaatttcattcagttttcataaagttgtgactaaaaatgatgcaaaaactgccataactttttgaaaattgaataaaatttaaattttttaaaattaaccacgaattttttttttttgtaatttaaattttcattaaaattttaaattataaaacccatttttaaaaatttgtagggttcaacagcggactgtctccaatgtatttgatggaaatttcaccaaacaatttgcgtggctccatcggctcgcttcaccaattgtttattaccatcgcaattctcgcttcacaaattattgggcttccacaaatttttggctctgcaaatctttggccactgatttttgcgtttactctggtaaatgtagaaaaattatgtctaatccagggttgagattatataatatgtcttttgagggattatgtgccaaatttatgccatattttaatgcattagtggcttttgggcatatttttaaaaatttcccggcccgcccgccaccacctcgcctaaaagttttttgaaaaaacgcgccgcgcaaaaaaggtgctttgaatagcaaaaaaaaggtcgtcaccggagaaaaatttggaccttcgtacgaaaaattgggcttggcgcaccccttgttcatgtatgattattttatttttccattcctattaaatttcaggtgcccgtgttgttccaattgtgcgcacttccattttgccctgagtcgccaaaatacagtttgattgtccaaggaaggaaagatcaggcggagaaagatctgaaatggcttcggggaggcaatgat

SEQ ID NO: 81960 - DNA, 355 bp, Heterodera glycines
gttgaaattgccattcgttctttggatacagcattctttgactcgggctcgtttaattccaaaattgcagttattgtgccgtcaaaagaactcatttggagtgtgaggcattaattaattatttatatattatttaaatgctttttattgcataaattaaatagggatttcattttagggctccgactttcgtgccagcattaacagtttggtgcagctgaggccgttggacaaacgcgactcaccgacgcctttgttcagtgcgcatgtgccgctgaagttggaaagagttcgggtggaattggttttgggtcccagcgtcaaccaagacggacacttaaggacgggtgggtaa

SEQ ID NO: 81961 - DNA, 246 bp, Heterodera glycines
atgtggttcaaatacgcggaggactacggactgaatcatttgttggactggcgcctttggtcaatgcacgccaattgcgcggatgtgcgtccagaacggttggactacgactcgagcgtggagctgaaggagtggagcgaagtgtccttcgaccaattgttgagttttgaccgtctgcagacggtgggcgtcgatcggacggcgtatttgcaggcggcgcttcgactgccccaaagcgtcgcaaag

SEQ ID NO: 81962 - DNA, 1280 bp, Heterodera glycines
tataagacatttattttggtaaattgcgcatctgaacaaattgagaacggtgaatatttttgtcgatttgtttccggccgaattcggctgcaaattgtttttgacattgaccaaaaaggaaatggcaaaacggagactcagctgtacaatggcatttaccaggagaaatgtacgctttatgagtcctcattttcgcaaaacgcactttcattccggtaaatttaattaaaaaacaaataattaattatggaatttaaattgctaaggcccaatttttgtattttttggctgattggaattcaaagttatgagagcagagaaaatatgcgtaaaaatttgaaaaattttgacttaaaaattaaaagcgattttgtaaagtacaatcacaaggacaaagacggcaaaaggcgaattgattttcatagaataaatgcggaagaaatagccgaaaaattcaaagaattgaaaatggaattaaaatcaacggtcgaggacagagagcaacttgaacgtttgaattctaaggacaatcattgaaaatccattcacttaatcatttatttgtttattatttttccaatttgtacaaatcaattaaaaaaagaaaggcacgctaattggtaagcacagaaaagacacgaacgtcgcccgtgaggggtacccccacccaagccgaaaccctgggaccgtcaatgtgacgacacgtatgtatggtcttgattttggtttcgagtctcaaaaccaaggcgcggcttcgagaagggggatttttttaaattcagtttggttcaattgtttattcaaatagataattaaaaatggaattttaagatatataaaaagtgtaaatattttcaaagtaaaatttagtcaaatgcataaataatgaacaaaaagaatgaaatggatcattttgtgtgtgtgtcgaatctcttggccttttccatccactatatgtcctcaagaattgatcagacgagagacacgtgttgatcactgatcgaaaaaatgcgttttccaggaaaaggcagtgcatagcgagagaactgcggggtgaacacttgccgatcgacttggccattctgagtgagctgacggaagaggcggagggactcagtgttgttggacggggttttgtagaggagcgattcgaaatgggcggacggattggggccggcaaattgaagcagtacatcgcgaagaagggcagaagcaatggactgaataaggcggatcgaatttgtagagagagagagagagatacaagaggaagagagtga

SEQ ID NO: 81963 - DNA, 249 bp, Heterodera glycines
tccattgcttctgcccttcttcgcgatgtactgcttcaatttgccggccccaatccgtccgcccatttcgaatcgctcctctacaaaaccccgtccaacaacactgagtccctccgcctcttccgtcagctcactcagaatggccaagtcgatcggcaagtgttcaccccgcagttctctcgctatgcactgccttttcctggaaaacgcattttttcgatcagtgatcaacacgtgtctctcgtctga

SEQ ID NO: 81964 - DNA, 2632 bp, Heterodera glycines
atgcgattggccgaacgctttggtgccgatgttttcgtgtggatgaattggttggagatggaccggcacaatcagtgcacaaaagtgcaaaaattaatggacgatttgcacctgtatttccgacttctttacgatgcttattgtatcgcagcggaaatggaagacgcaatgcgaatttttagcttcgcattgccaggtttgtggcattttaatcagctaaaatcatttaaaaatccaacaaatggcatttctgccttaaaatccaaatgaatttagcgattaaaacatttgtggatgaaagcagaaataaaatgttaaatctgaccgaaataaacaaagaatggggcaaactgagcagacttatcaagaaagtagcagacaatgcgcaaaatgttgttgcacaaacggaagaagaacgaaaaaagtacgaagagccaattccgatcattcagaaattacattttgccgaatttatggaattgttgaacagaaaagaggaagaagatggaagcgagaaggaggagcttgagagaatgttggaaggtaaattaaaaataaaattaaattaaaaattaaataaatattaaatgtttagatgaattaaacaaaaacaatcaacaaaaaatgagcgactttctgacggaaaatgatttaaaaagattttatgaagcaattgaaaataaaaaaacaattttaaatggaaatgaaaaaggacaaaatgaaaataatgaaaacaaaaaggcgaaaaaagaagagaaaaaacggagaaaaaaggagaaaaagaaaacaaaaaaggaggaagaaaataataaattaaatgagaaaatggagaaaaagcaaataaatggggaaaatgaaggagaaaatggccaatttggacaaaaggaaaagaaagaaaagcaaaattcagatgagaaaaattgtaaagaaagtggcaaaagcttaggaggaaaagccgtggaaaagcgaagggacattacggaatataacgcgagaagaaaactgatcaaacacaatttggccgaagaattggccaaaattcattctattaacggtaaaatataatataataattagggctcgaaattatatggactaaaaaccccaaatatggacataaaatatggactaaaaatgcctgaaatatggactaaaaactgtcaaaatgtgtgttttaaaccctcaaaaattccaaaaatattcaatatttgcttaaacaaacttagaaaatacactaaattaccaaaaattgatttaaagctaaaaaatgcaaattttttttaatcaaattcttcctttacaatttttaaccaaatacatctcaaaatttatgtaataatctcattctgttgtcagcgaaaattttaggtaacgaacaaaatacctaaaaaatttgccaaaatttcgaaaaaatatttttttggtgtgtattttctaaaaaattttaaaaagtcaatctttaggggtgtatttttctcttttttgcatttttcttgtgaaaatttccaaaaatggccgaaatatggactaaaaaagaaaaaatggcgaaatatggatttattcccgaaaacccccaaaatatggatttatatggactaaaaaccttcaccaaatcaaaaaattttaacgcagaaattctatttttgagcgcctttcttcgtagcatatgcgcagaaaaaaaaatgttaatccatacaatttcgagccctaataataataatattaaataattatgtattaatttaatttatttttaaacagaaaattgctaataaattttgtaaattttaattcagatttttataatgacgcattcctttatgccaaatatgaagaatttgtggcaaagccttccatcgaaatgcaacggataatcgatgttggggcatttttaaatgaaattggacatcgtttaaaagcgatgggcgaattggaaagatttaatcacacgggcaatccgcaaaagagcatgggacaattaagaaatgaatgggacacatttttggagcaatttggtaaattggaagtgccaaaattggagaaaatggagaaaaaagtatccaaatttatgcaattgtttttaaacaatttgcaaaacacaaaacaatttgagcccgacgaaataacaaagcaaataaaagtgcaaattcatttgaaaaatttgtcaatggcacttttgaaaaacaatgaatttaatgaaaaatggaaaaattatgagaataaaacgaaaaaagagaaattattttatttattgggcgaacgtttcggcgcagaacgcttcgaaaaagtgaaatttgaatggaaaagaatggcagaacaaaccgaattaggcaagtgatgaaaaaatattttatattcgattatgaaaagaatatatttgtttttgaatcggaattcgttggcttggcatttcgtcgatgccttaggggctaagaccattaattctaattattcttaattttgtctgtttagatatctcattatatcgtaaacacttgagcaaagaccaacaaaatgagcacattttccccgcttttccttacatttcccagcagacatttttaggcgatcataaaatgaaagaaaatgtaaaaagactttctgactgttttttcttaccattacaaataaa

SEQ ID NO: 81965 - DNA, 917 bp, Heterodera glycines
atgcgagttgtgcatgtgctgttcacccatttccacgattttctgaaacacgtcgctttgaatggcataaatttcacaaaaattatcgattacgacggtaattaaataataatttcgcttttttaagatattttttttcattttactgttatttttttacttttgtaggcattgggcaaaaggaactgctcgaattttacataaaacatttgattgagtccaacaatttcgacgaggcatcgctggaagatgaggacaaaattgctgtcctcattaagctgctctcactgtgttcaagtcgcaaggaaaataaagtgataaaaaacatcgaaataggcaaagaattattgaaaagcggagaacaaaattcggaaattgacaaattcacaatgataattagggacaattatgtggccaaagcggaaacatgtgtcctgctaaaggcaatcactaaaatcactttgattttggcaattccttcgcactgatcgctttaaattcccaaattattttagttgattgaaatttttgcgggaaagtcggccccaattcggatgctctgtcctctgatgcatttcattgactttttggagaaacagctgacaaatgagcatcaattttggcaattcccccgcaaatgttttcaaatggaaattagtgaaattaaccgaaaacaaatgaaagtgttgggggcggaacatttcaattatttggcggcatttattgaaaatgctaaagaaaaagacgaatttatgcaaattttgcgagaaaagcacggcgcattgtatcggatgagacttttggtgggcggaaaaaacgcaattcagcgaatgtgggaaatgccgaagatacggaacaaattgctgaacagaaattgtaaacaaacagagaaataaatgaaagaaaatataaataaa

SEQ ID NO: 81966 - DNA, 1825 bp, Heterodera glycines
atgatgcaaaacgatgaaatggaacggtttatcaagttgtacaaaaagattgatataaatgaaattgattgccataaaattgcagaaaatgttttccaaaatgtgccattgacagatgagaaaaatgcgacaaatatttttttaaacgatttgcgacaattgcatttcaatgccatccttttcttattggaccggaaaaacgaagtgggaaaagcgccagaaattggacaagttggccaatacaaattatggtaatacagaataaccaaattcaaataaacaatcaagaaacattggattaattgagtttaattgatttaattacagggaattttcaaagtttttcaatgacacaaaaattgaaaatgaaactaatttttcctatcaatttcgaattctgcgcataaaagaggacaaacaaagtgtcgttttgctcaaaaaattgaaatggaaaataaaagaattaattggacccatttatttgagcatattagaagttttgaggccaattgaattgcaaattggtgagaagaaataaactaaaaatatttataattttttatttttcatttaattttaattttcatttaattttaactttttcagatacaatttttgacgaagaatatgccacagaatacgccatgattctttctacggatcgccaaattgcaaaacaggccgaatttcggttgtccattcgcatttactttagtaaaatttggaacaaaattttggacgcaaaaatttccaaaaatgaaatggaaaaatgccgaatcgttcacttttgggatggaggcgaattagtgcaaatgacccaaacatttattcattatgaggagaaagaaaccttcgagaaaatattcgaattttccgctaaaattggggaaaaaaacgaaaaggaaaaaggcatcgaaaacaaaagcggaaaactgaagaaaaaagcatcgaaaaagggcaaaagccgaatttgtgatgacattttggacaaagttcgaagcaatttgctggacacacacagcgaattaatggccaatttaagtggggaaacgaacgcatttagcaaattattgaaaaactcgttggaaacggagaagggagccttggccaaactgtgcgacttttattcggcaaaaaatttaattggaaatgacaacaaaaagtgctcaccgaattcggtggaagtgatggcaaaaatggagcaaaaatacccaaaattgacacaaatgcttcgaaacagttagtttaaaaagaaaaaaaaagtaataattaattaaaattgatataaaactaattaaaaaattataaaagtgaattaattcagaactgacagatgagcaaattaagaaactccaaaataggaattatttaaaatatttaaacgaaaaaagtgaacaaattgagtggacccgtgccaaatttatgatggacattttggcacattatcagatgtaacaacataccgtttagtcttttttagtacaaattttaaatattttagtttcaaaaaccaattgaacgacccaaacaatttgtcatttcaaacggaattgatcgaccaaaatatgggcacaatggaattgtcgatggactcgattagtgtaattaattcggtcaaagaaattgagcaattgcagggaaacctaattacacaattaaaaaattcaagcaatttatttcctgagctaaaacattcacttgccaaaggccacgtcgaaattttgaaaaaactttgcgcagaaaaagaattccaaaatcagttgagaggcaagtcgaaatttagaaaagaaagttcactttcaagcaatgcatagatcgtaataaa

SEQ ID NO: 81967 - DNA, 686 bp, Heterodera glycines
atgtttgcaaataaactgtttttgttgttaatcgccgctttttcactttgtgtttttggcattgactttggcgggacgaagcaaaacggggcggccaagggcaaattattgtgcggaggaaagccatacaaaggggccaaagtgaaactgtgggacaaagacacgcgtaagtgatcagcaaagtgatcagccgatttgtgatcagcagcggaaacacgcattgccaaactaagaaagaaataaaaaatgctttttgttcctttttaaagttgaccccgacgatttgatgggcgaaacggagacagatgaggagggcaaatttgaggtgaacggttcggaaacggaagtgagcgacatcgacctgagactgagcatttaccacaattgcgaggacgaagcgaaagtccaattcttttttttgtgattttaatttaattaatttaaaacgatttagcaattaattaattaattttaaataaaattgctttaggagtgccttcgccgcattgacatcgaaatcggcgatgagttcatttctcgcctaacggactcagacaaagcggaaaaaatgttcgacgcgggaattctgaatttgtccgggcatttcccaggcgaaacgcgcgaatgccttcagtcgaagaaataaacataaaacaacaaaatgtgaggaattacaaatgaataaa

SEQ ID NO: 81968 - DNA, 447 bp, Heterodera glycines
atgcagggcgaaaaactgtcgaatttttcgaattcatctgtcacgtataaggcaattcaggcccaagctataaagacccaagatagctcactaaaatcgccagagtctgaaggtgtgctctttctccatcaaacactgccgggtttcggtactctccggcccgctacagactcttttttgaaacatggtcgaaaattttcccaaaaagtttctgaagaacttttttctatttcagtttttttaaattattcaaaaacggacactcatcagtcccttgaattctcttatatttttccattgttcaaaagttaaacctgttccgtcattcgtttagaacaacaacaaccattcttcccctatcattcttattttccattttcctcctcccgcgcatccatcgccacattaattgattgaattattatttaattgtgtccttcaaataaa

SEQ ID NO: 81969 - DNA, 396 bp, Heterodera glycines
atgcccgcggttaagccaaaatttcaatacgacgaattgctggaacccgtgcttgacgaaatcgaacatttaattcgcatttcaatgttttattttgacgagaatttcaaacggactgaaagttacaaattgaaaggcttttcccaattggaaacgaagccaattttgctgaacgaaaaacagttgaaatattttcaaaataattttcagaaaaattcggaagtgaaaattcggaaactttttgaggtgaaaatgagcttaatgttcaaaaatacgaaggaaaatgcggagaaggagaaggtcgaaatggaagaagaaacggacgagcaaaagtggaagaaataccgaaacaaatttttgggatttttgaattcgccattcctcccaattgtgtga

SEQ ID NO: 81970 - DNA, 154 bp, Heterodera glycines
tgattgcacgtaattgccgaaaaaattcgagaccaatttccgaatgttgaccgactaattgcaaaacgaaagccgtctttgtcaaagcgccttaccgagtcaaaaaatttggaaatgtatctcatatgcaatttcaaccaacaaatttgaagaa

SEQ ID NO: 81971 - DNA, 372 bp, Heterodera glycines
gagagagtggagcagttgtgttggtttgaagaagaagcattccttgcctttgtgaagggtcggccaaactttgacaaattttacgagaaaacggacgaaagcatcaagaaaaaaatggtgcagtacagaagtgaattgaaaaatttgacatttgaccaattacgggaacatttggcacaaaaatttgcggcacggctaagcgcggtccatttattgtggcaaaattggaactgtgccaatgttgtggaggaagtgcagggggaggaccgggcaaagtgccaaacattccgccgacatttggacattgtgtacgaatatctgttcagagtgtacgtcgaaggtaacgggagggaaggaagtgccgaaaaataa

SEQ ID NO: 81972 - DNA, 957 bp, Heterodera glycines
cttattgttagcaaaaataagaccaagagccataaaattccaattacacattcataaattgttcagtgttttgacccaaaattatttccagcggcatttgctgaagaaaaacgaaacattgcggctcacctacgacatgctgagacggccccatcacattggcaagactttcacattttttgccaattaactacgaatttggcctttttaatggccggggaaggaaggcgttttatttccgagattcaaatgtcacaaattgaattgtcttttgtcccattttaggcaatcacaaggcgtggatggcgtggaacacgcagaacttgaaggagttcgagcagcagccggggctgaccattgctcaggacgaaatcatccggcgcttctgtcgcgcgctgttcttcgaatttttgcccgaaattgcggggcccaccgaagtgcgaatttttacataattaggggattttgccatttggataatttaaaaaattggtgagttttcaaaccaaaatgaaatttcgaagtaaaaaatgagaaaccggggaaaaatgaagccgaactgaaattcattggttttgcgttcagttggtcatcaaacggcgtggcaattgcgcatttgtcaccggctttctctgctggaatgaccgaaccgtcgcaagccaacgcaaagtgagcactttttgggaggggcgagggaaggaattttaaaattacgggtcaggggcattcggcaacttgaccagaacccggttcagggctaatatccggtttttctgggtcttggtctgggagaatttttccaggctcacgaaaatttcaatttccccccccccttttcttcagttgtattggctgtggggcttcaccgaggaaatcctgtccaatctgctaaagcacccgctgaagttggagctgcaatttgtgcgcagtttggaccatttgatcgtggccaatatt

SEQ ID NO: 81973 - DNA, 1363 bp, Heterodera glycines
atggaagcccagaaaactgggaacggggaaatcaatcccttggttttttaaaaatcaaaaagccgctttttcaaatttataatttaaattaattgaaacataatgccaatataatttttttcttctggactccaacggcgcccccacaaagtgtccaagccacgaaatgtccaaaatttttcaaaatttataaaaacaaaatgagtctaatttaggatttttagggttttcggggtcgctgaatacgaatataccctttatattaccccatgcctaaccttaggcccatctgaataataaaaaactcaaattcgagacttggacatttcgtgggctggacattttgtgggtcagcgactccaacagttttccggaatcattcctcaattttagattactttcctcggcatttcctaattttaattttaatttttgcatctttgtgtgcaactgatcagccatgaaatttcattcagccgataacataaacaattaactaattacctaattttaatggaattgccggacccgtttctgccaggcgcagtttcactgctggaccaactggacaaaaagctggtggttgtgctgcgagatgggaagacactcgtcggttatctgcgcacccttgaccaggtcaccaaattatgaatccgtaaattaattttcaattcgtcttcccttcagttcgccaatttggtgctgcacgaaacgctggaacgaattcacgtggacgaattttatggggacattccgcgcggcattttccttatccgtggcgaaaatgttgtgctggccggcgaggtggacgacacaaagccgaacccattcaaaaaggtgggaccgatttaagcagggaaattggtgaaaatttttcacaatcagagagcctccatttcaggaatattttcagatttctaatttagacctgtcgctaaattttaaaggaacaacgaacagaattatttcttccacacttaattttgttccttttttcaggtgagcatggaagaaattctccgacttcaagccgaaaaagtcgaacagcgtcagaaacagcagaggaccaggcaagaactgatgcacgggagtggccagcagcaggcgaagtcccacgcggacgcattgatggacgaattttgctaattcccttaattctaactaatttttaattggctgattttaacaatcagccaactttgtttgttacattatgtttcaatgttttcattttctaatttttgattttcttacaatttgtaacttataatttataattttatcagagctataaatgtttccagatttacgtaatttcagttttatccatttggtttcctcgaattccaattattttaataaa

SEQ ID NO: 81974 - DNA, 1045 bp, Heterodera glycines
atggcctcccgtggacgtggtgtcattgtgaacgtcgcctccgcggccgcccgttgccattggtattactacggcgtctattcggcggccaaggcaaaatttttgggggtttatttcgaatgccgaaatttgtgcgtcattaaaagtcccgaattttggcgatttcgggattttctattcctggcattcattttttcattttctttcaatttttctctcaatcgcatttacccccccccccaatttttagcatttcattgtccatctgtccgccattttgcgtgccgaattcgccccctctctgtgctgtggtgccggcccaaagagtgccaacattgtcatccagtccctctgccctttgttggtgtccaccaaaatggcctcgcggacaaagggacggccctcctttttggtgccgtccccggcggcctacgcgcggcatgcaattcgaacggttggcattgtgtcggacacgacgggccacccgatacaccaaattcaggtggatggattggagtcgcggggactcggggctaggactatacacagactgggcttcatctccatcagtcccctcctcataatttcgaagggcttttaaaccttgaaattctaaggagctccattaaaaacaaaatatttttggggaacaaatctgaggtttttgccattctggtgcaaattattccttttatttcatcaaaaaactccgtttatccttttgacatatttttttagattttggggtatgtgcacaaaatccaaaagtaccaggaaacgcatgtgcttttggaaaaagaattttatttcaaaatgactgaagctccaacaaattgttgatttttttctttttttttcaaaaaaacgtctgttttcccaggctgaactgctcttccagtgcattccgtcgccccttttcaattggctgatgcgcaacgaatcgcacaaaaggcgcgcgttggcactcgccgaacagaaaagcgaagcacaaaacggcaggagggaaaagggcgaggaagaagaagaagaagagaaagacggatga

SEQ ID NO: 81975 - DNA, 1521 bp, Heterodera glycines
atgaataatgaaaatgtcaataatgcgatggttaatgacacccgcgtaaatgtaaatgacaactgtcagaatccaaatgatacccgtgtccatgtcaatgacactcggtcggtttttgcctcaattaacccgttgaagcgtcgcgttagcttccgcgacattccgaacattcggcaagttggatgaaaacatttaatcagtcgactatctaatttagtgagtttgagcagccttcttcttcctctactgcaccttctcctttgccttgtaaattcataacttaatcaatttgataagatttaatcccttttcttttagccgggtttttggacacaactcataccatttttaaatcgttgatggtggcgcaaacaccgaccaaactgctgaaggtattttcttttgaagaagaatacattttaatttcttaagacaaattcacgtttttaaggttgatgaggtggccaagtatgggtcgctggacgaacaactggacgtaactcatgtcatacaacacactccgtttcgtaatcgtgagtttttaaattattggaccttgtgtccctgaatttcaataaatgccattcaagtgaaggtgttgaatattttacaattagtcactttttcaggccaccaaagcccgttgctgcttgatgacctgacgaaacaacatgcctcatcacttttgtttggctctcaggtaaaatttagaaaatgaaaaaaattttctttttaaaaaccttttaggataattacggacttgacgaattgtcggaagatgctcgttcgatgaatataagcattcagcaacagcaggtcctatcataatgttactagtaaacatcctaaaaggattattggctctttctttaaggtcgctatttcactcgtcaaatccgctgctcaaacgtcggcgtcatccgccgacgcgatgacaatgattacggaaacgccgaaaagttcgcactattcgacggtaaatttaggcattgattttcacatttaaattttagcaaattttgaatttgcaggccacccgaaccgttcctattgactttgaggatgagcgcgtgtccgaatctccgcaacttccgcctcctccgactgtgccaattccaatgggccatctgaacgattcggagtttgaacagtggcacgagacggaaatggacgaggcaatggaagggtattgcgacgctgtcaagcagtacacggacaaatacgggtgaggaattggtggtgggatatagaaaattgtaaaaatttaattgcatcgttttttcagccgtttggcagcggagaaaaagcgtttgttgagccaaatcgacgcggtgaaagagcgcattttcaaattccgttccgatttttccgaggcgtaccaacagaacgaggagaagcggcgtgcgttgtgtgccgatttgacgaatatttaacgggggagaaacaacaaaaaataattcttttaatgtgtgatttgcatggaatgacttttttgcctcatgtgctttttgtcttaatgca

SEQ ID NO: 81976 - DNA, 1513 bp, Heterodera glycines
atgttcaaagtgatttttgtgttgggtccgcccggcagtggcaaagggacgcaatgccaacgcattgaaaaggtgggcaaagaaaacatggcattttgatagtcaatccccttatgattttggttaatttctttccatttttttaaaatgatcactctctcccgttattttaagaatttcggcttcgtccatttgagtgccggcgatttgttgcgcgaggaacgccaacgggaaggctccacctttggcgagctgatcgaccggcacatccgcgagggcagcattgtgccggtggaaatcacgtgcaaactgttggaaaatgtgcgttttgaggacattttattgacagaataaataacctaatttgctaactgttaaaaagggcaggcattattatgtgccggcacggtcacataattagggaagatgtttcaccaaacaaatttgtggacattttctcgtcaggcaatggtcgcccggtcggacactgccgccggttttctcgtcgacggattcccgcgcaacaaggacaacttcgacggttggcaacgcgaaatgggcaccaatgccaaagtgctcttcgttctgagcatccaagcgccgattgaggcataaaacactcaaaaattttgatttacgagatttcaacagatttgtgtgcaacgatgtctaaaccgtggccaaggccgaaccgatgacaacgaggtgaaaagtgggaggggaggggtgatgctattttcaaaattaggcggagaaaaatttgtgaaattaattaaagagttggccaaaattttcaggaactacacattttttaaaaattttgaattgccaaattattttaaatgaattgatgtcatttggtaagaatttgtttcctctgttaggagtcaatacggaaacgaatcgtcacttacaaccaacaaacggtaccgatcattgaccattacgcgtcgctgaatttggtgaagacggtggacagcaccaagggaccggacttggtcagtcagtgtttcttttttggagttgaattacgaagttttctccagtaattaaggggggcgagggggaactgcaactgatcacaaacttatggactttcataattattgtcggtgttttggagggggggggggaaatcgaattttgagacagactccactgattttgagtcgacaaaagcttcttgctcgccacaccccttcaataattccgttttcctcattaaatttggcctttttagtcttcctttttcgttaattgctcaacttgactaattcctggccgaacaaaagttgaaaattcaaatttttacgcacgccctttcctttttcccatcccaaacccctgctaatttgtgagtgccatgggaccgaacccatttggaaatgtcggactgaatcggaataacctcctgatcagtgcaactgtgatttgctaggaattcgtcaaattggcatccgttttgcaggttttcgccgaaatacgtgctgtgtttgagcagtcgggcattggc

SEQ ID NO: 81977 - DNA, 650 bp, Heterodera glycines
gaaaattatggacttgacgaattgtcggcagatgctcgttcgatgaaaataagcgccggtgcgatgacaattcttacggaaacgccgaaaagttcgcaccattcgacggtaaatttatgcattgattttcatatttaaattttagcaaattttgaatttgcaggccacccgaaccgttcctattgactttgaggatgagcgcgtgtccgaatctccgcaacttccgcctcctccgactgtgcaaattccaatgggccatctgaacgattcggagtttgaacagtggcacgagacggaaatggacgaggcaatggaagggtattgcgacgctgtcaagcagtacacggacaaagacgggtgaggaattggtgggatatagaaaattgtaaaaatttaattgaatcgttttttcagccgtttggcagcggagaaaaagcgtttgttgagccgaatcgacgcggtgaaagagcgcattttcaaattccgttccgatttttccgaggcgtaccaccagaacgaggagaagcgccgtgcgttgtgtgccgatttgacgaatatttaacgggggagaaacaacaaaaaataattcttttaatgtgtgatttgcatggaatgacttttttgcctcatgtgctttttgtcttaataca

SEQ ID NO: 81978 - DNA, 884 bp, Heterodera glycines
atgcacgttgatttcgatccttttaaagttgaatggtcagcattaactcaaatttctccagaagtagtcgtccaatacggtggttataatgtgttcagaggggttccatacccgcgcggtagtggtatcgggtctgtttttaggagtctattgcgttacctaataccaatcgggaaagaaatcgggacagccatcgggcgccaaggacttgaatctggaaatcgagttctatccaatgtattagagggtagggacctcaaagagtcacttgttagtgagggaaaaacggggctcaaaaatttgctagagaaagcagccaacaacataaatgcccaaaaaggtcaagggttcgacttcaaacgatacacaaagagaaatgatgcaagagaaggtggtgcaattggtaaagcgaaaaaaggtataaataaactacaatcaaggttgggaccacacgatttcctaccagcaaacaccccagcaggtcggaagaaaaaacacactaaacagaaatcggtcaaacgccttcgtaccgatatacttggaacctattaataaaacaaccccccagaagcacaatcatgagttgttcacaaaaaattagcgaaagtagtccccttgccacaaatagtgctttgaacattttttcagtacctccaacaaatgtgtcggttgtgcgctcatatttccgtgaagtcctccccctagtgacaataacgcaagaatctccgtatctttttcgcctgtacagtgacaatctttggaccgatctttcccggatttatctcttccttgacctttcaatagaaaaaccggatgtggacggcaactgggtgtcaatcgcagctaccgatgctcaagtcggcaccattcagggaattggttaa

SEQ ID NO: 81979 - DNA, 1052 bp, Heterodera glycines
atgcagacattgaaagcaaacgatactaccaaataccgcgttagagtccatgacgtaaaactgtatgctaaaatgattgatgttcagtcatctttgaatttaagcatctacaaaacgcttgaaaaacaaccagccacatatgcagtgcgaaaaactgaaatcaaatcatgctttataagtgaaggtaggtttgaaattgactacaatgtattcagtgcaacaattcctcgacgtatgacaatcgcacttgtcgcaaacggggcatttaacggaaattatgctatctctccatttaattttaaaccgtttgacatacgagacattgcagtgtacgctggcggcatgatttacccaattgttccatacaagcttgactttgccaaagatatttttgtccgtccttttgttgacatgtatgagggaggcacttggcatggctaattcagagcgttctttcgacatcacaaaagagcaattcaaatctggttggaccttttttgtaattccactcacatcgacgctcgacgatagcacagggtatgaactcttaagaagcgggacaactagcattcgcgcaacatttaatagtgcaattcctgagggcggagttgaaatgatagtgctgggtgaatttgaccaaatgataatgatagactacaaccgtcacattgtttccgattcaaagcttagttaattaactgtataaataagatgcataatgcgaaaaaatgccaccataaaaatgaccttcttaaacactacagtcaacgccagtttaaagccagagatacaagtactaacatttgaaaacaaaagcgttcatcctaacctcctcgtgcaacttctattgcttgcccattatctcattgcttttcccgttttcattttatgctggtattctttgataaattttcttaagagaagaggacatatttctcagcgtgatgccaatgagatgatggatgatttgcgaaattaccaattaccaaaaaattcatcagttatttttccaacgccccccccccgattcccgcccttcaaaattttgaaaa

SEQ ID NO: 81980 - DNA, 914 bp, Heterodera glycines
gaagtatgttggcagataaagtcgtcattttcataattggcaacaaaatcgatttggcacggcacagaacggtgccaaaggaagaggccaaagagtgagtggaccaaaaaaaaaaaattttgtttatcgatggcagaaattttcttaccatttttttagcgaaaaatgaagtccggtggtgccattaggcaaagccaggaaattcttcaaaatttatggatttgtatatatttttaccaaaaattatgtcttttacaaaaactatcacccaataataggcaaaaattttattctgactttttgaggtattctcaatccatcggagccaatttctgtgagtgctcagccaaaaccaacgaaggggtcagcgaactgttctcgaagttggcaattggtagcaatttgactttatttttagtggggtatcttttcccctgcacttcccccagggggtcccagagccactggtttcgagttgaataaatttttggcaatagccctcaaaaataattttagaaaatcgcttaaaaaatatccatttcgtggagggggttcgaatcgtagccttttctctttttatcttacaaaaaccactcagccatacacgcaaatcttttcggtacagaaacacattttccggatgatgtgttttgcattcatttaaaaagattatcatttagaaatgttaaataaatcttccgaagagacggaagacaccgatggaatcggcacgactcctttccaacggcattacgggtcgaggcggagccttagaattgcggacgaagatgaaacacatgcggaacggaaacgacgcggaaaatgttgccgatgatgcataaaaggaaataagatagacgagcattccaactaattgtattatacttatggacaaagttctataaatatttacg

SEQ ID NO: 81981 - DNA, 1760 bp, Heterodera glycines
gaaatatgagacgagaaatcaacaaaatctcgagattctgttcattttttagtttttctttcgtgcattgctaaagacaaaattggtggaaagtcgcgagggttgcgaatggacgcgttgtggcaggacggaccgcggagtgtccgcttttcgacaggtggcggccgttactgtcaggtggggacggagcggcaaaggctttgtggatctattgcagtttattcgaccataaataacacgacacaaatgacagaacattcaaatttaaaataatgttgaattcgaaggctaactcttagatagctattttattctgtcaaaattaggtcgacggatgtgtcttcgtttgacagtttttggagtgagggaaatgcggagagaaaagacagaatcacttccaccgtcgaattgtcctacgtaaaaatgtgaggatctacaaatttcggacttctttcaaacttaaggctcaacggcgttcttccccattccgtccgtgttctcgcctttgccccggtccgcaggggtttcaggtaccgttttcgccctttttctattccttcgttcggtcttttcagtgctcggttcaattgcgttcagcgtgagtacacttacatttttccgcgtactgccattgccgacctttccgtctgtcctctccaaatgatttctcaatttgttgcctaattaagtggctaaacgatgcttgcgcgcgactctgtggcacccacgactttcggaacttttgtcacatcgatcggaatgagaagagattggccacttcatacgtcagaacaattaaggaggctcgagtggaccaattagggtgaaaagtgaatttattttaatgatttacattaattcgccattttaaagaaagggtaaaatgaatttcagcagttcgtctcacgtcgcttcccttgtcccctcaacgtctgctgaactgtccgattcgttccaattgttgagattgaccgtcaaggccaatggttttctttggcaccaaatccgttgcatcgtttccctcctttgggagatcgcttgcggcaatgaggagcccgaggcagattttcattttaagtcaaatcttagaaacaacaataatttaatttagctgatcgacgatttgtttgacattgagaaatttcctgctaggtattttccttttttttattaattaaaaacacaattaagaggaatgttccgatttgtttaggcctcagtacaaaatggccaacgaattgccattgtgtctgttcgactgtactttcgacgaaccgattgattggaagttcgatttcattgcgttgggttcagtcgtaaatacccttcagaaaaaatgggctgaacatcagataaagttagtttcggccggtttcatgcgcccatgacattttacgcgttccataaatggcacatgaaatgctgtaggacgtgtaaaatgtggcatgggatgcgtaaaactgaccagtgccttaatttctgacaaaagcgtgttcataaagttcctttattagagcggcaaacattaaagaaatgttggatggacttaattttcacatggcaaattcgcccaatggattggatgagtttgtgcgcaccgaacccaccccgaaggtgccccgccatattttgctcacattttataatttttcagaaattcattcccatacgaaaacgttcactttgcgagggattggaagaacgaagacgaaaagcacaaaagaaaaagctaaaaatgggaggaacggatggaaaagggg

SEQ ID NO: 81982 - DNA, 455 bp, Heterodera glycines
cagcttgattttgtcctcgttcgaattgtccaatcggctcaattgcgtactcacaaatatttccgtgtggctgtacctcaagcgatcactggccaggcattggtgcagcatatccaagaagtcttatcagtggaggacaccaatgaagcgtaattaatttatctttttcggtcatcagctcaaagtcttggcttttttaaccccccatggttatttgttcacccccccccctccgtttttgtggtttgatactcatataactgttcaactcgctaattacactgcgaatatcttttttaggctacattttgcaacaattctgcttcattttggctacctttttcccgtaattgacgtccattctcaagctgtcagagaagacaataccctctacagaatacaactcccttatttttggccttcacatgcccatcaggcggacaatgtggaatatg

SEQ ID NO: 81983 - DNA, 204 bp, Heterodera glycines
atggcgctaagctttgcttctcgtgaggatgccattaacttttgcgagaaaaatcgctggtcctatattgtcgaagaaccaccggttggctttttttattgactatcatcttgatctggcttgttttagagccgtgaaatcaagccgaaggcttatggttccaatttttcatggaacaaacgcacgagagtcagcactaaatga

SEQ ID NO: 81984 - DNA, 132 bp, Heterodera glycines
atgtctgctattaatgttcttgaagcgatgaatttattgaagccggaacaagtaactgtgcagaatttgctgattgaaaatggacaactcattgaaactgtggcggaatatcagcggatgggcaaaatcgtt

SEQ ID NO: 81985 - DNA, 2889 bp, Heterodera glycines
aattcgccctcggctttggtcaaagtgagagctacgctactgaattctattatgacgaaaagctcgaaattgctttggccagtgaatataagcaaaaattcttttgccaaaatgacaacgaatcgttgccaactgctgaagtgatcgaccaaattctgctgttgactttttcactcgcactgcgcttacaatttaatgcaatgtcagcattttgttttaaatttaaaaattaaatatttaaataaacattatttagatttgctatttatccaatgtttgacatttttcactccaatgaaattaagcattggcaagtccgaacccttttgactgcgtataaacaattatcaaatgctaaaggcatcactgaacatgggtaattaagcaaattaattaaatattaattacattaattttgggatatttagcgtttttccttttaaactttcccaactttcggatgacaaaaaatatgcttattggttgttaacatttattgaggaggaacaaccgacgaataaacaatacattggtatgaaaataagagaaattaatttccttgtaaatttcagaaaatttcaatttcatcataaaaatttccgaattttcattgtctcctttcgatgtttacaaagtgctcgaggcaattctatcgaatgttaatgaaaaggaaaatactgtgcataaaaatggatcagcagaagtgccaaaactgtacgaatttgtgagagaatatttcaatgccaaattaaacagtgaaaaagcatcaaattctcccaaaagtccttctttatccattgattgtgtgctcgtccatttgggctatcaattgcaaatgaatgcttaccaaaaattcagagaattaacggagaaacaccaaagaaatacaaatgggtgtgcaaaatggagcaaggacattttggaaattgttgatctctatgagtttggggaaggattgggatacaggtaaaatgaagaacaacgaaaagaacggaagaaattgagggggaaaagaaaagccattttataggacatttgttcgctgatgtgacgaagttacaaaagtatcaatgacagtaatatttaaattaatattatttaaattttatttgcagaaaatgatcatagtcataaaatagcaaaagctaatttaattaatcaatcatggtattgaaaggagctctacatcgcctctattatcttatttaatcttgcaaaaatttacaaaaagttgtaaccaaagaatttttttaaatttaacagaagaatagagaaacctgttctatctaatcacataaagaaattaaaattagttgtttctgaaaaagttactaaggaattaaatgtgttatatgtttatggtcatacaaaaatgtcaaatcgtttaaatgcgtgaaaattgttcaacaactcttaatatgattagatagaggaaagatttctccattattctgtaaatttcaaaattttattgaattttaaaaaggaaaaattatttagtctaatttttcgaatttttttcgttacaacttttgtaaaaaattttgctagctttttaaaaaatacatacgataggaggacatagagctaactatcttccaataccaagattattaattagattaagtttggctaggtatgtttattttctgaaataaaaaagtaataattaaacttagatattattatcattgatacttttgtaacttcggctcaccacgcattattcattcaacgataataaacccaattggaaaaattcatttttcagctttcacatataatgttcaccattttaggatgtgctcgactgaaaaaagataaatcttagagaaaaaaaattttaagattttcaatattagacatcctccagaaaatggcaatttattcatgtttggtttagaattgcaccagttgagttagaattgttcaacgagccaatacaaaattatgcgaatgcaattgaaattgacacacatcagtgcagaggttaaatacattcgaatttgtaatttgagacttaaaataagctcttctcgagaccaaagccccagcaccggaagagataactaattacccccttaatgactgacatttgtccaaatgagtggcagagaaaataaaaaaatagactgacttaattattttgagtgaggtgagtaaaatatttccttggttttatttagcattgactcaatttgccaacgacgcattggacaaaatggtcaaagaaaacatcgacaaaaatgagcattttgatcgattacaaattgtccttcaaattctatctgaaatgaaagacacggaaaattatgaaaaacttaaaaaattattggaaaattttgaacaaaaaattgcaaacgaaaagaataaatcgttgctaaaagagccaacgaaatttctaaggcagttaattggggaatacagctgcaagggttattgtacacagatcaacggaagagggaaacgtgacttcggttccggtcttatgatgttagtcaaaatcccataaaatgaaattttatgatataattttgctcaaaatcaccaaaattttaattctttatatcattgggtaaatagagagagaacactagggctatcgaattttacgaagattttaaaagttgattgcttttgagcgaatttatgaataaatttttgtgaaaatatttgcattcgaaggtttttgactaatgtcccatccaattactacagatcggtgaacaaaataatgccaatatttggacaaattttgatcgaagccctcaaaaaatcatatggtcaaacagtggaatataatgtgaaggaacaaaaactgtcatttccatcggaattgggcgaacatttgctgggacgactcgacgaaatgatcaaaatgttcgaaaa

SEQ ID NO: 81986 - DNA, 225 bp, Heterodera glycines
atgggcgagttggagccgtacttgctgatccgtcacatttgctggggcgaatctccgccaggggaggtcagccaatggaaaagcaccgctttacgggtctgtgccaattttcagaattgtgccctcctctcgcgcatggaccttcagccgacgcccgccgcgaaaatgcttccgccgatcattttgggcatggacagtcaattgaaaacgatagtgatgtgctga

SEQ ID NO: 81987 - DNA, 1180 bp, Heterodera glycines
tcagtcgatgtggccaaaagaaacgaatcatccgcctttggccatccggaccaaggaatacggaggtaaagctggatgatcattgagtaacaaacagacgggcagatgggcggaaggaatgatcagagcaaaagtgagagggactaaagtgatcggacgaggtgagaaaagtgatcagagggaagagagagtgatcggaagaaagagagagagagagtgatggaaatggcgagagaattaggaaaaaaatgtatgccaatccagtgatgaatggagttgaatgcgttgattccgacagaaaactaattgtttaaatgaaaattcgaaagaattttaaattttatctaataataattgaattaaagcataaatcaattgttcctttattcaaagatctctttttaagcttgatgagaagtgctatttttactgacgtgacaatcgggaaaacgaattgaatttttaattattttatatatatttgaatgcttcgttttattgtttacgtttaaataaggcataattaaaattaattcgttttcaaatgtttaaatgggtcctcccttttgctaattggatttgttagagcgataattttgcttatttaaatagacaaataatttgttaaattgcattcaaattttccatccattcatcatttaccaatgtttccccaggtttttctttttcccataattcttttttgcgtttcattgtcagtgagtttttcatataaattaattttacttttaatttaatttaattttttaatttttatttttttcagaatgtttcgtcgtcccatcggcgatttggacatttatctgaaaaaattgaagtgaattttttaacttgaactatcaaaatgggtttttccaattagcatcacgccaaaatacccaccatttttttttctttgcaggattcgcaatatgatttccacgctttgaaagagcgaaaaagattgggtcggatggatgaggaaaaggtaaatgaacattccattaaataatagattaattattatttttcatagctttttgctgcttctgaagagggacgagaaatggaaacgaaagtttcggaaatgaaaagcatcagaattgggcaagaatacgaaatgcaattggcaaaatggctggacgcgtgcgacatgcgaccgctgagaaagccaattacg

SEQ ID NO: 81988 - DNA, 1692 bp, Heterodera glycines
atggaaggtgggacagaagatgacaaaagtgaaaaagaaaaagtgagtaactgttctcatcgagaagaaaaagtaaaagaatacggaccaattgtctgtgctgccctcgtctgtgtgctcggtaagaaaaccgaaaattgggtactgtaaattgggtactgaaaattgggtattttaaattgggtacagaaaattaggtacagaaaattcggtaccgaaaattgggtactgtaaattgagtactgaaaatgggtacagaaaattgggtactgaaacttgatactgaaaattgcgtaccaaaaattgggtactggaattgggtaccagcagcagttccacattttgtgtgtaacacagtcccagcaaagggcaaagggcgaggcgtacaagggatacggtagataccacacgccctgcccccgcctccccaaatccatcgccccataaaagggaaaattggataaggtaccgaaattgggtaccagcagcagttccacattttggtgtcacacagtcccagcaacgggagagacgtacaagggttacggtaagtaccacgccgcgccccccacagaaaaaaataaaaataaatccttcgccccaaaaaagggaaaattggataaagagtgaaaatctgttatattcagaaaaggaaaagcacgtcttttatcagcaaacttgcaaaaatgaaaattcgaatacccagagagattgccaaggatatgggcaaaatggcgcaataaagacttttggtaaaggagattggaagtgcaaatgtgcaaaaagcaaggtcaaccaagggaaggacattggtaagacacattgttatacaaaccagggacgatgggcagggattcacgatttccgaaaatttttgggcctcggaatgccatccatctctgacacacattgatatacataatgcccaagtttgggaccggggcacggcacttcagcagcagggcacaggtacctaaccaagaggtgccatgacaatcgtacaaaaggcaactcgcacataggcttaggctaggcgcctaattagtactacttagaggcttatttaaaaaatattaatcgttaaaagctgcaaaattcaaaatttttcccagcggcgcatctcacaattagcagcgccggacaaaaaattccataaatttttttccaactaaatttaacgttttttgcgaaaaatatcttttgtttagaaaaaaagagatttttgaattccttgtaaattttggttatttatggaaagcttacaaatagcctccctaattatgtaacatttccaaatgggcattttctatgggtgaaaagcatcacatttatgaatgctatacattaaatttattacaattgaaaagtcattcttttcattttcagatttgtctgctctcggccttccatgtaagcttttagtgcaaaatttattaaattaaagaaaattatgcgaaaaaagtagggagcggatttatatggaaaaaaaatgcaaatgtggacaaaacgctgaaaatttgccaatatatggataaaaattcctcagaaatttggttcaaattttcacaaaactcttaagccattaattaaaacgaaaaaatatatatttgattctcgaaatatcaaaaatattatataaatttaaatatttggtgtctgaaaaatggattttcttttcattgggaaaataaa

SEQ ID NO: 81989 - DNA, 1338 bp, Heterodera glycines
atgatccatttgcttacgcttacattattgctttttccaacattggcattgtcaaagctgaataccgtcaattttaaaagcgatgacattgtgctgctagatgaaatccgaggttagggttaactgggaaaatgaaaaacttgcgtaaatttaggtgtagcaggcaaccaaaaagaaaacaacgacaaaaacaggtagacatgaattttttttaaatgggcaaaatgttaggccttttatcccctttttcaatctcagatatgttttcagttaaacgacattaaattaataatggggaaaaattacatgataaaaagttcatatttttgtttaagactctcaaattcatcaatatagtcacatctttagttagccgacatttacgagtcctatttctggtttgaattatctaaaaaacatctagatttttttatctttgttttttttgcgttaagcagttgaggtgattgaaattttgggtctaaagttgggaacagcaatatttcagacaatttttggaattagatataaaaattcactttttgtttttcttaatattaattgttaaatgaaggtggaatttttaaatgaaattttgtcgctgagtagatcacccttggttgtataacaaaaaaaaaaaaaaaaaattataacaacggaatgagcctctgtgccaaagatatggtatgccaaaagttccactatttaggagataaataaataaaccaattattaataaattcacactgtgatcactggtctatcggtagtgcctttattaatgtttatagattagaggttcaagtcattcgcatgccaactgatttctacttttttaaaatttatgtttcttataaaattaagtcagaaatataaaaatattttttacaagtataaaaatataaccattttaaaatgataatttacttaaattagtgtttgaccacaaggagagcttgacaataataattatcatctcaaaaattaaatgggctaattataagaaacttgatcatattattaaaaaatattttttatgggtaaaaattttggcagtaaatattttaacaattggtactctataaatttaaaactagtccagggtaaatttcccaacaagaaaaaaaagtatgccaaagttaatttcaatgttagaagcattgaaatttattgtaaatccactttttcacaaaaaaaacactcatcctctaaaagaacaccaagattaaataaatcatctgttctgtactaaccaaaatcgatcacttttcagcgagttggccaattgggcggtggaaaaaggatgcgaaacaattcaaagtttggacaaatatttag

SEQ ID NO: 81990 - DNA, 382 bp, Heterodera glycines
atggacgcgcaacaacttcagcagattttggatgcggctcttaaaaaatcagccgaagtttttgccgccgcactcaacactcaaaatcaaaacccaaacgcagggtcatccacaacggcatcacttgcggcatcaatcaatgcccgcctcgaaaaattcaattataatccggaggttggacagacatacgatgcttggttgaatcgatacggaaaaatcgttcaacaagacggcgcttcgctcccagagcagtccaaagtccaacttttggtcggaaaattagacgaggaggaatacaaacggtacgttgacagcattgcccctaaagccaccgaacaattcaactggctcgaaaccgtggcaaatctgaaaaagatttttg

SEQ ID NO: 81991 - DNA, 2094 bp, Heterodera glycines
atggaggcaataaagccgattgaatttagccattgggccgcgccaattctggcagttaaaaagaggaatgccaaaacacgcgcgtgtatcgatttttccacgggattaaacgatgcacttgagcttcaccgccatccgctgccacgtccagaggacatttacaatgcaatcgcaggctcaaaacatttttctcgtctcgatttgcgcgacgcttatctgcaattggaattgtctgaggagtctaaaaagctgtgtacaatcaacacacaccgcggacttttccaatgccagcgtttaccattcggcataaaatcagcgcccgcaatttttcaaagtttgatggacaaaataattacacccatcaatggtgcatttgtctatctcgatgatgtgattatcgccaacacaactctcgaccaacacgtcaaaacaattaccaaagtttttgacaaaatcaaacaatttggtttccgaattcaacaggaaaagtgcagttttctacaaaaagaaaccatttcccttggccacataatttctgaaaatggctttcgcccggacccatcaagagccgaggctattcgaaaaatgccagcgccacacgacaagtcaacactacggtctttccttggagcactcacatactacggcaaattcatcaaacaaatgcgcgaaataagaagcccattagatgaattgcttaaaaaggatgtaccgtggaattgggaaactgatcaacaaaaatccttcgaaaaagctaaagaaattatgctttcggatttattgctgacgcatttcgaccccaaattgccgtcattgtggccgctgatgcttcaaaaggaggaattggtgcaacaatcagccatcaatttcccgacaaaagtgaacgtgtcattgaacacgcatcatgcactttcacggctgcgcaacaaaattacagccaaatcgaaaaagaggctttaggattggtttttgcggtacaaaaatttcaccgcatgctctacggcagaaaattcattctgttgaccgatcacaagcccctactggccatcttcggatcaacaaaaggcattccaatatattcagccagccgacttcagcgctgggcgttaattttgtcaaattacgaatttgatattaaatacgtcaacacaaaagcattcggaaatgccgacgtactttcgaggctcatcgctaattacccaaggccatcagaagacattctcatcgcaaatatctgcaacgatactgattgctgtgttaattttgtgtttgaggcgaaaatagagcaactcccgatcaccgcaaaaataatagcggatgaaacagcaaaagacgaaattttacaacaaatcagtgccttcaccaaacaaggatggccgcaaaaatttgacaacattaaattgtctccttttcttccaaaaaaggcacaaatatccgaaatcgaaggatgtctcgcctacggtgaacgaattataatcccttcgacgctccggaacaacatcctcaaatcattgcatttcgcgcatcccggcattgtgcgaatgaaagccattgccaggaaccatgtttactggcccggaattgactccgaaattgaacgactggtgaagcaatgcgaggaatgtcactcagcagccaaaaatcctacaaaagcgaatctttagccatggaaagcagcaaacggagtttttgagcgaattcacattgatttcgccggcccgtgtgctgacggccaaacataccttgttttggtcgacgcttactcaaaatggccagaagtatggcaaatggaaaggacatccagccaactcaccatttcaatgctgaaatcattcgtgcatcggcttggaattcccaaagaaattgtctccgacaatggaagccaatttcgatccgccgaatttgcacaattctgcaaagaattcgacataaaacacaccttcacgccgccgttccacccaatgtcgaatggggccgctgaacggtttgtcgacatttttaaaaggtcaatgaaaaagtgccgtcaagaaggcaaagattggcttcaaaaagtgcttttggcgtatcgcacgacaccaaacacggcactcaacg

SEQ ID NO: 81992 - DNA, 356 bp, Heterodera glycines
ggaatcgaaggtgttgtaagcttttttccttttttcacttgtaaatttatttaaattttcaatttttttagctttttttcgaaaatttttttgtctttttttcggcaggcactgcctctgacaatgttttttatttatttagaaaaataaattgattttttttctttttgatttattttaattatatttcatccttaaattttttaataaacattttcaaactttcaccttattaatttaaggcgaattttgccttttttaataaattctcttgtgaaaaggcaaaaaaataggctcttttaaatatgcctatttaaattactttaattgctgtcctttcgcttacgaccatacca

SEQ ID NO: 81993 - DNA, 111 bp, Heterodera glycines; identical to SEQ ID NO: 54152

SEQ ID NO: 81994 - DNA, 990 bp, Heterodera glycines
atgggtcattccggggaaaagcgcaactcggcacagacggaggccaacaacaaccaggggagaagtacaatcgtaacggtaattagaatgaataaaaggcaaaccgaaggaaacggacaaaatcatttggggaaacaaaggaattccgagaatggcatttttgttaggcccacaagtacaagcagttgcgcgctctgttcggtctgctcacttacctcgactgggccatggtgctggtcaccgccttttcctgtgcttccatgctgttcgagtcttcgtggccaatcggtggcgacaatttggtgttgaacaacccttacttaaaggtgccctcttgggatgggcaattactgtaccggttaaagtacaccacaattcgcaaagccatcatagcatcatatttattattattgctaattttcaggcatgcgattttgtatttgtgcttgccatgaccattgagttggcactcaaagtcgtggcccatggccttttcttcaccccaaatgcggtggtgcgcgatgttggcggcgtaatgacactatttatctatgcgagttcattttggtttctgatttggatgccgaaccatgtcgagcaaaactcattggcacaactgctgatgatattcagggcaatggtcagtggtgaagcttaaaagtaatcgattgacagattgattattgttgctaattgattgtcggatgcaaacaaagggaaaagcgacgcttttccttttccgacaaattgcgattaatttgatttggagagaaggctgaatcaccgaatgggggtcatggcagttcgtacaattggcagttcgtacaatggagtttcgtacaattggatttcgtacaatgggactttcgtacaatgttccaattgcggatttcgtacaaaaaatatatataaagtcgattttttctttaaaaactcatttaacgacttgtttttattgccacttttgtgaatgtttgaaaaattaacaca

SEQ ID NO: 81995 - DNA, 1447 bp, Heterodera glycines
atgggaaatgccattttcgatccgtcgccgtgcccttgccgggaaagtgtaagtgccgactatggtcgattgaaaaagtccaacttaattcataagaagccttaaaacaataataggataaacagattaattaacttaatggtctctattatatccaatagatggaatccaagtttattccctaattaaaacagctaattacctatcccacccccctaatatggaagcttatcatatgttttcatttttttgaattttaaatatttttttgtcaaattttattttaattttagttgccggggggcttttacttttttctaatactatatacaattttaatggcgttttaacaaataaaagtccataaaagctccaagccttcccccagcagggaaaatccctaaatttacgggcttcagtttcaaattggaacattccctgttcgacttttagaccacgccagattccctgtcgatgcccgtgttggagtcgctgcagcagcgactgcacgcgttgggccccggcgtggacaacgtgttcaccgtcatggacaagctggaaggggcattgggcggcgactcgggtgccgagaccaaaaagcatcggttggcattggaacaactgcgacgcgactattccgcgttggtcagcgagtgcaacagcgcgttggatcaggcacgaagcaaggtgtggcatacaatcagcagcagttgataatgataagagaggaaaatccgaacgggaggaaaattgggcactgaaaattgaaaatttatggaattggccatagaaaattgaatatttgagtaaatgggcaccaaaaattgaacatttgtgtttggcacaaatgaaaaaataggagccaaaaattaattatttgaaaaagttggcaccgaaaataggacatttaatgaaatgttggacacaaaaaaattgagtttattttacaaattcgccgatttttattaacgtaatgaatatggaaaatcggaatcatcatcaaaatcattattgaacgatcactctggacttttatgctttcgaaattgaatctgatcattaataatttttgtcatagtttaacatgtgatatctgagtaacaattatatatttgtcagatgtggaatgccttaaacctgaccaaattttcaggaaacactcaaagcacggtttgacgcggacactgattcactccgatcactgttggaggacacagctcataaactgcacaatgatctcattggaaaagatgcacttaaattgggtcagtttccattcaaattgaaaatatctcgaatctcaatgccttattctcgagtattattggttatcttattgtttttcaagcaatttaaggcttatcttctagtcagatcattaccattccaaaatcccacatgcccagatcattaccataaagtgccgtttagcaatttccgactttga

SEQ ID NO: 81996 - DNA, 700 bp, Heterodera glycines
gttttcggggcagtccccccgaaccgatgcgcccagatttatggggagaccgaatccttcgggaatagcttccctatagcctgtactttaattctgcgttggatttttgctccccataattgtttgagtaccccaaacggacacttgaaaaaatcgatttttttgttttcggggcagtccccccgagccgatgcgcccagatttatggggagaccgaatccttcgggaatagcttccctatagcctgtactttaattctgcgttggatttttgctccccataattgtttgagtaccccaaacggacacttgaaaaaatcgatttttttgttttcggggcagtccccccgaaccgatgcgcccagatttatggggagaccgaatccttccggaatagcttccctatagcctgtactttaattctgcgttggatttttgctccccataattgtttgagtaccccaaacggacacttgaaaaaatcgatttttttgttttcggggcagtccccccgaaccgatgcgcccagatttatggggagaccgaatccttcgggaatagcttccctatagcctgtactttaattctgcgttggatttttgctccccataaatgtttgagtaccccaaacggacacttgaaaaaatcgatttttttgtttcataaatatttttttcagaaagtgctctaaagcgcaccaa

SEQ ID NO: 81997 - DNA, 262 bp, Heterodera glycines; identical to SEQ ID NO: 60799

SEQ ID NO: 81998 - DNA, 1527 bp, Heterodera glycines
aatgatggcacaatggcaggagcaacaaaaggatgacgtgtcgacgaactcgccgcatcattcagcgcagggcgatcaccagcaaaagaaaggcaacgaatttagacgggggacgacaaagcgtgccgttggcacaatgccaacagcagaagcagatgggacaacgacatcggcggaaggggcaggtgccgaaaaatgtttaaaataaaatttaaataaattttttaagcgccgtccggcactttggcaggaaggcgtcgcctgttctcgtcggatgaagacctgctcgacataccgccaaactttcagtattcctcagctcgacttccgcccgacttttacacacgttacgccatttggtggggcgggaggaggtaaaaaacgcattagaaataatgtaaaaaaccaaaagggccaaattgtcgagaaccgtaattgaattttgcgcggctgatcacgcgagatcattccatcgaaattggtccaatcggccaatttttgcacccctttttacgccggagaaaccggcggcacttttcaacaattttcggcctaattccatttagtcgcgcccaatccgtcgctgcacatccgacgcgtgtccaattgctgcccgatgcgacacaaaaaggtgtttctgcttcaaaagttgatcagcatctgctgaaacggccacacacaaccccaaaaaacacgaacaacaacagaagcaccaccagtcactgccacgcgcgcgacttggccagacgcaatgcttacgacaactcagttgcccgatgcacgtggtaagaagcatcaaataagcgagctgtgagaaaaacagagttgctgaccatgcatttagcgacggaatttagggaacgaaacgccaaaaaattaaatcttgagctttttcttccctttctcgaccgacctgtctatctcttgcattttccagaaactgtgctggtggaagggcctgcggagctgtatcactccgtctcgctaccgtatctgatcaacggccaagctacggtaccgcacaaacagtggacggcgacggaacaggcaactgctgctgtgtcaaggcggacagagatacagttgttaagcgatgacaggcaacaactgttgacgagtgccaccggtggcagtggcgttggaataacaccgacgcatacggtgacggcgccgacacggtcattggatacggtatcggcccgacaaaacgaacttggctactgaagttttttttattgcagcattcgccggctgagttcaaaattcaaaaatttccgaatgatgccgatgaaagggtcggcgacagaatgccaacaaattggccgccgcatggcattgacgactctgaacagcttcaacagttgcgaaccgatgccaacaatgtgtactttgccaaaatcttggaatttgatgacgaggaggaggaggacagcacgggacgagcagtgggaagaacgacgccgcagggcgcgcgaggtgagtgccaagggggaggggctgaggacaaaattttaggcttttatctaa

SEQ ID NO: 81999 - DNA, 1317 bp, Heterodera glycines
  unsure (1)..(1317): unsure at all n locations
atgacactttggccgtttgtggttgtgctcacacgtgcaatcgttgccatcaccaggcttcatatatggcacaaggaaggtgcaagaatgtgctgtaatgtgatgaattggcacacagattacagtaatgatgtaaaagcattttaaccaaccatttccaaccgtataattctgccgtacatacacaaaaaacgatttgtagtttatggcatacagtaaaccaataaaactattctcgttgattcattttaactttaaatcatttttgataaacaatagtggttataaacatatgaccatgactgtaaataaatgctgtcatcattcgataataaggctccaggaaaatgcgtcattaaaataaagtactgttgcattaaatcatgtattacaaggtcaagattgtataaaaatttcgttctgaattttttcaattaacttttttaaaggccaataataagcactcagggatcactttttaaaagtttttctttcaacaaaaacgacaattattcggtgtttaatttgccgatttttaacaaagatatattttttttcaatatagatgccaaagtggggaaatggcattttagcgcatttttgacccatgttacaattgttcaaaaatggcacttcaagaattcggctgggaaaatatcgcatgtcaacagaatttgtaaaaaaattgttaattttttgaaaaaaacgtaaaaaaaattccgactttttatataaaaatttcggaatcggaattctgaactcaaaaaatgtcagaaatcgtaagtcggaattccgtgccatccatggttaaactttactttttttttgacaaaacatttttgatttttaaatttttactcatttgaattttactttttatttacttcgtgaataaaaaacattgccttttctaagttattttgttaaaattgttcaacaatcgaaatttcgcatcaaattatgcagcgcttgcaaattttctcaactttcttttcattttaaaatattaggcatttgctttggaaatagctcacatcaacaattggtttctttgatttcttacaaattttcaatttcaaacttcaatttctttgctaatgtgctatgaagaaagtattaattttttgaatgcttttgtcccatataaattttgggtttatttgggaataaatccaaaaatttcgacatttccgcttcgtagtccattttttggatatttggccatccatcatcatctttgtctaccatatcaaaaacttattgtaatttttcagataatttttatttaaaaactttttaatganattttttcagtaa

SEQ ID NO: 82000 - DNA, 1787 bp, Heterodera glycines
atgagaacgagtcaacaatttgacacaataattcgagtgccattttatcgcagacgtgtcacagtgtttgatgatcaggaaaaagaaattaatgctgaagtaaggagaaaaaatattaaaatatttaaatttaaacaatttattttatttttaaattttttgtcttcaaaagttataaaaaaaatattgcttattaaatttattttttatttttttcaccattccttacttttatttaattaattaattatttaaaaaaaaaattaaacataaatatatttatattaatattttatttttatctatacgcatttttaaatttttttcataatttcaatagttaaatataatcaaaaaatattacttattatatttggacagtttttctcgatcatgtttttataattaattattattttcattatttttaattatttatttaattaattattattttttatttaaaaactaaacttaaatatttataataatatttaaatgtatcttttgcattaaaaaaatgtttttttttcacaatttctatagttaaatatattcaaatatattacgtattatttaatgacagattttcattgataaattttttattatttttttaattatttatttttttgccatttttattcagttgataaaatcattttggcaaccttttccccattcttcgcatcacgatgcggccccatatgaacttgtttttcctgttattgtacctccacttggctttcgcacatattttgtgtttggagatggccaaaaacggtaaattttattttaataatgccatttttaaatttaaatgtcaagattttcttaattatgctaaagaaaaattatttattttaattgtatataaaataattaactatttcctattgtttaaactatatttttgttattaatttaaaagatataaaataatttaattaaaaaataattttaaaaaaaatttataaattttttacatttaaattatttattataaaaaaaaaattatttgtcccagtgagaaaaacaatctgaggacaagcaaacgaaacaacaatgaacaacaacaaaaccagcagcagcagcaaaatgatggtggtgacgaattgacaacaatttcaaatgaagtaattaattaattattcaatttgtcattttctttgacctttttaatcacattgtttttgcgtccttttgccaattaaattcagaagggcatttaataattaataaattttgtaattagtgtaatttaaaatccggaacccggaaaaatctgtccagattcaggctccgactccgggcattattattaaatatgatatagttaatacagtaatcatacataaaatagaataaaaaaagggatgaattaccactcaggatttatttagtgaataaaattctttcacaagatttttaaatttagctaacttccgatttccatagctgttttgggaaagcaataatgccacgcattgattgtacgaataaaaaaaatgtttttgttttttaatttatataatttattaagtttttccgactgacttttggcaccgatgggctgcttcaaagtgtggcagatttacgccggaaccaaactgttcaacttcggcaacaattcttgtactatcatggcatgtccaataatgcaacaccaagacaggcattttgactttttattttggtttcaattattttaaataatttcatttaacatttttaaatttatagagtttcttgtttacatgtccttttatggcatttgcataaataaa

SEQ ID NO: 82001 - DNA, 132 bp, Heterodera glycines
  unsure (1)..(132): unsure at all n locations
agatatccaatttacacttacaaattattctgaaattttctacaattctaagcttaaaaatgacaaaaaaaatttgaaattaaatttcaatatttttggaccganttttttaaaggaattatagggagacaa

SEQ ID NO: 82002 - DNA, 1526 bp, Heterodera glycines
  unsure (1)..(1526): unsure at all n locations
ttgtctccctataattcctttaaaaaantcggtccaaaaatattgaaatttaatttcaaattttttttgtcatttttaagcttagaattgtagaaaatttcagaataatttgtaagtgtaaattggatatcttcagttacccgggtttcaccacaatgaaaacgaattattttttcatctacgctattgtaaccaaaagcattagtaaaacaaattaattatttgattgaaaattatgtgctttgctcagttttcattaattccgaataaaaaatgatttaaatttaataaaatgcgaaaaaattaattctaaaattgacaaaaattaatttaagcatgtgatgttaacaatgggcggtgattttcattacacaaattcaaatatgtggttcacacaattggacaaactgattgctgccgcaaataaacaggtaaaaaattaaatatgaaaattcaaaaaaaaaattaaatatattcatttaaaaatatctattaatttattttactccttaaaatatacacatgtatatttaaaaattttatttattaaactaaatccgaaacttttccagaatttttaattaagaaataaaatatttaaactttattttttaagactctgtcaaataatatcaccgttttttactcaacccctgcttgttatgttaaagcgttgaatgaagcacagccaaaattaccagtaaaataatgctctataaaataaaaaataataattatttgaaataaaataatggattgattatccatgaaaaacgaaattttaatcaaatgtttctttcatttcttgataaaattattttggttttaaattaaagtgttttggaaggtttcataatttttgatcatttaaacttactacttaaaaaatatttaaaattataattttcagattaaatctgatgacttcttcccatatgcaagcgccaatcattcttgtgatttttagatctttcgattttctaaaaaaatatctttcaataaatttttcagattggacaggctatttaacttcaaaaccgggcatcaagggactcattcgagcttcaagtgcatttttacaggtcataacaaatttctgattttttttaaataaaattatttaaaaagattaatttgtccatatttttttcatattttgcgcttcataatttttttataataagaaaaatacgataaaatcgaaaatgaacacaaaatttgaattttaaaatccatgaattataacaattttattgttttctatttctggctcacattctatttaatattaagtaaatttaattattttttatttgaaacccaaaaatatttttagaagaatgggtatttaagcataatggaattaaatttaaaaaaattttcatttctctatttatttattataatttttttgacagctttcacgcaaatttgcatcatttgcccttctgtcaaatgcttctaagcagttggaaagtttggaacagctcaagcattgtgcacacatcacgatgccgtgacgtcag

SEQ ID NO: 82003 - DNA, 2265 bp, Heterodera glycines
atggatttatcccctcattatttatcgcttgaagggaaattatcacctttagttttggacaagtatttcgttataaatgatgccgaagataatcaaaattggaatactaccaaatttagaaatgctctatcgagagcaattgagcaaattaaaaacagacaagaagtgagacaaaaggtcagtacgagtcaaaaaagtaaattacaacaaatacgagtcagaggcaacaatgaattttgcagtaaaatttagagaggaatggaaaaaagttcaaaatgaacaaaaacacaaaaattttggaaacaaaaatgatcaaagacggagatttagctcctctccagaatattcagtggatcataacaattaaatattttcaagaccacaagaaagatgggaaagagggaagaacatacccaaaaacaaattttcgaatagctcaaataactctaatggttcaaattattcaaataaaagttctcctaaatttccttgtcacttttgtgaacagattcactcaccagtattttacaaaacatatcagacggctgaaaaaataattgaaagtattaatgcagcatcatacttaattacccaaccaaataaaatatcagtgttaaaatgtcgatatgtcacaatttataatccattaaataaaaacttagaaaaagggttttagcatttttcgacgatggcagtcgaaaaacttatattgaagaagaattagcaagaagccttaaattaacagtgattggaagacaaaaattagaactttctggtttaggtggagcaaatttgggaaaattcgaaagcccagtagttgaatttggcttaaaagcaagagattttaatatgttaatgattggaagagcaattaaaaaagttttaaaagaaattcccttttggattatcaggaaataaataatcatgaattaaagaaaaataaaatttcagttccatatttactcgatgaaccaaaaattaccatcgggagcgatttttacaattattttgacattagacctattaaacatttaaattctggtttttggatcagcaattctaaaatcggtaaaattttgagtggtgatggaaaagtgacctggacaaatttaaatgacaaaaatgtgaatacaaaggacgaatataacgtatcagccataaactcaagtgcaatacaatgtgaaactgaaataactgatcaagtggaattggacaaaaacaaggaattgattaaattggttagacaacacgacagtttaaatagcgtgggattcggagatttatcagaaaaggaagaaaatatgagagaaaaaatgataaaaaatatttcattcaatggcaaaaggtaccaatcaaagttactttggatagaagaagaggccgaaaaattgcccacgaattttgcaatggcttacagtcaattaaaatcaaatttaaaacggttacgcacaaacccaaaattactccaattatatcataaaacaattttggaacagattaatgaccaaggatcagtggaaataactaatccgttggtggacccaaaccaaaaaggacaaaaaattcattatttaccccatcatggcgtagtgaaagaaactagtgaacacactaaattaaggattgtttacaatgcaagtgctaaaagcggtaaaaacccagccttaaatgaatgcatagaaaaaggcaccaatgaatacaatgatttaaccggcatacaattacgcacgcggttaaaaaaatattttgattggttctgatattgctaaagcatttcatcaaattgaattagcacctgaagaccgaaattgtgtacgttttttgtgggtggaggatccattcgacccaaacagtccattaattcattatcggtttaaaagagtgacttttggtgtcatttgtagccctgcccaattggcattaaccattaaattgcatttagaaaaatataaccaccccattattaagcaattggctcaaaatatttacgttgataatttactagtgggaattaatcacaaaaaggattttcaaatggtttatgaattaattaaaaaggtgtttgctaaagcaggaatgaatgtgcgtgagtttgtgtcgaatgaattaagtgagcttcaaaaactcccaaaggaagaccgaatcgaaaaagaaactgtcaaattgttgggaatttggtggaatgtcaaaaatgacgaatattttataaaaatgccaaaattcgaaccaaataataaacaagaagaaaagtactatctcaaatag

SEQ ID NO: 82004 - DNA, 57 bp, Heterodera glycines; identical to SEQ ID NO: 56798

SEQ ID NO: 82005 - DNA, 946 bp, Heterodera glycines
atggcatttcaagaaaagcttgagaaaaatgtcatggcacaaattgatgtgaaagtgcagacgaaggaagttactgtcaaatagttaagggaaatgagcaatggttaattactgtacctaccgtaacattattattataattactgtcaaatattaataggatttgttccaatttaagttattactgaaaaggcaattttgattgaatcggtgaattgaagggacaacaaaaacaccaaaagcagcaaggggagaaggagacaaaaggcgagttgtaattacaaaattttattaagaaaaaacttcataatttcgaccttttcgcaattttcatgtataacttttttggtaattgtctaatcgcgaagtgatacatagaattagattcgaaacatgttaagctttcgaatgataccaacaatcttggatttggatgacaaagaaaaaagttatagcgaaaaacataaaaaattttgaaaatctgcccacagataacacacaagtacccaaaattgttacaccgccagatttttattttattttttatttttcagtttcgtcatttgagtcctaatgactaagaaatttcagttccgtctctaagattggcttatttttcggaattttcatcacaaaaagtcaaattttgccttaaaaagtgtaaaaagtcatgaaaaagtcacaaaaacgcaaaaaagtcataaaaatcccaaaaaagggtaaaaaagtcaaaaaaagtcacaaaaaatgtatgttagaagtagagtgccacgggaccgggaccgggccgggaattcccggtcatccgaggtcccggttcccggtcccgggttttgaaaagctcaggtcccggtcccggtagggcaaccgggaaccgggaaaaacagcactggtaagaatggggggtctgagtgaaaattagtgaagaaattggagtcaagggaaa

SEQ ID NO: 82006 - DNA, 3912 bp, Heterodera glycines
atgccgaggatccagctgaagaggtgccgccaggcactgttgaaattggccttcgctcacttggtaaaaaatgtttcatattgtacggtaaatgcctaagaatagtgattggaaatactttcctcatcagatcattatttttaattatttttgcacattttcaaggattttctaattcgtgggaaaccatccggaagcactaaaataattttttaccgttaaaattaggaattcacaattcaaagctgaattttgttttgactcacagcttggaatgtaattttgtcggatttttttgacactgaaaaagattgaaaactcgaaaaaatgcggaaaagtgttttaaatgcttttttaactaattaaaatatatgatcaaaaatgtttttttcaatttcattctatgaaagaaatttaattgattttgtaaatgagcagtttaagagcttttccactgaaacttttggttttcaatcaatttagtgcctaacaaagaagccccggacaatcagtccatcactggtcaatcaatcagtggagaaaatccattagcaaaattaaaatttaaaaaaattgcaaggcttttacaatatttccacatattaaattttaaaatcttttatttaatttttttaaaataataaattcttcactaaacaacataaattattattttaagtttttatcaaatttattatattttcataaaattttaaatactcaaagtagggatgtacaaaacttataaatgtactcaattttaattccgagaaaaaatagagcggaccgcgtccggtagcggaaggcgacgcgttggcagcaccgcggcggaccggtcggcaaaggcggcagcagcggcttgcgctgcgggcgaagaggcaagggacgaggtggacaacaacgaggaggagcgacagaacatggcggtggtgacaaaaaggatggcaaatttggtaaaaaaaaatttcaaaattattgtgtatgcttttcgggatttttgtgcttaatacacctaggcgctttttttgtgcctatttcgccatttttggcgcctattttttggattttttatttattaatatttttccttgagaaaagcagcacaaaaacaaaaatctttcactttttaattgtttttttcaatttttgggcaccccttttttatttctattttttaaaggacctggaaacatccggcacaccggcacggattgtcgaaatccctgaaaatgtgacggtggttgagggcgaattggccatcatcaaatgcgtcgtggagggcaacccggcaccgacaattgtgtggaaaaagggcggccgaaaaatgccattgaccgacgaccgagtgcggtgccaaacggacggtgacacgggacatgtaagtggcaatttttaaatgaaatttttaaacacagaaatttaaaaaaactgctgttttttggaaaaaaatttttttgcgaaaaagtcatttatcataaaactgagaaatcactaaaaaaatttttgttttaatttcactaaaattacattttttcataccgtagccctcaaatggaggacaagaaaactttttactgtagttctaatcttggaagggatttttacggcactcaattaattaattaatgtagctcatttatttctaaactaaattcaaaacttagcagtaaatttaataaaaaaaattttatcaaatcctaaaataatgttaaaaatattttatcaaattaaaataatgttaaaaatattgtcaggtttctctgatcatttccaaatgtcggccacaagatgggggcgagtacacattgatggtgaagaacgcgcatggcaagcacaaagttggcgccaagctgcttgtcacgccagcggccgaagtgaaaaaaaattgccagccaaatttaaataataatatttacaaaaaataaatttacagtcaaatttggacttccgggccaagcagaaaaaacgtggcacgggcattagcaattcggaacaggaaaaacagcgccaacggagtgatgccgagcccaaaagcaaggctgaacgacggtgagccaaaaacagctaccaccaaaaaattttgcaccgaattttggaatggtgccaaaaaatcgatgccaaattctgcacttcgcttattttctttttaatttgactgaaatttcaaaaaaaaaatttcagtgccttttctttttttttgatggtgacaaaaatttaaagacatggcaaaagaaattattgaaattcaatttttttgattaaataaaaatcgtgaacggaaaatgggtcagtggaaaatgcgtcagtgaatcaggatttctttaaattgagatacggtagtaatattaccgaaatcacaacttgttttttagggatttgggaaagtttcaattaggtattttgacttttaaaaacttaattgataaaattcagaacaaaattattagacaattttgtccttttgtaataatacaatacttaatgctacagtaactttattttaaaaatactgtattattgacaccttttccactgacgcatttgccaggagccaaaattattattatttttaaaaattaattttcatttaaattatggcacaaaaatttccagcaaacgccaagtgtatgtggtggaggagccccgtgacacatttgttgtgccgttgaactcgcagcatgccaacgaaaaggaaaatgccacttttgaatgcgaagtgaacgacaaggagatcgatgtgaaatggttccatgacggtgccgagatcgggatggacgggcggcactttaaggtgggaaggagggggcaaatctcttgctaatcaaagaatacattcatattttgtgttatgaaagatcaatttaaaaaattgagtaggaggttaaattacctattttgggattcctttaagcccaaaaatccctaagtatggatatttccaaaattcaaaccaaaactagctcaaattcttcaattcaaatgcctatcagaaatttaaaaaatatattagaaaagtcagaaacaaaaccattttttaacaatattttttttaattttatatttttttacattatctaaaatttgtttttatgccaaatttcattttgtttttctattgtgtattttattgatgcttcttgttttacaggaacgggctggatgccgtcgtcgcctgctgatcatcaatgtactcattgaagaccacggggagtacaaatgcacagccaaagacgacgaaacaatggcccaactcattgtgcaccccaaattcgtcaaaaaagcggagcgcaagccggtgaccttctagttcgacgatgagttgtattaaatttttttgtttttcactgttcctgttttatttgtgcccatctcttttttaaactctgtgaattgaagataaaattttattttcctttagttgtcctattttatggtatatcccaaccagggctggccgtgattgaatttccaatcacggaaatccgtgagccgtgatcacggggctttaaaaaaaatccgagatcacggcaccccaaaaactccgtgagccgtgatccttgattaaaaaatttttttctagtgatttttttaatttaaatttatttagaaaaacggaatttaatcgctggaaaaattcctaaaagatattttaaagaaaccaaaacacaatccgctttttttgctgcgtaccttttccaaaaaatgactaagtttacgattttgagcaaattttttgatgaaaattaggcttttgtagaaatctccaaggaaaaattttattttttaactaagtttattaagaaaatttttcaaatttttcttaaatttaaccaaaaatctatttatatagagaaaaaaatcagaaaaatttcctctaatttgtaagctaacttttgatgctgaacaaataaa

SEQ ID NO: 82007 - DNA, 543 bp, Heterodera glycines
atgcattttttgccccctctctcttatctgatcactctgatcgcagattctacgccatcattgacgttcattgaacaaatcgggcgaatggaactggttcagtccattgttcaattcatggaaaaaattggcttaggaacgggcgaaaataataaaaaaagtaaaaataaatacattttaaatatgaaatctaatttttttttaagaaaaacagcgaattgagcgccgaagtgctacaaataaaaatttgaaagaaccatggaatcacccggaagctcttaattagcattattaagctctcaaaaatgacaaagcattgcaggcatgtaaaaaactgtaaattaaaatatgcaaaaattctgacttattagattttcagccgcgaacttttttgatgaattgattaaatgcttagctcagcacttgcttataaatatcttctaacattagagcagggatggcaaattttatgctttttagtttcatttggaaacaaaaacgaagtagaaagcacatacaaaataattatttcacaataataaa

SEQ ID NO: 82008 - DNA, 526 bp, Heterodera glycines
atggcactattaaatgagcatacagtagttagtatttttcaatgcttagctttccttacattcattgttggtgggttgggttgattgcaatttttgttgataattgaattctgtccgctgttgcttggcgctgctgtagctttcggccactattggcgctgccatttggccatgaataattgccataaaaatgattaaatgataataataaaaaatggacatttcgccagcctaaaaagcattcgtttttaaataaatatcgatacagtcatggtcatatgccccataacagctcatggggatgaggtacctatccatagaaaaatagatttcgcaagtattgaaagattatctgggatttttgggtcgctgcatggtgtcacattgtttctgggctatccattggtaccacacattcctcgtttgctttattcctttttgtaaaaatttgtgttttcttccatatagtcaaatttcggggtggtcatatgtttaggaacactacccatattttttttcatcagca

SEQ ID NO: 82009 - DNA, 1333 bp, Heterodera glycines
atggccagaaaaagtcagttttttaggtttttggccaaacttttttgtatctcaactagattttttgaaattttgcaggctattagcgactatcaagcgctttaaaatcacatcaaaattttttaattcgaatgataaataaaaatgttatagcgtttggcgccaaagtgggtactctttaagtttgggtccacattcaaaatttttttttaataagcacgtaaaaaatgtgatgaatttatttctgtttcaaaattgtttttgcgttctttttgctctctcatttttcccaactctctctttttaagttacataacaacagagttttgccttgccttttttgacacaccaatcaattggaaaaagggaaaattgagccacaaaaatgaatcgacggtaaggaattttttttaaattacaaaattttcatttacccatacatttttttacgaatctcagttggctttgtaacgacgtgtggatggacaattctcccatcttttaactatgccaaactcggcctcaaaatggcattgctttccgaccgtttcgatgttttggtggacgcacattttgatggcaaaagcgaattcacaatttggagagcaatcgaaattgaaaaggaggaagggccaaaaccgaaaatgtttatacgaatcgatggcagttttgtggattttccgttgtctgttcgtcagatgcccaacaaaatttgctttaagaacctttggattgagtcagtcttaacttttgtgtacgctaaagcatttttatctttcttcagctacattgaccattccgtgatcaaatttctccgctccaagaagcgattctttgacagaaggggcaccaaattggaagtgtttgtgcattcaatttatacggatgtccaaccaatttgggatgtttttacccgcgaaatttggcctatttttgcgaaaagcattcgccatttgtgctttcctaatgccaatcatttggacaatttgcgtcgtcgcacatcgccgacacttctcactgatcttgatcaattgaatttcattgattctggtggtcttttacccgatggaatttctgacgatgggccaaaagcaactgccggccaagcgttgtccaaatggttgcacacgccgagcaaaaatggaaaagcgaatgaattgtattgctgtgcttatttttgtgaaataacatggatcaacactttcaaggaggtgatcgagctacttaattgttcattaaacgattgactaattattgattgattgcatttgattcgtgaccggaaaatcggtcagtggaaaatgcgtcagtgatacaaatattttaaaataaa

SEQ ID NO: 82010 - DNA, 1470 bp, Heterodera glycines
atggtgcacaaattcccgctaaatttggcctttttctctgtgcccaaatttgtccgcctctttctcctcgtcgttttggcatttcaccgcagcaagccgagtgagtacagactcaaataaatgagaaataaaatttaaatttgtatctgctcaacttagcctcccatacggattttgcccgctccgttctgatccatttcgaaaaccaacaagaattccgcgcactaacataagtatagccaagactttttaagaaaaagcataagaaatcgcatcccatttaaaactgagtaatttaaagacaaaaaatattttattaaaaacccaaaaaataattcacttaaagcggtttttcgtttgatcggctccttatgaaattgttcagatcagaggtgcatttactcggcgaattattccaacgatttgtcggagtccaccaaaggcagcctcgtgtcatttttgcagaaatggggagttgaagaaaagcggcgtataaaaccctgtcaagaaggtgtggcgtgccaaacttaccgttgcaaagacggtaagaaaatgccaattaaaatttaaaaattcaacagatttgttagaaatctatctttagagtccgggtttttgaacttccatttttagaagcttatttggtactatttgagcttggttgaagcttattggattttcaatttttccataattcagagttctcgattttttcttcaatattaaattcaagtttctgaatttttgtccatataatctggtttctcttatatataaaataatagcatgcattatttttggccatttttcaggaaaagatggccacgatttctttttggtcactgcgtgcgcaacgccggacgatctgacggggctccaatgtagccacagagattttgaccccttttgcctggatgggaaaccggactgtaaaacgtgtcgtaaaagggagtgcctcgacccagacagaatgaagttggaggggccgaagaaaggtgagtgattgctcactgatcagtgacaaatgagcaaactgatcagcaaacggaagagcagggaatgaatgatcagaaaagcaaaacactaaaccaaagcaaaaaatcaaatcggaaagacaaacggtgagagattggatttggcctcactaaaaccgcaaaatgtggttaaatgctcaattcgacgacgggcctattctaaaaattaactaatatctttattttaatgatttaaaagaataaaaaactgacatttttcgttcagtttttagaacttattttggcactttgctgttgattaggggtgatacattagtgccaatatttataatatttttggagatttttgtaacacattaaaaccgtaacacagccataacattttttgtgctttattcaaattttttgaattttgttatgctatgtttaaaatagagattatcaagcgctttaaaagggtagggggaaaaataaa

SEQ ID NO: 82011 - DNA, 524 bp, Heterodera glycines
  unsure (1)..(524): unsure at all n locations
atgatagtaagtaaaaataaatagcaaatgggacggatggacgggcaaaaataaagcgacgaagccaaaaaatggaaatggcaatggatggaatgaaagagtgaatcattcattcattcacatttatctgctgatcagataaataaatatgaataattaattaatattccaaatttattatacaattgttaatgttaaatagtcaatgaaaaaattattataattaaaattaattattaaaaatatttagggattccattttaggtaaatgttcgggttgtgcaccgtccgtcagttcttagccaggaatatcgaacggcattcgactcggctgattttagactcctcggatttcggtttcgttacattgttaagaaacgcgtcagcatgctacgaaagggacggttaaaaattgcttttatgcattaaattttcctttgctcngacattttagtctatatacaacagggctgggcgtaactggattttaattanggaatctgtaattacggcgatttcctaaa

SEQ ID NO: 82012 - DNA, 1010 bp, Heterodera glycines
atgaactcagaggcatactgggtatggagcaagaagtaaaattaattatttcgagtcatgctcgtgttttgttgaattttaaaaaattaaattttaaaaaaatttcgagggacaagaacttaattgacaccctaattaagacacagatttttttaatgtgtttgataaattaataaaatcagataagtctaagttaaattataaataaatatgagaaaagcgtccgttttgtataatggaacaattttataaaattattatttaaaatttcacatggtactaaacaaatgggagatttttaaaatgtcgttcaatgaaaggcagactaatgacacaaaaatttgaataaatacacaattgatgatattaagaggtgtaaaattaaagaaaattgatgcttaataatattattcatttatgaatttaaaaaagttagtaacataaaaataaaacttaggaattataaaaattttatttgtattatcttttgatattttaattaacaatatcacccatcaattcaaaagaaacaaatgaataaatagcctgcggaccaaagacaaattgacgagcactcgtgttcagggccataccctggcaaaaaggacgatgaaaaggcaccgaagtggtacctggtcgcccaaattgttgcaaatggcgtggttgcagcacgtgcacagctggcagagcaatggtctgccctaatttgggtggacaacgacattgcccaaaagacttggcccttggaagtcggcgattcggtcaaagtggtcagcgttgaatggacacagacggcaacgggatgggcaagcgccggagattggctgatcatggtcaacaagcgcttgaatcaccaagccgtggccaaggaggtaagtgagtctttccagggacctttcagctcggcggcgtgggagcagttcgaattccttcgggaaggagcattggaagccgttgagcttcgtcccatggtctcaacgcgtgcactgagagaacgagcgaacttctga

SEQ ID NO: 82013 - DNA, 1536 bp, Heterodera glycines
ggaacggcaccggctatcaattatggaattaatggccaaaatgacaaacgaatggcgcaggtgttgtgcatggactgggcgcaggacaaacggcacttggtcagctcctcccaggacggcaaagtgatcgtctgggacgggttcaccaccaacaaagagcacgccctgacaatgcccaccacttgggtgaattcggcacttttccgcccgccattagtctatttctttcccaggtgatggcttgtgcctatgcgccgagtggtcaaatgatcgcctgcggcggtttggacaacaaatgttccgttgtgccgttggacccccaggaggacattctgcagaaaaagcgttctgtcgccactcacacttcgtacatgtcctgttgcactttcatccgttcggacaatttggtaattgctgggtaattaactaatggttgctaattaattgcccatttgtattagcttctgacgggcagcggcgattcaacttgtgcaatggtcggcttttgttgcggtccgaataaaataaaattattttggcattcagtgggacgtggagagcggtcaaatgatccaaaatttccatggccatcttggcgacgtttttgccattgacatccccaagtcggacaccggcaacattttcatttcaggcgtaagaatttggctatttttttgccaagactttcaaaaactcacagggtgccgatcgacatgccctcgtctgggacattcgaaccggacagtgcgtgcagagcttcgagggccatgaggcggacattaacacaattcgcttccaccccaacggcgacgccttcgccacgggctctgacgacgcgtcggtaagcaaaaaagccaaaatttaattgcatttttaatccctttcaaagtgccgtctctacgacctccgagcggaccgccaagtttgcgtttacgagaaagagtccattctgttcccggtaggcttttattggccgatcatttctcgacttctctccctaaggtcaacggagtcgacttttccgttagcggtacggttttagggttttcctttccttttaattccttcctttcgcaggtcgcattttgttcgccggttatggcgattatcgcgtcggcgtttgggacacgttgaaatgtgttcggcaattgattttgtacgggcacgagaatcgcatttcctgtcttcggtgcaggtcgaaaacattgccaattacttatacgaattcgcactaattaattcgctgtgttttcagtccggacggaacggccatttgcacggcgagttggcacgtgaccggaaaacagctattcctttcggacaaatcacttaacatttccgatttgcaatttattggaaatgccaaggacgaaaatgcagttgaaattgaccaatcactttttgaggttacaaaatcagtgattaacaatcatagaaagctgttaaaatttattaaagggcgacatcgattttgacgacgatgatgaggattacaaccccgaggctgatgtcggatcagaagatgaaagcaaataa

SEQ ID NO: 82014 - DNA, 642 bp, Heterodera glycines
gtgatggagtggcggttggccaggcgcgctttcaccgttctgccgatggacaagtggcaacggagtggaccatattcgttgataacggcactgaatctgctcgaccgacaccatgtaaatgtttttgaatccaaactttcatttatttaccacgtttttcggacccaaaaaaattgctgaattctttgcacgaattggccatcgagcacaattgtcccattttactttctgtcgtgctccctattcgacaatttgtcgaattcgacgataaaattgtctccgctggaagaaaacttccgggtgaattttgattttccatgtgttcccattacatttttacatgctttgaagttttaatttagcttcagacattccaacggaaggaacgaccttcgaagcccaagtgaattcgattatccaaattggagcccaatgggttcgaagtgattcggtggacaaaagtacccatttaaaacccaaaaatgattaaaagtgggtttacatatttctcagcttccctatttgtgcgagggcgacttgagccgtgcttattatgtgttggatgatgcggtctttcttctcaatgctatgctttatcagaccaaaggggaacctatgattttcaagtgcaaagtatcttaa

SEQ ID NO: 82015 - DNA, 2450 bp, Heterodera glycines
atgacagggatggtgaggggacaacagttgcgtcagtggtcttcaccaccgtttgccaacgcacccagagacaacacagctgtgccagtggaggcgccgacattcaaccagcgccgcttctacttccactcattcgacaacgacggcaacgacccagtggaccaatttttggattttttgactcatcatgggccaaaaaaggcccacacggtgtgcgtcgcgcacaacggtggcaagtacgacttccatctaatccttgaggcattacatcgccgaaatatgccaccaaagcgcctgtgcacaacggggctcaagatttactccatgcgtctgtcgggacgtaaccaacgacgagtcaccttcaaagacttcatcaattatttcttctgtgaattggatgcgttggtgagaagagctttgacctgccccaccatcaggcgacggttaagcccttcttcccctacctctacattcagcgacaacatctgctgcaacgtcttgagggtcttccagcacgggagttttactcaccagacacgatgaaagcggacaaacgggccaaatttttgcgttgtgcgaaatcctgcgggttctttgcagatacgcaccatcgccacccaccttttcccgtcaaggactgcccattttattgaggcctaccgggacgcatgcgcaaaaaattttggataccttctcatggacatgcacccagagagtccggaagagatccgccttagaacaaatatatatgaacaaaaacaaatagtttacctaccaaaatgaaagggtcacaaataataacaataaataaatgctttttggagacattgtgtaatgccaaaaaggcgaatgcccttattcgagatgcgtccgatgagcaacttttatgtctagtcgaaatctgcctatacattctaaagggccgagtccctttgcgtccccggcatttgaataagctgaaagctcatgcacaggtgcttcgtcgtctcgcccgtacacgttgctcgcgctctgccaaaaaggatttgctacagcacggagatggcctcccagctattgttgggctcattgcatcaattgctcttccgctgattgcggatgtcattgaaaattataaataaggtgtaacaaagtaaaaaataaataaaaaatgcagcatacaaagcgctatttgcttgtccccgaagatatttatcagagtttggcagcaccgccaccgtcagacggtacaccaattgggctggtccgtaacagaattaaacaaatcaaaaacgatgacgccataaatgatgcagaaagggcagtcaaatatgagcaggaacttaagcgtctcaacaagctcgcaaaggacgaggatgaacgtcccgtcggtgttaaattagaaaatttgaatgatgtggttgacgccatgccaaaaccaatcaacattaaaagaccaattgttgttgctacgcgtcgccatctcaaggttgggcgtgcgcgaaaagaaaatgttgaacaattagaagaagatgatgatgaaataccatggccatcgagttcaattaaacgacaacccacccaaacggaaatcttaaaattaatttataaaaacgcccaatctctaggggtgtcggaggaagggcaagttttgagggccggtgggcggccatttataaccagcagtgttgatgacattgttagtcacctgttgaacaaggacaagcgtggccaaaacaaagagccaactgaattcaaagaatttgttgaaagggcacggcagaatccgctcttgagtaggcatttatttcccgaaggtcaatccggcaaaggaaattataaaaacaccccaattaagtttaagccatcattatggatttaaagaaacttcagctcgagtttttgtacaaggacctaagtttgcctgtatcattcacgagcgttgaaccgctgctgagaggcgcggaaaagccaaccaaattaatcggactgatgtccaaaattatttagccacccaacgtacatacacactacatcgtcaggccaagcggcgctaccgtcgattgccaacattggcacttggcttacacactgaatggcaggccgatttggctatttttgaccgacttggtaaacaaaaccgtggctacaaatacttgttagtctgtattgatacccttagtcgacaggtgtttgttgagcccgtaaagaccaagacgagcgctaacatgatcattgcctttgatcgtatattcaaaagatcaaaatatatcccgtggaaggtgttaacagatcagggaaaggaattcactgcccgcgcagtacagcagttcttccgcacaaaagacgttgaacacttttgtatgctcacttcaccccaatttcatgccggaatggccgacgtgcgaatcgtagcatcaaagagcgcctttaccgctactttacggcgcggaacacgtacaagtggatag

SEQ ID NO: 82016 - DNA, 525 bp, Heterodera glycines
atgggacaaaaaagaagagaagaaaaagtgataaaaattgaactaaatgaacgaaatgagaactcacaatcagcagcagttgatcaaatgggtgaagaaatgggaaatgaccgaaatgatcaaatgggaaattacacggatcagaacctttttaaaagtgatcagaatataaatgatcagcaaaagagagaaattgtcaaaaaatttaatgcaattaaagaaaaattacgtgaaaaaggtaaatacaaaagaaaagatcaaagcaaaattgagaggaaaattgcaaaattattaggaacaaatcgaaaattaatacaaaaatggaaaaatgaattgaatttaaataaaaagaaaatgaaaaaacaattatatgatgagaaaaagagagaattcattgaacgatttgatgaatttaaagaattatatggccaaggcaaacagaaagaatttgcgaaaggattaagtatttctgaagcaacatttctaagatggaaaaaagaattgggcaccaaattaccacaaaaa

SEQ ID NO: 82017 - DNA, 290 bp, Heterodera glycines
atgaaatggaaaaaggagcaattaaaaaagaaatacaaaaagagcccaaaaactgcgcaagaatgcaaagtctgtggaagagttgcgcgtttcaagtattacaaaatacagagctgtgatggtaagcgaaaatgtaaattaataattatttatttaaatttaaaattacaattaaaaatttacagaaatttattagtaaataacttttttagcctgtaagcagttttttcggcgtacaattgttgatcagcgaacattcatttgcacgaaatcaaattcatgtgtcataa

SEQ ID NO: 82018 - DNA, 786 bp, Heterodera glycines
atgctatttggaattgatgattgcctcggtaatcatctgcgacacggcgtccgtcccagcaaaaggctgcggttgaccccattggatgccgttgttggcggtgggggccgaagtgatggaggtgtggtgggcgtcaccaaatcgatgtccataccgattctcaccctccacgagtcgttccaccaatttttcgacccgttcgaggattgggataagggtaggattccctgaccctcgagcaatttttcgagtcgttctatacgaacgaggatcacatcttcttaaaaaaaagatttaaaaatttaattagattaaaagagtttaatttaatattaaaaccgtaaaattatatcattattaaaagccgaattactggtaaattaaattaaaataaattttccagtggttctgacttaccttcatttctctgatcgaatgtgccattttcaattaccgtttcctaaaatcaaataataagtaatccaaaatgttactgtatttgcttaaatcttactgtatccatgggacagaatttttcttcattctccttcagctgctgctgaagaaatgcacggcgttcgtaaagcgattggatgattggcttaattccgcactttgttcagcttccacattgttgggtcatgccttcaaacaacacttgtcaagacggcacgcacgaccactcgtcatttcttagccgaaattttaatttattttaatttttatttcattgaatttttacggggtaggaggaggttcgaaagtcatttgggtcaaacgaataaa

SEQ ID NO: 82019 - DNA, 284 bp, Heterodera glycines
atgatatcaatggccaacgttactttgtcatcatttttgtcgtaaaagcgattgctcgggtccattaattccttaattgcccataattaggcgccaattaaggaatgccattttccgcaagtgcaatgaaagaaggcaatccccagcccttaagatgaattgctaaaaattgcattgaatttttcagtccgtttttcgccccactcattcgcgagacaatttggaacgatgtcgaacaaacacagctccaatacggatcgtaaatttgaaataattgtttttta

SEQ ID NO: 82020 - DNA, 373 bp, Heterodera glycines
atgtcagagtttacttcgtccgacggatcagggaaaaggtttgtagttttttttagttttagcaataagaaaaattcttttgctgtaaaatatagtaaatgaaaatcaaatttcgtttttagcgttagcagtaaggtcagtgagtcggaaagctacgacgcgaccacgcttggtaaattgatgaacctcgacgccaaagtggtcgaatggctcgagaaagagccatatacggacgacgatccgctcttggttcttgacttccttggtccgtttaacaatcttcatggcgactacaaccaaaacaaggcctttttggtgcagaagttggtatgtcttaacagcaaattaacatgaaagctggatcaaattcaaa

SEQ ID NO: 82021 - DNA, 2019 bp, Heterodera glycines
atggatgctcgggttctacatgttgattacgtggtggtgggtggcggtgttgcgggtgtttgcgttgttcaagagctgtgcgatttattggaaagggacgaagttgctggcacatcaaaccatcgcatcgtttttatctcaggcgccgaaggattcgttaagcgtgtggccaatcaaagacaggttgagatgtctgttcaagcctgatgcagtcaatctttaaggttggacaggtcacaatggccttcgacgtggagggcattgacccaaatttactttttggcgggtcaagcagaattcaattagttcagacccaacccatccaaaagtaatccgattacgcgacctgcaaacagttaaggaactacaaaaacaactggggaacgccagacgtctgctcattgtcgggaatggcggaattgccaccgaattggcgtaatttaatagacgagaaacttaaattctttcgaatttgtgacaaatttacaattttcttagatttgaattgcgcaacattgaaattgtgtgggcgatacgacattcatcaatttcagcaacttattttggtaatttttcttttcctttttgaaattgtttattaaaaaaggtttagatattgctgcagcaaaattcttcgagtctaaattggcttccgggagactgaagggcgaccagaaatccgaggtccacgctgacaggtccttcattacatttttggagatgtttggtcgattttagttgcctgacttttctataattggttgaagaaaatatgcaaaaccctctaaattattattttaatttgaattgatcaaattgtctttgccagattcactagtttggtggtccaacgcacggacaatgccgaattgaccgccaatgcgtcagacgatgagacactgcgcgagcattttggcgccgcgctgggcccgcattggctggccaaattggagcagaatgagtcgcatgaaaatgttaattattttcggttcttatcacttttgtgaccccccccctgaaatttttatttttagctatcatgagttttgcgtggtgaaattttacgtgcaaaaaatttaaaaaatgtaaagttaaaacatcaggcgggcggcatgaaatctacaatgcagcccaaccatctgatatgagatagtggagccgtgctcaattttttcttcaattacattaagcagagtctctgcagtcataaagcattcacgcgtttcccgacatatccccccaaacacccactgctctggtaaaatgcgtcccacatggtttttgcgttcgaaaacatggcctcgtcgatttcgaccgtcaaattgtttccgcctattttatgttgctgttgttattgtgattgatgatcaactatttataaaacagtgatgcattaactaacaacatttataaacagtctcagattatctttaatccttttaaaatgtctttttcatgccgcccgcctgatgtttgaactttacattttttaaaatttttcacgtaactcacgcaaaactcatgatagctaaaaatgaacgtcatattcgtgttcagcgcataaaaatgccctataaaaaattgttaaaaaaaattttatggggggtcacaaaagggattagaacctcattttcaatcgtattatcgccactttcattgctttttcaatttcagtccgttcgaaaagtacacgtcatttccgatgtggaactgattgggctgagtgaccaaaggccatcatcattcgccatcgattcggccgtttctttctgtgaacttccttcacattttcttggtgcccaaacggattggccattgtgggcacaattgagcaacggagagcgatggttgggatgtgatctgatcgtcgatgccagcggagtggtcccaaactctgaccaatggaagagcgattgtccagaggttgtgccgctgtgcttatcgccagaaaatgtgccacaatttgttctaagctttctcttgccgaagattatggcattctggtcaacgaacagatga

SEQ ID NO: 82022 - DNA, 424 bp, Heterodera glycines
ctgaactaattgaattctgcttgacccgccaaaaagtaaatttgggtcaatgccctccacgtcgaaggccattgtgacctgtccaaccttaaagattgactgcatcaggcttgaacagacatctcaacctgtctttgattggccacacgcttaacgaatccttcggcgcctgagataaaaacgatgcgatggtttgatgtgccagcaacttcgtccctttccaataaatcgcacagctcttgaacaacgcaaacacccgcaacaccgccacccaccaccacgtaatcaacatgtagaacccgagcatccataataaagtgtacaagtaattcttcgatatttttggaacctggaaatagggttagacaaatcgggtccgggtaaagatatttacacgattctgtattgactgggtccaaaagca

SEQ ID NO: 82023 - DNA, 356 bp, Heterodera glycines
atgtccgtgtttagcagttcggattctgcgacttggtaaaattgattagaatataataaatcgttaccaagttatggtttttcagcggggtacctaaaactatggatgtaccaaatacctttgtctcaacaaataaaaaaaattttgtttctagcagcaacagtgaggcgtttttcgaaagtgcggaagagctcggggaagccttggatctccatcccgatgttattaaatatctaaaggaagcgccgcgttcggatgaggacccgattttggtgcttgattacaccgatttgttcaatggccttcaaggcactctcaaggacaacaaaacctgggtggcgaatctcctggtatga

SEQ ID NO: 82024 - DNA, 826 bp, Heterodera glycines
atggagcaactttccgaaatttatgcaattcgcgcacttttgcgtcattattggaagaagggcaccaatgccgaggagacagtgcgcaaaatttgtgccgtcgaaggaccaaatgttgttgacattgaaacggcacacaattggttcagttggtttgagtctggccacctaacacttgaaccaaagaaaacaatgtaaaattaaaatttatttttcacgaatttgtacagaattttgggtagaatgtcaaattttttggcagcctatatctggattccatgttggacctggacctagatttcctggacaaaaaccctggaaacgccaggtccaggaaaaatccaggcttttcgaggcatggacctgattttttaaaaatttttttgaaaaagcaaacaaatgttaaaaaaaatcaattaattgctttggaacatataaaaatatttaattgaaaataacattttgtttttaaattttttaataattttttgaaaaacttaaaaatacatcggtcagatgaaataaaaattctaaaactttgcccaggaaatcaagcttttttcatatttgacatggatctggatatcctggataaaaatccctgaaaatccaggtccagaaaaaatctaggatgccgaaaaaagttatccattgcagttggcttcccagcgaaacttgggacgaggtgttcaaatttgtgccattctctgacttacaccaacacgtccaaatgacttgccaacgtttctgggcactgtctgaacccattctcaacagactgtgcccacgtgtcgcaaaacccataaaaatttgttgggaaagcgaa

SEQ ID NO: 82025 - DNA, 471 bp, Heterodera glycines
atgacttttgtcaagactacagtggaagcattgaaacaactccagacctcttttacctccgaccaaatgccaatttttaataccctaattaccactttgtcctctcaaattgacctgcttaatggatcgatttcccaactccgctccactgctctctccactgaaggcatgccaatttcagcggaggaattggaaagacagagaagtgtcgtcattattggcatgccagagcacaacgacagttcaccagcaaagcgggcagagatggaccggtcaaaaatcaattgcttattcgattcgctggggatcgaatgcggtaccattgcctatcgcatgggtcgttcctttaacccagcccaaaaaagtcctcgcccattgaaaattctcttgccttcccgtggcttccaaaaacaggctctcgctggggcaagattggattgtgtatgctgggaacgttattttgagagatga

SEQ ID NO: 82026 - DNA, 378 bp, Heterodera glycines
gcttcaggaattcctttgttttcgttctttcttttcatttgcactgtccgacggattggaaaatgatcaccgatatgcaattgggtattcattcatcctttggcatttgcttgttcctttcattttttgctgcttaggtatcatggccaatgttctcggcgtctccattttcattttggtcattttctaccattacatcgtcgccaaccaaaagaaacagtcgccgcagtgagcgaaagaagcgaagaaaacgccgaagaaagtcaaatgatttgatgggttatgattaattaattaatttatgtattaattgagagggacggcgcataaatttgtaattgattcattgtaaagagaaaacaaagttaattacacaaa

SEQ ID NO: 82027 - DNA, 1834 bp, Heterodera glycines
atgagagtaaatgttggcatagtgtcttatccgaaaatgtgaaatctctcggattttatacacatacctatttcaaaattccatattggcccttcatccaaaccctaaaattgtccctgaaattcaattgctatgaaaaatttgccgcccgaacttttgagtgaaatgaccctttacatattgtacccaaacaaaaattttccgaacattttttcttcttcctggttactcagggaatttctgattccccatgtcactaaacgcaaggaaatatttaaaaaagtgcgttacatattagaaatagaaaagggttttggtcaaattctgacccatttatatccgatttattcagcgccggaatgaactcgaacgattgtataatggtgcaagacaagagccaatttggctctgtatcgtgtcatcaactgggccagaaaaacaaaaacagactatcgacaacttccttttttatcttgaagaatacctcgtaagtattgattggtacactttaccaaatatttaaccaatttttcaacaaaattcagaattaccccatttcaaatcgaccaaccgtggaagaagagaaggtcagttaggggtgtagaaataatgtaaatgtccataaattgatttaaggaattgtccgaccgattcctattactggtcaagttcttctaccattgtgaagaaacaattgcctggaagtatctcaaaaccaccacttctcgcaccgttcagcaatttcttgatgagctcagctcattcttcgctttggtatgcgcattatttgacccgattattctttgcattctccaactaatttataggtctttgatttgtcacccgaacattcgcaacaccagcagcaaagtgaccacgaggtttacgcaaattttgaacccacttattcttctccacttttgctaaattgcgtttactttaggcggtgccaactgatcagaccagttcggccgattcggaccttcgtcctctgcccgttgtcaccgagtcggtgccggtgagtcaatagcagttactgaaaaaatgtaaaaccctaacaattttaggaagaatcgatttacgatccgccttgggacgaccgccctctgcgtttcatcaaaaccatggctgctttgcaatcgcaccgatcaacaaatgtaattgatatctctcttatctttagttgctttttaaatgttctcaattaatagcaaatttatttttcttttattgcatttttgataaattgtgtttattttaggtgctgcccactgttccctcaacatcggccgattcggaccctcgtcctctgcccgttgtcaccgagtcggtgccggtgagtcaacagcagtttcctcaattgcaaaattttagaaaaattttcaattttgaaaacagcctttgtaaagtgtaaaaatgtttatctgttgaacaatggataattttgaatttgttttggacccgggcccagccattttatggccgtcttgtttttattgaatcgcagtgtaatttttaatctttcttttcgactttattaaaatcgctcattttattttagacatccgatcttactgcccttttcgcggagtttttgcgcaccaactgtgttggacatgtgcccaaagagtttcttgtcaaccatctggaggaggccatcaaaattttgaaccttggcggcggacaaagcgacgacaattccaaaatgtccaagtttcgcaaggtattacgttccatgtgccttctaataattgaatcggatcgggcccagtgtgtttttaccgggtcgccgtgtgtcacttttttggatcaatcaccgggaagggacttctag

SEQ ID NO: 82028 - DNA, 1061 bp, Heterodera glycines
gaaacaattaacttagattgtcctccacaacttgtgccggtgcctggcgaaggcgctataccctacagatattgctctccgtcggcaccaattaacgatggcattcaggtccgggacatattatatttataatagtatttttttaatgtttaaattgtatttttaatagaataatcacatataataatacatatttgaaaaagggatgcggtataaacagacattgccaatactcaacaacactcgaacgctacatttgttgcggacttgagagcgatgtccgactaccaagtagccggggggggtttatcggtggggggcaattcggtttccgcttttaggaaaccataacttttttctttgatgacttataagactaaaaaaagttatgacatgcggcgccaaaaagccaagtaaaatcaattttttgagcttttttggccataacttttttgtaaagcgacccaattttttttactaataaacagaaaattaagaaaaaaaatgggaaatgaatgattctctttaaaattctacttaaaattttttaaatttaacagaaatctctagtgaaaggacatcttttttttctgaaacaagttgtcaccagaaattttaattttgtttttaaaaatatgctgtattcttggaaagcttaatattttcaaattacctgtaaattgtttggtacaaatgttgattatgcttggcaatgcaaatgtccatgcctgcggcgcaaataatgcgcgaaaaattaaaaaaagctgtctcattaagtattttaaattgaatgcatagtgaattttcagatgtatgtccgcctcaaccagcaaatcttgttcccgttgaattggccggtaactaccgtacctgtaatccatacgccaggtccggtaccccacaggtcagtgattcctttcttcttatttattttcttcacattattttaacgcgtttttaaatcaagaatttttgaatttttaaggcctgcccagagaattctgcatgtctgtacacaggccaagacaatggctttatatgttgccgagtgcagctgcaaa

SEQ ID NO: 82029 - DNA, 763 bp, Heterodera glycines
atgcaaaattattttctgttacctcttttgcctctttaccacgataatgggctcagaataatgcacgaaaaactgagaaacccaattttggacactttgacgcaactgcaaaatgccattggaaaagaaaaaaaagcgaggtaaaaatggaaatatataatttaaaaataaaaaacaaaaaaaaattaaaaataaataaaaatttaaatgaagggaacaaaaaatgaatgcgatacagccgagcagcagaatgaacaacgtagaaataagcaataaatgcacgaattttgtggtgatggccaacaaaacggggagaaaaagtcaagaaaacaattcaaaaaaagaaaatgaaccaaatgaattagaattaaatttcctggaaaatattggtgttggagcgcagaaaaaagtaaaaatccaataaaaatgatgaatagggatcgggtttttcgaccgtaaccttggcattttgtctgaatttcttcataaaaatgaaagaaatgcaaaaaatgttccctttttaaccaattttaagcccacaaaatttgaaagaaatttttaggtacaatttttaatttattggccaaaaatatgtggaaaaaaagttaaacttcattcatttaagacacaaaaaagtgtttacatgagagaatggcacgacaaatatttggaggacatgaaaaaagtgttgggacagaagcgaactcagccgcgaaatctgttgacagagcaaaagtacaaaagtctaatggaaaaagtgaag

SEQ ID NO: 82030 - DNA, 1761 bp, Heterodera glycines
atgcccacggaggatgactttttcggcatcaaatcgctcgattccatgccattgccacaattatatcagcacagagcaaaagtgccaaaatcgaccttcaaacggcgagagcaaagcggcggacgaagcgatgaggctgatgtgttcgaagcgcatttcttcccggaattatcggaaaaggaggagcaggaaaaaatggatgggaaaaacggtgccgacactgatgctcaaacattcattgaggaacagttcttcccgcgaaggtgccacgagaaaaattggcattcacaattaaaaaagcgtcgccaacttttgaaatttctagattcgacattttgaaaaaagtctttttttttaaattttttttttaatattccatgttggacctggattttctgggcaaaagtacaggcatagaaaaaatccaggctgccgaaaaatgactatagaatctaaaactgcgagtcaggacagtacgagtacagccagtgatagacacacctttttcgaaattttttttggcaatcctgaagaatgggggtttctatttttattttttttttaatttgtgctcaaaagggtccggaattggggaaatccaagttcagattcgtaatcatcaccctcgaaacccccattccttcgtgcatttggttgaattttgaaaattttgagatttagacttacctattaggtattgaattcggggtccagggttcggaatcatatcatattaaacgtatgtcagattcgtgttcaacgaccccttaaacctcctagaaacacatgacttttcaaaaattaaaaattaaaaaacgcccgagttgggctgcttccgttttgacgtaaaaatggagggggtcaaccatttttttgttgcaaaaagagggttcaatggtgcaaatcggcttactttttgaggctaaattaaaaaatttccttgaaaacttcgttttcgagggattttccattgaaattccaattttcttttttgcatcccgttttttcagagttcaacaacaacaacaaatgatgccgccattggacagtccaccaatgacaacaacagaaattgacacagcagaagcagatgatgctgctgaactgttcgagctgaaccagtctgacgggaccagcggcatcaaacagttgtgggctttgatagacccaatttggaaatttgaccgtgccgaattggtcgactgcatggcaaaacgggtcatctacgagactggtgatagctacttgttccatgattttcgtatatataaaagacagaaaaattttctgctcccctctgcaacttttcgctctttaaggcaattgagggccaagtgtccaccttttcaaaatctcaaaatttgaaaaagagttgatgaaacacattttagggattatcggggtcgttaaacgtgaatctcacattcaattccgaccaattctgcacccctaatccggattataataagccgaaaaattcagagagtataaatgtgaatatgaaattgaatcgagcccgaaaatccctaaaaatgtattatgaaattctgtaaagtttaatttatatttttttcgaaaaagtgggagggggtaccacctagaatggccatgatttttaaaaaacgttcgggatttgtatttgcgttttatttatttgattttttttgcctttcagatgaccttatcgcactggacaaaccattccaaatggcattttcgtcgggcccggatgaccagccccaacttgacaggattttacag

SEQ ID NO: 82031 - DNA, 2499 bp, Heterodera glycines
atgcaggggcacgaggccgatatcaccatcgtcacgacgacagtcaccaagcagcaacagttcagcaattggcaacgggccaatttttcaaaggatcgtaagagtgaattttggggtgatgcccaaagggtgaatgttgccctttcccgtggaaaacatggactaattgtaataggcgactttcttgaattgggaggcagcccaatttggtccagatttctgaataaggccattgagtttacggtggtaacatccccgtccgttgttaagtccatcaaaagcccgagttcgagctacgtccgtggacttttagtcgatgattctggtgagtcagtccagaactatcgttttcatgctgattggttggcacccggtcgttcgtcttcaaccgcggctgttctgtctcgaaatgggaggccattgaacgatttaaatcgaccaaataatctcaatttccaaaattctcctatcagccaatccagggacatctccaatccgccacttccttctcgtcatgttcagcgcgaattttcacgaactcgtgccgaaattcgatgttggcgttgtaaccagccaggtcatgtctccactcgttgcaccaatccaccagcacggcagaactgagagtttgtggacaaactcaaaagaaggagggacgtgtgaggcacagagacggaatatgattataagcgatcatcgatcactttgttgtctttttccccgcccctttcgcttccttttcccgttctccccgttctcgcggcagtcagtcaagggggggctaaagagtcgagagcgatagagcgagatgggctttttgcgatgggattttcaacttatttatcggctaataaatgatatctgttttactccttcttggcatttctccatacgcatccaatcagtcgcgcgacccggggatcccaattcggggaggccattaatccagggcccggatcattggctcgttcatccctttcccccgaatacgatgtcccctttcgtagcacatttcaatgttgtatgtgccaaaattggacgcagaaatggttggcaagaaacaataagcattaaaaaagttgttttttcataaattttcgtaaatatttaaaaatcacacacagtccaaggggtgcgtagagggccgggggaggcagggtgaaaaacgaaaatttgttttctcggcggacacctctcacctctttccccgttgaaaagttagaattttttggacaaaatcactactacatcgtcggacccactttccaatgcttttttttcttgaattcattgttgcgtgctgagaatgagttaaaaattggaaaacattggcaacaactcatgacaactcatacaaaagacaatttaattttaaaaaattaaaaagaaaatctttcctattaaaaaatattgtaaaatgttaaaatgaaagatgaaactagtctattctttgataggtcccttgttgtacgagttgtcatgtcaaaattggatagtcctaagatcctctattagcatgcaaaatttcaaaaaattccgtctggtttcaaaaaatttatagccaaaaatgtttagaaaaccaactttttaaaattttctggccataaccttttttaaacataatgaaattttttgaagctttgcagcctactagaggataactaaggcttacgaatgataccaagaatgtttaataatggatgattttagaaaaattttcaggtacatcgatcattccgtcatcgcttttcttcgttcaaatcaccaaaatttcgacaaaagaggaccgacttatatttgtggattccatcatcacacatcatggatgtacagccaatttgggacatttttgtgcgtgatatttggcccattttttcgacaaacattcgccatttacgctttaacatggtgatcagttggacaattttcttcgtcgcacttcgccgaccattatcactgatctcaatcagttgaattcaatcgattcatatggtctgttgcccgaggcaattgcgattggtgacgattttgcacacaccgagaaaagatggccaacccaagcgattgtgttgcacacttttgaacgacaagtgtacttcgattgggtcaacaatttcaagaaggtatggtcccatatttttttgcatattactgattttgactacttctatttttattttccaaattgtttagcaatttctccgtgccaatgccatttcttccgtcagttaccaaattcattttactgttcatgcgccatcaattgtgacatttgaattggtgaacgaatggacaaaggaaaagctgacattggccaaagcaaaggaattggacaaccgatggataatgaaacgatgcaaaattggggaggccgtgacggttcagcagcagaagaacgatgaaaattgggataacaattgtaacaatgtgttctttttgcttttagtggcactaattgtgtcgggatcttcggaaaatccttaacaaaaatgcaataaa

SEQ ID NO: 82032 - DNA, 231 bp, Heterodera glycines
ttgctttagtgacgtcatcgggcgaccattcgccgccggcggttgtctcagcgaatgttgcaaaggtgggaaggaaaccttaattatttcacaaatgccatttaatttcaggaagtgcctaattcgcagcaacaaaatgattgggatgccaaagtttgccacaaagacatcgaaatcattggggaaaagcaattgacgatcaattgcaagggcaacagatttggtatttaa

SEQ ID NO: 82033 - DNA, 57 bp, Heterodera glycines; identical to SEQ ID NO: 78091

SEQ ID NO: 82034 - DNA, 102 bp, Heterodera glycines
atggtctttcggctcggcctcctcctcgtccttctcatttgccttgtccacatggccagctcaaaaattgccgaggacgactattgtggagtggaagataat

SEQ ID NO: 82035 - DNA, 438 bp, Heterodera glycines
atgtccattttggtccccggaaaaatccttagccgttttcacattgcccaatcgctgcacgaagttgaaaaatggatagcgccggaagcgattccgatcggatatggcgggaagagagtggtggaaggagccgaccttccgacggggtgcaacagaccgacggagtacggcaaaggggactatctggtgagtggtgctggacggaagttacaattcaataaagccgccctaaaaatggcattcgtcggtgctaattttgccatttatcacagacggatggaatggtgtgggagagatttggagtgggcaaagtgaattatgagcaaagcgtcgtcggagtgggcgacagttggacacgcgaactgagggccaaagctggtcaaatgctcgtttacgaatactttgccaatcgcaacttcgaaattacagtcgaaaatg

SEQ ID NO: 82036 - DNA, 1259 bp, Heterodera glycines
atgtacatccgagagttagaatctccagatgagcactccctggttttattcaatccgcttcgttcttgctttcgtcctactagagatgttcgagaataatgaaatttgattttttaggctaaaagattgttatagttgaggaagaaataattttaaatttttaactacatacttagtttcggataatgggtttggacatcaatgaaatcagaaaaatctaggaattgttttcggcaattgcctgtcagcgacgctctatcgcccgtctggacactgaaagggcccgattccgtcgtttgaacggagctcagttccgtgtggttgtgcgattgtcaggttatttttaaaacgatatccaattttagcagtttaatggtgaacaaaccgcgcgcattgtcagctcaccctttgttttcattgtttgaaaattaaacaaaaagattaaaccagggggtcgtcggggcttctgatcacgaatatgaatatcggatttgcaattatttatttaccatagtttatatcatatatttagaaattttgacaaatctaattaattattgaccctaaatctatgcttttcaaaatcactgattttcaaatcaatgttattagtgcgtgatcagaagccccgaaatccccagcagcggggttggtctttatcgataacagaaaattatttttatcgagcccatatccattatgccttaaaaagtagttaaatttatatcttacggaaaattcctcgatttaggaggcttcttgccaaactttgctgctgttatgccacagcaacagaacggtgggttgtcatttcccttcgttttaccaatctgctcatttttggcacattttagtggtcaatgttgctgctgttctcgccaatgccaatcccaatggacagaattataacgtatgtttttatttcttaccttattaaagaaacagcggggaataaaggcggaccgggaacccattagttcttaatcgcgttctcggctaatttagacagggtcccgattccggcgtaataacaattttttaaaagtttctggtttgggaaatttggattctccaatacaaagaaagttcagcaaatcctatttattttttcttttacaacccatgtaaaccagctgaaatttagcgcttgcagcgtttgcatgcggaattatcggagaccatcgcccgtttaactgtagaaatttctcagttgggatacatgtatgagcaattgaccgagcgtcttgaacatctcacgg

SEQ ID NO: 82037 - DNA, 805 bp, Heterodera glycines
atggcactgatggacatgaccatggacccggtggtgatggcggccgtgaccatttccatcggcttcagcgtggacatgccggtgagtgtttttatggaggatgttgatcagccagccattttaatgaacaacgatcggtttttcaagtgatcaataaaagtgtccattttccaaaacaatcaataaccgatcccttgccagttaattgataatgaccgatttccaacaaatcagtaacctatttgcctccccagctgatcacaataaccgatcaatttttggccagccgatcaataattgccggctctactttttaggcccatgtttcgtatcatttccatgccgccaaatgggccggcactttgggtggcaagtggcaaaaatgtgcacggcattgccgaccaaagtgttgaacacaaaattcggcatgccttcacctctgtcggcttcccggcctttcaagcatccatttgtaagcagattgttggatggccggaaaatttgccctcgggatatatgcggcatggaaattattctttttgggccaataaaataaattagccccaagaaaaatttgccaaattttaggggcaaaattattattaaaaattttccaaaatcttggaaaatgaaaaggttgatattttttttattaatttcccaacagatctcaacaaaaaaacgcgaattttttccgctgacgtctgtcaaaattttacatttttcgtagtttttttccaaaattttgcgggtaggcctgagggagggggggggggctatacattccatttagttgctaaataaa

SEQ ID NO: 82038 - DNA, 2973 bp, Heterodera glycines
tatccgcttaaattgttgtcaggttatttgatgggctgaatgaggaaccatatggattattgcctctcgttaatttgatgggaaaaggcgggccaacatcagtaaaatcagtgcaaagaataggtgttttttaacaaactaataaataaattttttaataaatttaaattatattgaaaataaattgattaaagcaaaatttaaatatttaaaaaaaaggttcttatcaatggcgacttgaggacgatgagccggttattcttgtgcccgggatgccattggagtcattttactgggcgggtgggagactgaagcaggacggtaagccaaataaacgaatttcacatgtgccagatgttttcggcacagtgtactgattttgacaaaaaataaaataaaatttattgcgatttgctaaaaaatttcggggagtcgaatcaagaaaacgaagttcgactcgagaacattaaacaaaaccgaccgagacactacagccattttttttattggccaaagattatcggcaaaatccatacattaaattattttaaggcatggtaaagtacatacattaaatttgcaattaattggttgtataaaaatcaaagacaattaaaaatagagttgctatttgtgtcaattttgaattttcaggtggcgttgtgatttacaatgtgaaccatttaaaggtgcgcgatggtcagttggactcggcaatacttgcggcaaaattgtttggcaccaaagcaaaaaaggaagtgggtaatttttgcttttagagtaattggagagctatgaatttatatttgtggagggatttttgaattttttaaaattaaagtttttcaaactaccgaatttcttgaaatagagccccgggggctttgtttttaaccctcctcaaaaaggggggctttattacagggaggctctattttcataaaaaatccgggtaataattattttttcacaaaaaacaaatgcacagactactggattttataattgttactttttatataatatattttatttctttgtattaaatttaaaattatttgtagattaattttgacgagttcgatatcatcacaggtattattatgcagaaacaaatataattttcgaaaaatatactatactgcttcgcatatattatatgtgtccattcagatgcgataaatttgcaaaagatttttgcgtttgcccaagaagtaagtgatgggtgacaacggccgaaggaataaatttttcattgaaaaatattaaaattataatttaatattcaatatatcaaatgttatttaatataattatacatcgagagtgttcatattcatttatcgtgaaatatttattaaattctatttcgacataatttatgaagagtataaacaatgaaaattggggcccaatttccaaaaatttctccgttttatttgaataaataattttgttaaatttcaattttaggctggcgaaggactcttccgcattgattgcgaacgtgtcagtatttaaaaaaaaacattttaagggaatatatttattttttcccctaaaggtaggtaaaacaatgctgatgtcaagaatggaagcgtcggacctgatggaagtgagttgattggttggtctacagcgtgtccatgcattgctgctcgagattctcggcttagagaaatctcggtacttatccgttatgccgcaccccgcgcaaaaaaagtcattgttctgacatgtcaaaacaatttttctagtgtagttttaggcgctgaacaaaaattttattatacatttgactaccagatttttgattagcgcttacaaattagaacaaccacagaaaattgttttcatttgtcgggattatggcacttttttggggggggggggagggcataacgaaaagtaccgaaatttctttgtttttgagctctcaacacgttggttaagtctcaagagcagccagcccattatttaatcaatcaatagtaatgggcgagatctctggttagcgattttcgtgaaattctgatttttttgagttttctcctcacttcccaggggtcattattatattccggtccaagttccatgaaatatttctgactatagcatactgtatttgtagattggccacatgacctttgatcagggattaaaggcaaaaatggcgaaaccccgttccaagcactgtacaggaccgttctttcaacttgtcaggcaaaatttttttacagaattgtttaaaataattaaattatttattattttttagttttcaatttggccaattcaaaattttagtgagttttttaataattctaaaattccgtctcctttttaaggcccgttatgaagttgattgtgcagattttgcagccgcaaaagcgtaaaaaaattatcattttcatattctgaatataaatttttttggtaaaacagggaaccattccaagaaagtgaagaattgccacaaaaacaacaatttgaaggtagaaaatatattaaatttaatcggattaaaatttgactaaattagaaaaaaattattttggttccagaaaattcctcaattggttacatcgagtttggacaggttccgtcaaatttgccactccaattggtcaccacatacccacaaggagccggattcccgtttgtcattgttataaattataatttaaataattcaaaaaagatttttttttgacataatttgaaaaataattaaattaaaaaaaaattatttttttaacaaaatttaaataataattaaattgtaaacaattttagattctttacttggggacagatgtgagtttttaacaaatgccataactcatttttcactaattgtgcctattttgaaggttttttacaagtgctgaccaagaagtggtcggctttttcaaaggcaatggagacttcagcaaaccagccttttacgggctaaacgacatctccaaattg

SEQ ID NO: 82039 - DNA, 2164 bp, Heterodera glycines
atgaagcattttcgcaccaaccatctgccgaagaaacacttggctatcgtcccggaacgcggctacgacaacgcccaaaaccagtcgttgctggcacttcgcttctttcattggtatgcggaggagcatggtgttgtggtgcagacggcgcattcggctggcggagagaagaaaattggccaatattccgtggatggctgggtggaggaagaaagaagggccattgaagtgaatggatgcgtgtggcacggctgcaatgaatgcttccccaatgacaacatgttgatgccaaatggaaaaacggctggagaggtgcgagagcgggatgagaagcggctggaattcatcgaaagtcaagtgtcacgagtggacgtatactgggaatgccaaattaaaagaatgctgaaccgtgacccggacatgcgcgaaagttttggtgattatgtggatgatggcccgttggacattcgcgaggcgttcatgggtggaagaacaggaccactgaagctgtaccacaaggcgggagagggcgagaaaatctcgtactatgactttacgtccctctacccgtacgtaaagtgagttttgtttcgatcattattcacaatttataattttttatttccagtttctccaccacttacccgattgaacacccaaaagtgctcatcttgaatgaaaatgtggagtggacaagcgcacgcgacaacccctacaaattgtcgttgctcaaggtttgggtgattccgccgcgaaagtgtgatgtgccagtactacccgtcaaagtcaacaaacggctctgttttccgttgtgcatgcagtgttgtctagactacccaaagggaggcgttgattttgactaccaatgtgaacacgacgaccaacaacgcggatgggtgacaacatgcacatcaattgaattggacgcagcacttgaagagggctaccgcgtgaccaaagtgttccgggtgctgaagtacaggcatggcgacgacaagctattccgcccatacatcgccgagttcatgtcgcagaaaattgaagcttccggatttgacgccagcatcaagggaaatgaagagttggagcagcagttcatcacagaatgtgcggagaaattcggaatttcaatcgacaaggacaacatgaaagtgaacaagggcaagcggtcgttggcaaagctgtgtctcaacaatctgtgggggcgcttctcattgcgaaactttggccttgcccagacgttgatcaccgacgacccttcggtgttgactgaatacgtggaaaacagttcaatcgacatcatttccattgatgagctggacgaaaaacatcaattgatcagctacgtccagaagaaggagtgggtggaggagcacgagtgctccaacattggtgagattttttcaataatttttgtataattttgggatttttcagtcatctcactctggacaacatcaaaggcccgccttctgctgttgaaagcgatgcagaaggtggtgagaacgcctggatgtcggttgctctacactgacaccgactcgctgattttcgtccacccgatcggcatgaacccgttggagacaggaccacacttgggacaattcaccgatgaataccccaagcatgaaattgtggagtattgtagtggcggagcgaagcaggttaatttaccgtttatttagtgcataataatttatactttatcatttcagtatggactcaaactccggcgtaatgggcaggacgaatttgtgctgaagcttaggggcatcacactgaactacgacgtgatgcagaaccagtccctatgctacgacacattcaaagaagaagtgttgcggtatgcccaaaccggagagtatgagccaataaatgtgatgtacccaaactttttgagacccgacattaggggtggcggacacgtcacttcaggccccctccaaaaatgttatcgcccatatgtaggcaaagggatagtgggccctaattatgatgttctcaattttggacacactttgtaaatttatcgttcatcattcattgtatcactctcacacacacacaccccatacacacgtacccacacatgtaccacctttgtttttcatgttttataccaaaaattgtgtaattttgtcattttatttgcgtttttaataaa

SEQ ID NO: 82040 - DNA, 956 bp, Heterodera glycines
atgtttattcgaaatattatttttattgaccatctaatgtcgagattattaaaaattattacaatagatggaaattttacaagttaccgaggtgggtgatagtttaattatatatatatgggttaatgtactttgataataaattaattagtgtataaaagtgttgtaatgtattcgttaaatatctgtatgtctaattattgcaagttttttgtgtaatgttaattaagaaacaataatcactaaatgtaggaaaatgacaattctttgaccaatatgtttttttacagaggaatttatgacgagggttagaaatcttattaattaattatgacaaattacaaagaatgtttgtagtgatgtatgatatgggggctaattgttgtgacaatttatgaaccaattatttttgattgaagtgttttatatagggatttttttatagtatgtgtgatgtttttaaaacttatgtgattaattatttcaaattaccgagaatgacttgtaatatttttattagttgtaaaagaatgttaattaataatgagtcgtaaattattttgtgtaatatagctaaaaatcaattaatcattcaaaggcggaacaatgtttggtgagatgcttttacaattatttagtatggttaaattactaagattttctggtagtgtatgtatggtatctgtattaattgtaattttagacctaattgttccttaattttttactaattgaagattttatgcagaaagaagggttataatgaaattatatctatgaagcataatattggaatctgagaatatagtcatcaacttcaacagatttacatatgtttcagtagagtgaaatttataaattatgattaattaaggaagggagtgtataagtcataaaaaataactagcaaaaatattgtagagtgaataagacaaaaggaagtgacgaataataaa

SEQ ID NO: 82041 - DNA, 824 bp, Heterodera glycines
atggttattgtctatcgaccttacgtcagtcgttggcgccgagcatggacagttatcaaggcaaagcctcgtttctggctcaaatattatccagaattttctgcgggctggtatatgctggttccatcggtcattatttgtctcggaacaaggttctattttggcgggtatccaaacaacttcggcatgggctggaacggtaaggttttctctatggatatgcctgagtcatcaatattatttgtttgttttttgtaaatttcaacagtccttttttattttttgaatttactcattgaattctaaatttttgaacaccattaacaccttttttgagggtgaaaaaccaactttgcgcatttcaccattccaatttcagaaaaacccttctatcgtcagtttttcgaggtgcgtcgtcccgatgatccattggttctcaaatggcgtcttcctgaggttctgcatcttttgtttcatttttaaattgtccctccaggaatatcccgctcgtttccaaaccaaccgtcagtccgactactaccctactaccgctcacaacaaacactacgcctgggacgtgaaataactgcgtgtcgagcgaacagcgaacgacaagaaaaaaacatgcacatttattttatgttacgtttaggaatgacactgtaaaatgttctgccaatgtttttccattttaactatcgtggaggggggggggggtaaggatgtgtgttggagctgcttgtcaaacgttgaatcatttggcacttttgtagttgattcacggtaacagccccaaaagaggtcgaaaaacttaaaaaaataaa

SEQ ID NO: 82042 - DNA, 785 bp, Heterodera glycines
atggcttctgaaaagtttctcaagctcagttggcacccgcttcagtccctcttttttgctgcaactatttccgtgtctcattttacgccctccccgccattgttcagagagctcgtcgacgacagcagggcgcctcaaccaacaacagacggaccgcgccagtgcgtggtcgaagcagcgcccgagcgcgtgtgagtgcagcggtgcgccgcgcgtcacgtcggcaggggaacaacaacgacggcaacgcgaccaggacgaggaagaagcgcggctcggcaatgcgtcgtccgctcaagctcaaaccgctccttggacgaccgaagggatagcgtaaatcgagggcagcgccgcgcactgctggacaaaagcgtggccgtggacgtccgaagaccgtgaaaaaaggccgtgcccgacgggggaagagcgctgcccagcagcagaggacgacggccgatgcagccaccaacactgacgcaaccggagcggcgactgtgacaacggacgcggcgaccactgcgactactccagcgacaacgacgaccgcggacggagcgacggtgaccaacgccaacgaacccggtgcgactacgacgacgacggctgcgacgaccaatactgaggtgaccgctgcgactgctccgacgacaaccgcggatggagcggcggcgactaacactgatgcaaccggagcggcgactactccgacgacgaatgcggcgaccaatactgaggcgcccgctgcgactactccagcgacaaccgcggatgtggcgttggattag

SEQ ID NO: 82043 - DNA, 857 bp, Heterodera glycines
atatttccgccttccgtcggctgatgcccaacacctttgccttccttcgttatattttgtcgccactccgttttttgaattagtaagtatttcaaatttcaacttaatttgattagttccttcgggatttttaagttatgtaggtaaactctcaaaaaaacattttccccaccaattaacaaaaacagcgaaaaaaaattttttttttttgttttcaaaactcatggaaaaatgtttctcccaatgtattttcggtttcgcgctgatcacgaatagggcacatccatttcgactaaactcgaacccccgggcgtgaattcgaacaaaaagtttgaaaacttcaaatttttcgagtttcgcatttttgttttcaaaacaacggcttaaaaacaaagaaacaaacaaaagtcatcaatgaaaaaaaaattgttagaccatttttgagaccaaaaacacgcgattctaaatatttgagttttcgactgtttgttcgagttcgggcccggggttcgagattggcctaaatggaatgccagttttgtgaaaaactttctaatgacattttttgggttttcccgaacttacttttttcaccccatgtaaaaaaacgaaaattttttgtataacttcccgactttttcacaattaatgtctttgcatttaccatatatcaattctccattacattttagctccgtatccctgcttctgtcttctgtataccaatccgtctacaatttggccgaaatgactgtggacatcgtcacgccgggcaccacccaaacagcgactaggacaaggacgaggaggactgcttcacgccgtcgcgcgtcaacagcagcgcgttcggtgagccg

SEQ ID NO: 82044 - DNA, 205 bp, Heterodera glycines
atgtcggacaatcagaaagaagcaaataaagaaatggaaaaagcgatgtaaataatttatttcaatttaatttctatgctaatcattttgcttttccattttcagcttcatctctgccgactgttggttggaggtgttcgatttgctggcaccctctcagcttggcctaggaattgcgatgatcagtcgccgatttgattatttt

SEQ ID NO: 82045 - DNA, 179 bp, Heterodera glycines
atgaacagacggtaagcaattaatttaaaaaaaaattacaatttttagtttttctaattttttttccatgtttcagttggatttgtactgatgtttggatggacattttcccatcttttgaccgtcccaaacttggtctccaaatggcattgctttcttatcgttttgatgttttttga

SEQ ID NO: 82046 - DNA, 464 bp, Heterodera glycines
atgaatgacaactcaacgaacaacaacacggtagtcattaattgaaatatttaaaaattgtttttttttaatttttgcagttttatttggccttcaaagacctccatcccagctggtctctgattggttgcgcactgacttatggaatcattgccacatttggcatcattttcaattcttctgtcattggtgtaacctttttaacaaagtgcgtaattagtgtagataaattcttggaataagcttattgattcataatttaaccctatttaaggtcattccgtggcaccgttaattaccttttggcactttgttccttttttgaaatgctccaccagtttggccattttttgtttgtttatacagcattttcgggacaaaatttcattgagtatcgtttggcggcaaagattttaatgattccaatgtttgggttaggtaatttactcaaactaataattaaa

SEQ ID NO: 82047 - DNA, 689 bp, Heterodera glycines
atggttgttctcatccctttaaaggtccgtgatgccaatgaattacttcgacaggaggcggcaagcgattttccgacaacaagccggaacattgtaagagaaacgcggagcaatttgcctattgatgtgcgagtcggaagcgcaccttcagcatctaatatggcttggaattacaaataccaaaaaagaaagaaccaagaagaggtgatttcttaataaattacgaattaaaaattaattttaattacaaaattcctaaaataaacgcagcagatgtttgtttggatgccctccctgccacggcaattgccatacctgctcggttgcagaattttgtcattttggatggaaacgttgatggtggaagaataattgtttttgctcgaattttggaatacaaacattgcgaaacttcagaaatgagatagcgatcgacggaacatttgaagtgatccaaaaaataatttgaaaattttaactttttaaatataatttaaatgatatttatatatttttattcttactaaaatttagagttgtccaagagggtttgcacaactttacacagtttcaacgataattgatcattgctcagttccatgtgtctacgtgttgttgcctggcaaaagtttataggtctaccgccgattgaaaggtcaatacgaaaattattattttttctaattaaa

SEQ ID NO: 82048 - DNA, 1415 bp, Heterodera glycines
atgaacattaaaggcaatcagagattgagtacatttctgcgaaagatgataaaggaggatgaaatgtggggagttagtgtggcagattttcaggcggcacctgctgatggtattagagggtcacatgtcagccgccgatcaaaatatatcagacaacaatttgcaagctttgttagcagattttgataacagtgatccgattttatatatgagttcatgttcctaccactcatttctgatcaaaaatcaaactaaagaattatttttctgatcaaatactgtatccattattttgtagaattaaaatttaaccattattatttaattgattctctgccatttttaaaatttgcttttactgtcgaaatcactatttgtcgaattcaatttactgtcgaaatcacaattaggcacaaagagtaagtgaaatagttcactgtagaaatcacttactgtcgaaatcaaccactgtcgaaatcacctgacacgatattgtcacacttcgtttaaattttcgagttgtattttcgaatcacaaaaatattttattaaaatgaatgaaaaaaggtgcaaaagcctcgcgttcacctgacaattaatgtttgagaatttcaattatttgtcattttctgttacttttcttttggtcatcaaaatttattattccttttgttaattaaattcaatgccaataatgacaatgaaaaaaaataatgcctaccaatcatatgacaattaaacactaattgactaatggaagcccatcgtgcagtgttaaatgattttattatgtacactgaaaatcggggaaattttcgaaaaatttgtagggggttggtaaaatgtttctgcaaaaaagtcacacgtactatttcttaagaaatacagtaatttttgtagacacaaaactgctgaagtgcccatacctaatcgcgtgtaagttgaagtcccatcatccaaaaagcgaattggaagtaagtttttttgtgctcttttcaataaaaactattttaaaagtacctatgcatttttttataaaattttataaattttaactagaaaatataaattctcaaaaatgtaagaaacaaatgaaaatgtgtatgtaaaaattgcgaaatttttgattttttgtacatttaataaaaatttcctcaaaaaatgctcaaaaattgcaaaatatgtacaaaaaattgcaaaaaagtccaaaatatgtataaaaatatgtaaataaaagtcctgattttgttctcaaacataaaaaagaaatttttttccctacttttagactatagagaatccaggaaaaaatgtatttaaataaaaaatgaagccccactaatcacaaacttagtccttctgaaaatctttttttaataagatgtttgcgctcacgtttaggtgccaagccaaaa

SEQ ID NO: 82049 - DNA, 852 bp, Heterodera glycines
atgttttctctgctgctctccatcttcccaattgtctttttggtctgttgcaatgcaatgccaagtaaacacaaataaaacaaaaaaaacatttaactttaaaattttaaagcattcaatggaaatatacaaaaattatgaaatttaaattccacagatttcccgtgctgcccgggaagtcagcaagtggttgctgtgatgtccaattacattggcactttcactagtgaggacaaatctacagtatgctcaaccgcaaaaaatactgtggaaggaataaaaaatgaactgtcctatcgcatcggatgcccaaggggaggacaagcacaaattgtgaacgaaatcgaccgacagctgactagtaattacaatactatcagcagatcattgaaagacataaataattaatatgaaattttcctaattacctcattaagatattgcaaaaatggaaatcaattatgaggatgagtgtccctacaatttgggctttgcccgtgccatgttcgacttggccgctgctgctgctggccatgcgggcaacgacacagaatggcaaaacatgaaaagcaaatttgtacaggaaagccaagcaatcaaagcaattggccaagaaatgaacattgaagttacggatgtgcacattggacacccaagcaaaggcaaataaaactaattatttgataatcaagcaaataaatatttttccagggatttccgcgcaccaaaatgtgccaagtccaagccatgtgattgccaaccctggccaacacagttcggttggccatggaaaggaagacacaccgttgtcatcggattttgacttttgagagcaaagaaaagctgaataaa

SEQ ID NO: 82050 - DNA, 688 bp, Heterodera glycines
atgttttctctgatgctctccatcttcccaattgtctttttggtctgttgcaaggcaatgccaagtaaattaaataaattaaaaaaaaaccttttaaaatcttaaagcatccaatggaaatgtttatttttccaaagtggcatttttcacaaaattatgaaatttaaattccacagatttcccgtgctgcccgggaagtcagcaagtggttgctgtgatgtccaattacattggcactttcactagtgaggacaaatctacagtatgctcaaccgcaaaaaatactgtggaaggaataaaaagtgaactttcatctcgcgtgggatgcccaagcggaggagaagcacaaattgtgaacgaaatcgaccgacagctgactagtaattacaatactatcagcagatcattggaaatataaatatttaatatgaaattttgttttctaattatctcattaagacattgcgaaaatgaagatcaattatgaggacgagtgcccgtacaatttgggctttgcccgtgccatgttcgacttggccgctgctgctgctgggcatgcgggcaacggcacagaatggcaaacatgaaaggtcatttgagcaggaaagccaagcaatcaaagcattgggccaagaatgaacattgaagtacggatgtgcacattggacaccccagcaaggcaaataaa

SEQ ID NO: 82051 - DNA, 1016 bp, Heterodera glycines
atgttgtcaaaagtttgttttccaaaatgtttgttgctgttgttattcggctgtataattggcaataaattttcattatgcgaccaaattttatcgcctcaaacaactgaagaaaaagattattcggaatgcggaattccggactttgatccgttcaatgaacgaagcgcagaggattcttcggaaatcagccatgtaattatgttattaattaccttttttcatattagggttgcgcatcagggatgggccaaattgaaaaataaaatcgaaaagcgaaatttgcgaaactgaaaaatgcgaaatgaaaaaaaagcgaaatgcgaaaagccaaaatatgcgaaatgcgaaaagcgaaattttttaaaaaaattttaccaatagcttgaggttgtgatgcaaaaaaaaaatctgcattttccggttcgatctttttctcagatagaaaatgacaaattctactcattttgtggttaaaatttcaaaaattaaggtaaaatgaaggtccggcggtgccgatacgcgccgccggaaaattttttggaaattgtaataaaatatggtaggaaaagttgcaaaattttcaaaaaatttaccgttttttcaaaaaaataaatcgcaaggcaaaaaaaatgcaccaaaaagttcaagataaaagcttcaagccaagttaaaaactcgttttcgtgcatattaggctatagcaagttagcaaaaaaggtaattattagagttgcacggaaccaggaattttgacaaaaaccgggaccgggacttacggggaccagaaaagtcgggaccgggacctcgattttcgtccgggactgggaccaaccggggattttcccaagtgaaattttttgaaaaaaaatttgaaaatttgagtgcactttgttacaaaaaattgcctatattcaaaaatgtacccataaaattttttaattctcgtttgtggggagaaattcgaagaatttttccattatgcaattttgagtgtaatatgttaacagaaaata

SEQ ID NO: 82052 - DNA, 146 bp, Heterodera glycines
atggctatctctttttttgagaaattttctatgcaacaaacgctctcgaacatgaaacgaagtgcggtgcgccatggccattttattttttaaataatttttatatttaatagatattccagaaaaatggctatctctttttttga

SEQ ID NO: 82053 - DNA, 146 bp, Heterodera glycines
atggctatctctatttttgagaaattttctatgcaacaaacgctttcgaacatgaaacgaagtgcggtgcgccatggccattttatttttcaaataatttttatatttaatagatattccagaaaaatggctatctctatttttga

SEQ ID NO: 82054 - DNA, 960 bp, Heterodera glycines
atgaaaagacgcgttgctcctcttactactgctactgctcctgctgagcaacatcaaataattggtcccgagtcgcccaagccacatgaagagacgcccaaaaatgttgagccgaaggatgagttggcaacgaagaaacacaaagtggacgaccgagagttgtggaaattggcaaaaggcaaatttttgctgaccacttatttgtgccatggtaataattaataacaatttcatcaaattttaatttgaatccataaattttgagatgattggaatcgtctgtacaacaaccagcagaaagtgaagcgcctggagggggaccgttttgccttcggctttgagatgtgtgaggaatgcgtgtgggccaactgccgcgcaaccgaccttttggcgccaatgaagaaaaagtgaactttgaccaaaaaacaataatggattttgatgatgcaatccataatttgaattaatattaattctgcataataaacaattttttttttgagacagtcctcaatttccttttttgtgtgttggttaagatgaaatgattaattggcttgccgaatttgaatctggcaaagacactgagggggggggggcacatggatagggataaagcgagtggaaggaccattcattgtcttattacacaaaccctctaaaaatataaaatgtcccgtcgcaaatcttcaattgctccatcacggtttggagctgcaatgcagatttaaaagaaagaaaaaatttttttgaaccaaattgttctgttgaaggatgcggcgagtgccattcggttcggtgcagggcgtgcgaaagtctgcgggagaggaacagagaaagaatgcgtatgggactaccccatgggcgcatcagcatggaatttgggccgatgaccagagaacagcagctcagtacaacggcagcgcgcaacccaatggaagccgcacttcaagctggtag

SEQ ID NO: 82055 - DNA, 146 bp, Heterodera glycines
atggctatctctatttttgagaaattttctatgcaacaaacgctctcgaacatgaaacgaagtgcggtgcgccatggccattttatttttcaaataatttttatatttaatagatattccagaaaaatggctatctctatttttga

SEQ ID NO: 82056 - DNA, 558 bp, Heterodera glycines
atggttcttgtaagcacattttgcgctcagcttctcaactgccctgtcaagtcattgcgcgaccggctcaaccacccagaggatcgggcgcttgtgctgaaacacatcattggacgcaaagtccgcaccacctacaacgaccgtaatggattgaccaaaactttcttcgtcactggaatttcggcacaaggcgccgcatttcttcccgcatatgggcaattgcgcaacccgttcaacatcaatgtggcggcgcatttttatgcacggcaccgcataaagcttcacttcccgtatgcaccgtgcataattgaacgcttttcggggggaggggaggatcggcactacccaatggaacttcttgagctgattgatgacaacatggacatggacatcaacaacaacaacgagcattggctgggccgtcttttcactgaaattgacgacaaacaatcgtcgtcaaacttatccgacacaacaatgcgcctagtatttgagggagacatggatgaagacagcggacgcaatgaatgctcacagagtactgtaccgttatattag

SEQ ID NO: 82057 - DNA, 70 bp, Heterodera glycines
actcatggaacgtgaagggcttttgaagatcatccgcaacacccagcgctatcagaaaccgtttatgcag

SEQ ID NO: 82058 - DNA, 354 bp, Heterodera glycines
atgatgatttctttgattaacgaccaatggaatacaaatgaaaaaaacttggttattttcccatttttctttttttatactaaatttggactcaagcatgtaatgtttggtctgtcggctgcgtaatgttcgaattgtactccagcggaaaagcaaattagttttgagagctggaattaagctggcagctttgcacctcccctctccccgcatttttttacagaaaatttcacgaaaaaataagaaaatttcagtgaacagtttttttcgttttagacttatataaaagaaattttttgagtttgtaggcctctagagaaaagtaaaaagagttaattttaaaatataaatcaa

SEQ ID NO: 82059 - DNA, 1678 bp, Heterodera glycines
atgatcgcatttaatttcacccaaattgtgatgagaaggaccaattgggagaacgcgtcctttcccaagaattcgtccattttgctgaaggaaagtgacgtgcatttgaaggtaattagtggttggagtgatcaaacggggaaacaaactgatcaaacccaaaaactgatcaaaaaaattgaaaaatgaacacaaaagactgatcagccttgaaagtggaaaagattgatcagtaaaacatgagaaatagaatgagactgatcagagccaatgattggtcagtgccaaaaaaggaaaaaatgccaaactcttctgaaatgatatcccaaatttgccatcggtctgatcaacctccactctgttgtcaggaggacgtgctgcccgggctcgtgctgaacagcagccacgtggtgcctccgacggtgccctattcgtcgcgggaaaagtcggcgctgctttacgctgtcggcgcggccagcatcgtcagcacttttccgttcagtgccctgtacacgcgcttcggcgctcgtttcgtgttcttcggcgccggtgtcgccagtgccgtggccaccgcacttttgccgttggctaccgcccgcggcatggccgcctttctcctcgtccgcttcgtccaagtcacccccctccccaaatttcctatttatttcttcatttcataaagggcttttcctatggctctatctttgctgccattggtttcgtttgccatcgttgggcgactctccgcgagcacggcttattcttgttgattttataattcgttcttaataaataaatattcaaaccttttcaggtcctttatgacttgttttacgtcactttccgttgggatgactaattatttggctgcttttgtaaattgtttcaaattaccaataattaatttatggctcctttcgcttttagcttagctcaacgccttctttgggatggccttgggtttattacattttggctttgttcactttgctcccgttcgttttgtggctttttctgtactctgatcaaccggaaaagcaccgatttgttggtttgtccgaaaggaaggcaattctgagggacaaaacggaggctgagattgtccgcagttgcaatatgccatatttgttcgtttttttttttgcgtttattttttgccaattgtccctttccctttagcaaaattctgaccactaaaattgtcttcgtcatttggttcaatgccttcgctgacatcgtttccgctgtctttctgatcacttacctccccacttatgtgtccaaagtgctccattacggcgttcgcgagactggcatttggagttcgtttccggcggttgttcagctcccattacgggtccttttcggcattttagccgataaaatcgggtaatgtttgcttttatcagtgtgttaattgcccttaattattcctttttcattttgctaattaacttttctttcagttgtgctagtgaattgaacaaaatgcgcttgttcaattccattgccctcgttctttccgcctttttctttgtcctcgtcggttttgtccccgaaaatttgcctttcgttgccattctcattatgacgcttaatttggctgcggttgcgtgcaatactggtggcttctacaaatgtgccactttggtcactcggttggtttaaatcaatggca

SEQ ID NO: 82060 - DNA, 746 bp, Heterodera glycines
atgcgcttgttcaattccattgccctcgttctgtccgcctttttctttgtcctcgtcggttttgtccccgaaaatttgcctttcgttgccattctcattatgacgcttaatttggctgcggttgcgtgcaatactggtggcttctacaaatgtgccactttggtcactcggttggtttaaatcaatggcaataaatgacaaattcggtaacggatttttgagtgattggttaaacggtaaaattgcctatttttattgttgtcacagtgccatacacacgcgaaagaatggggccgaaagagggggaaaggaggggagagggggcattccttgttttggattttgcccttaattatcagtcatgagtaatttcaagaagtttttgatttgtttagtcaatacgcccattttgtggttgccggcattcaattcgaaaagtctgtcactttgttcgtcgccccctttctctacgcccttttcatctccgatgagtcttcgctcgtccaatggcgcgccattttcatcggaatggccgtcgttttactaattgtttgactatttaaatgattaatgcatgtgacctttattaacaaattgaaggcaaatgcttttttcgtcgtattggcaaccgatcagccggcagaatttacaaaagcgaaaaagaaaaaggacgacgaagagaaaggaggagaatgggaggaagagaaagaggagcaaaagagaagagaaatgaaccgaaggaaata

SEQ ID NO: 82061 - DNA, 1198 bp, Heterodera glycines
ggctacacgagtcagtgtatttggacaaaaaaccgggttctggtactgctgggttctgaaaagacgtgttcgggttaggggtgaacgaaacttcgagcttcgtgcttcgaaaactcgcgttttttttgggcttcgaacttcgtgcttcgaaaaaagttgggctcgattcgagcttcggcttcgagtactaagccgagcttcgcgcacccctggttcgggtccggcccaagttttcaaccgggtcctgaaaaaaattatttataattattttcattaattaaaaattttatgaaagagttggtaatttattattattaaaataaaagatttttaatagatttggtagcaaaaccaaataagatttgataagccagcaacactaagtaatttttagtccaatgctggtgaggtcaaagaaaaagaaaagaaaaagggtttgcttcgcacagtgtcgtcccttttcacaaatagtaagaaaaagtcatcaagctcaagcaaggaaaatcatctccaagaatttgtaaaaaggcatgcaaaattggtgccacctcaaaaccttgaaaaggtgagtttaataaataaataatatggtacagtgctgcgcacatggactgagtttggtgggcctgcccagcacgacattagaattccacctccttcggttgtttcggacggcacaataaaattttttatttcgtttccagtttatcttaaatttgggttttccgagatccataaaattaacttgttcacttaaaaattgatgaaaacattttattaatttcaaaaaatatttttaagacctttcctaatggattgtgttttccagctttgttatcaagttttgttcaataaatggtccttttttgagtgaaatttgcgactagacggtgccaatagtgcgtgccaccagaaaaaaattgggattatgaatgagactgtttagaaaaaatttttgttttcaaccctcattatttcccactgattagaagagctttctagataactgtcctatttattaatttttttcaaattagggattttttaaaccaacaaaagttatacattcttagcatcaatctatagctatattttctctattagcgtggaaaatttcaaaaattttctcctgattcgtatagacgttttccagtaattagtagttaagagtgattaaatttttttaattttttgatta

SEQ ID NO: 82062 - DNA, 1814 bp, Heterodera glycines
atggcaaaagttgcaaaccggaagcggaatgagcgccgaattcgtgccgtccaagacttggcacggcacctcaaccaccgaatgaaccgccaccgccatcggcagcgcgacggaaaacgggacccatcggaggaacggcacatccgaatgaccgccgaacgttatgctgatcagctctctcgcctgggagatgaccacattcaccgactgcagcaccaattcccgcaactccccaacccccgccggcgtcgatcagaggtggggggcaatctgaaagggggaaagtcccagccaaaattggcatcaatggtggtacgcccgccccagggagagttgctcccttcaaaggatgtcggcggcgcggcaccgggcgcatcgaactcccatagccgaaacgagaacgaagaggaaggccgtgagaaggccgagaaggaaagaggcagccgcccgagggtgctccctccgccgggggacagttttggagaattgctggagaaagaggcgaaagctcgggccgaagtggccgagctcgaagcccgggcaaagaaggcgaaaatggagagggaggaggaggaacagaaactgaaatcggcgaaggaagcgcgccttcgggacttggaaacccaagccgacgacttgcgccaaatgttgggcgatgcgagctggccgtggtcgaggggcaaagacgggaaaaatggggaggcggtggctccccgcgctgggaaagcggtagccatgccagcagtgccgatggaggatgatggagtgtcacttgccgattcggaaatggaggtggtgccggccgggggcagtgtcgcaagaagcgacgagatgaccaaaacgggcgggaggtctgctcccgccaaaggaggaagccattcatgggaaggttttctagtgttcggagtggacgatggaaagccccgggaactgtcacgggaggaggaggactatttcggagggggtgcgctcgatcacccggtggcatttccccgccgggagaagagagggaaaagaaacaaatggtcgaacgggagcacttcccgtcgcaattgagggacagagcgagaggcgtcaagaaaatgattggaatttgccttttcttcccaattttctctatttttcacctctttctttttcctcccatttttctcaacattttgctatcgtaattttattcaatttttgtcgtatttcaattttgcccccttttcttctctttttcacatctgcgtctgctctcccccttttgcccgccgctttgccatttatttttgaattcacctttgtcttcattttggccgacacttcccctccggccttctccgattcttttccgatttttccccattttttgtccctttgtttttgtcaattcaaactttggaccattcacatttttcgcatttttccattcacaatgtttacgatttgtgccagggagcttctctccccggcctttgactcttcccttttcttatcgcatatttgagaatcattcgtttgctcatttgtccaatttgcatttatctgtgcctaacccccggggggaaaaaacattcgccaatcactccctttccccccccccctttttttttcttttcatcacttttgttggccatcatatcattcattcgttcatttttatgtctcactcccctccagggagaaaaaattgttctttttggccttaatctctctcctcaccactcaatcacggcatccacttttactcctcatttttgccgtttgtcacttttatgcccaccccccctcccacgggtttaattaccccaagtttgagcgcttcatca

SEQ ID NO: 82063 - DNA, 715 bp, Heterodera glycines
atgtcgtctattaagctcaacgagtgagttttgttaaccgttattataatataatacatttgacattttcagaatattaccttcgcctatccaaaacgaaggaaaggatgaatgggcaaatgttgtcacgcgtgacccctggttcaaaggccacgaggttttggatttgcattaacaacagggattagatctgttattatttctaaggaatgttctgatttgggggtagtgccctatttttatttgtaagaggaagtttctaaaaaatgacaaatttctaacaaaattcgtgaaaattttcccccggcggcgcctattggcaatgccggcgtccaaaaacttatttttctttaaaaaattagtctagaatctgcaaattttgtcattttttgttttttagccttgatgttcttttaaaaaatattcgatcaagtccctgtttaataattacactgaaaatccgtttaaaataccacacccccacgctaatttaggtggccatcaatcacaatgccgcatcaaaaacagttgccatcaaagaaccaccgccctatgggcaccgcaaaggatttgtgccacgtacgcctgaagtatatttttgtcccctttactaaaataattttttgctaattttaatactttttcaggactttggcgatggcggtgcctttccggagattcacatcgcgcaatttccacttggtcctttaaaaat

SEQ ID NO: 82064 - DNA, 475 bp, Heterodera glycines
atggctaaaaaaaaattattgcttaagcttcaaggcagaagaggtgctgaacaactgaaaaaaaggcgagaggaaagaaaagctcagacggccaaggcgacagaagcccggctggccaagaatagtgagtttttccattcatttttaataaaatcctaattttccaaatttttagccgctccccagccgaacactgatgcagaaacgccacaaccatccgaagaagagccgtcgacatcagaggcaccggcgcgggacaacgacggacgaccaccatcaactccaacaccgatgacaccgcaggaaatggacgtgccgtcggtggagatggtggacaccgatgtgcaaatcccttcaacgcctgccgatgaagaccaacaagccgagcccgtgccgtcaacatccacggcacgctgtgacctcatggcgacaccatcaacttcaaagtgcgccggtgcctttggtcttgacgatg

SEQ ID NO: 82065 - DNA, 1470 bp, Heterodera glycines
  unsure (1)..(1470): unsure at all n locations
atnntatttcttgcgttcattcacccnaatttgaagnaagacaaaattcatgtggccaaatttttcgcaactgtccggggcaccaccccgggcggaatggaacaaatggggcgaattggcattgnacgagatggacggcactttcgctgtgcagcagtggattcagcaatgcattgggagagatgcgcatgggctggacttgatcttggactgccccgcgggcgtggacgagggcgtatggaagtacgaacagttgcgccagttttgcctggagctcagcgggttggccgtacttttacaggttttgttttttgacttattgcgaaacaatttcatcagagatgttttttggattttaaccatgtgaattatcaaccccttccccaaataggagcagtgtcaccccgaaagttgcacacaaatgaccgcgactgagcagtggatttgtgagtcttccttattgattttctgtctcaaaatagttagttgagcttggcttaggcctgggtttttccaggttatgtacgaaaaatcttaatttccaggaaaatacttaagaatttgctctttttattgttgcggtttagtcggttttacgcgtcctatgaatgaccatactcagtttcttaggccataacttttttctttcttgactaaggcttccattcttggtatcaaatgaatgcttaaactcttggtaatcttatgtataactaaattctgagctaaaggcaataaacaaaaaattatacttgaatatactcgaaaaagttgaatttcgttttctcattgtaatttcttttataatgccagtatttgttcttttctttgcatttatcgaactttaagctttcgtttcagaccaagaatcatgcattgatcaagtatgagtaatgcataaatccgactagaaccattgttactttttaaaacaaatttcaaaaatcaaggcccgggccatgccatgcgttgatttttcctggacctggatttttgtccatgtccaacatgggattcagatctaggcccgggggcttttttcaaaatgtcaaactctattattatccttccacttttcatttcttattttgtcaaaagttttgtgcgcggcgcacaaaaacccgaaggagtgcagtgccattgactacacgcggcacactttggacggggccgcctctctgctgaacagcaaccgctacttccccagcagagccaccatcaaagagtcgtcaatcgccaaaattggatcggtgtgccgacgactctaccgaatcttctcccacgcctatttccatcatcgccagatttttgactcatttgaggtggaaagatcgtgggtctttcatttttttgtatccattttcaattcacttttaggaagaaactgcgctgtgcaaccgtttcaccaaatttgtgcagaaataccaactgatcgccgttgaccatttgattgttccaatcggtccataa

SEQ ID NO: 82066 - DNA, 441 bp, Heterodera glycines
gctagaatcaactttattgggcatgaatcccgattttctatttcatttcgtatacactgcgactcacaattttgggctcccggtacaaaaaaaagtttattttttattcataaaacagaacgccaaattgcaaatcttaaaattctttgagattttcccttctaaaaatggcagagccgagattcgagttaaaaactaatacgggaaaaggcggggatcccgtcccgttcttttccgttttcccgtttccgtaaattttttttccaaaagatcgaatcgccgaaaagctgactgaattgggcgcggccggaacggaaggaaagtgagggatggaacttttcatcttggaaaagcagttcctcaagaaattcaaaaatttatttaattactcattttaaaaacaatcgaaataattggcaaaaaaattttaaattattatta

SEQ ID NO: 82067 - DNA, 144 bp, Heterodera glycines
atggacggcactttcgctgtgcagcagtggattcagcaatgcattgggagagatgcgcatgggctggacttgatcttggactgccccgcgggcgtggacgagggcagtagtataaagtaccaaaagcgagcgggttccgagcgg

SEQ ID NO: 82068 - DNA, 572 bp, Heterodera glycines
tcccatggcattttacgcgtcccatgacattttacgcgtcccatgacattttacgcgtcccatgacattttacgcgtcccaacaacatattacgcgtcccatcacattttacgcgtcccaacaacattttacgcgtcccatcacattttacgcgtcccatcaaaatttccatccaaattggtttatttacaaattaacattaaaaaataggaatatattttcaaacaggatagttgtgacgcatttcctctaaaatattttgaaatatttttgtgtttgagtggtaacgacgaaatgcgtactggtacaaatatgtttgcaacaattcagggttagtcccatgaaggtgttttaagctttgctttagagccctccaggtcgcttcaattccctgggtgtgtatttgagggttagttggatctacgaagtgtaattgatgatttacaaaacgatggttgtactgctgctgcatgttatttatcccaccatatgctgcccacccatcgctaacgatgctcgtgccgacttcgatgttttcggcaatgataggcagaagtgttgctgctgagcga

SEQ ID NO: 82069 - DNA, 2275 bp, Heterodera glycines
gcccagctgaacaacctgcatgcctgattgaatttagtcgtggcagattaactgctgagggtgcctgcccttcactttacatgggattacaaaatggcctaagcacaccaaatgatgtcaacctaaatggatcaattggttgtcttctttgccatggaattatgaatattgttgagctgttgcggaacgaaagtgttacggtgatcaaggaagagattggtcattactgtagttaccttcttgcattacgatcaacatgcaagtcaataatcagcgatttcttcttggaaaatttggtctgctgaacttaggattaacaatcagaaatttttagttaaaaaggattactgcatatcacccagtcacactttgttggatgtattttaatttgtgttcaccggaacaaaatagccttctgcaacggattaacaaccgagtcgagcatcatgattatcaacaaaatggacatgggctgaataattcactaggtgtcccacggcaaaggtttaccattctgcaaccgaatgatggtgatgttatgcctcccggggcattagctgcattgggtgatttaagttatgagacgcttgtgagagaatatcttggagaggatgggccagccggtatgcgcaaaaaacttatttattatcttgggttattttgagggtatgaaaagacattgaaatggcttgctcgctatggccttatagcaaatgcgttgacttgtgccgaatgtcaacagcaccgggcatcacttgtcaaatatgcccagaacccggagggcttaacagtaaaatagggaatttaaattataaaaaattgattttaagtggcgatgaagtcactgtcgaaaagcaatccaaaacagcgaaagttcaagccgattttcacccagatttggttcttttttcaaccatatgcatctgtcactacaccaaagcctgagactgtgttacttctgggccactcatccagcaagcactttggatgcagtgatgagagaaactggcgtgtctcacaaagaaacgattatagatttctataattttcttagagatttatgccaagcatgggcaaggaggattgaaacgaatgagaagctgggaggggtgggtagggttgtcgagatagatgaaacaaaaatgtatagggccaaatataatagaggacggatgttaaatcgtgcttacgaatgggtcttcggtatggttgaacgtggcacaaacagtgttaggttctttcctgttgctgatcgctcagcagcaacacttctgcctatcattgccgaaaacatcgaagtcggcacgagcatcgttagcgatgggtgggcagcatatggtgggataaataacatgcagcagcagtacaaccatcgttttgtaaatcatcaattacacttcgtagatccaactaaccctcaaatacacacccagggaattgaagcgacctggagggctctaaagcaaagcttaaaacaccttcatgggactaaccctgaattgttgcaaacatatttgtaccagtacgcatttcgtcgttaccactcaaacacaaaaatatttcaaaatattttagaggaaatgcgtcacaactatcctgtttgaaaatatattcctattttttaatgttaatttgtaaataaaccaatttggatggaaattttgatgggacgcgtaaaatgtgatgggacgcgtaaaatgttgttgggacgcgtaaaatgtgatgggacgcgtaatatgttgttgggacgcgtaaaatgtcatgggacgcgtaaaatgtcatgggacgcgtaaaatgtcatgggacgcgtaaaatgccatgggacgcgtaaaaccgactagaaccaaaaaaagttatggcttcttaaagctccttgacacggaagcgtgcgcatggaactgatatttttaaattagcgcacaaaaacatattggcgtaatgaataaagaaggacaattcatattcactgaaacagttataaacaaaaaatttccattgttttcctcattattcagttaacggaatttaagcaatgtccgataaatcagtctactccaccagcatccaaattgacatgacgttgtttaccgacgtcactccacctgatgtgcactacgctctccaccaccagtctgaactcgcgcctgctcccgtactattttcacttatttacttatttgtaatgttacgaattaaggtaaattcaccgactcgatcgcaagaggacatcgaccgatggcaggtcacttcgcaccgtgcggacggcccgaactag

SEQ ID NO: 82070 - DNA, 576 bp, Heterodera glycines
atggttgcggttggcattgcggtgcacggcacaacggacggtgccaacgaatttgtggcaatttcggagaaacgacgatcggtgggcggcgccggaggagaaggaggaggcggacaaagtgacaaaaaaagtgggaaattttcttacaaagaaattccgcgggggataattatgagggttaaagaaattttgcagcaaattttgggttagaatttttttaacagttatttttctgagacattaaaatttggcaatattttggggccaaaaatctgaagatttcttaaaaaatatatcacaatatattcaaaaaatatgaataataattaaatttttaatattcataaaacatttaagatgaatttggataaaaaaaatttttgccagtcaattttttgtcagaattggaccttctccaaatcagaaaatattcccgataaatcgaacagatggccaagaagaggtctaaactcaaaaaatattatgaaccggattaagaagtctatttaataattttaataacaagaaaattttcgtggattttaatggcttaaagcaaataatttttaaaataaa

SEQ ID NO: 82071 - DNA, 353 bp, Heterodera glycines
atgccggcaccgaacgcgtcgcccagcacattgatggatgtacgaattcgatccctgttcaatggcacgaaaattacaataatttggcaaaaaattggaggttggcacaaattttgatagtaaaataatagaatacgtgaaaatagaaaaaaatgatggcaattcaaattaataaaattattttcctaatggacaaaaaatctataaaaattaaaaatatagaaaattgtaactttcataagtagaaataaaaaaatatatatttagaaaaaattacatatattgctatattttttgattattattaatgattcattaaaagaattcttaaaaatttttaaaaattggtttaa

SEQ ID NO: 82072 - DNA, 2057 bp, Heterodera glycines
gaatatgttcccggaaaacattgtgcaggcaacaatgcagcagatggagaccacttatgtgtatgatgccaacaaaacggacgtgccgttgaagtacaagacggtgtacaaggacggcctgaacattctcggcacgttttttgacagtgtgccaaaagaggcttttaacgggctcaaattttcgggcatttcagattttttgagagggttttcggaattttcattgagaattttttgagttaaagaaaaaagccaactttcagtaccagtgagcccgtccggctagttgagtccctatttaattggggctgcttgagagccaaatttttacgagaaaccgaaaccccgaccaatccaaatgcaactgatcaatgggttttcattagaatttgcgagctttttgctattcaaaatttatacgtattcggcacatccgattttaaatttataaattactaatagtccactaatttgatgaaaacatagttaatttgcattgtgtaattttatttttagttttttttttgtgtttggtccaatatgcaaattatgttaatagaaaataaaaattaatcaaaatattagcaattacactaaattctactatatttatcctacagtaggaggggtaaattacgacagtatttttctacaataggaatcatcgtcttttgcatttcgtttggcattgtgatcagtcagctgggcgcccaggcccgaattatggtggacttttttgcggttttggacctggtcagaaactattaagatttttttcaatttcttaatgaccccacttaattaaggtgatcatgcgtcttgtgtccctcataatgtttggcatttttttgaaaattaataagaacaaatttctttgtttttgaggtggtattcgccgatcggcatttgctgtctgatcatgggccacattttgcaggttgaagacatgagcaacacggcacgctcattggctatggtaggttttgtttggcacaattgtgtcattggcaaaaactttttgccaaattttcttggaggagattaaattaaatgccttttcgatttcgacagcactgctctctaagaggctgaatattttgagaaaattacgtttatttttagaaaattatgaccgaaaaattgaaaaattgattttcggtacttttttttaaatttttaaattgactcaaaaaccgcgaaaatacttagaattgattaactctccattctctcattaatttcatggtcatggtttttgttacaaaacttttttttaccacccattaaaattttattattgaaaactgattttttttttgttgaaaaaaatgatgcttcgagtgtcaaaaattttgaaaatttccgttttttgggacttcaccttcgtttcggtttcaaatactaacattaagccgagctttgcccagccctgtttcacacgcacaatttgattcacctaataaacatttcgccaaaaaattatcgcttaaattctctgacacgcccttaaattttgtacagtattccgttaccgtactgctcggcttggccatccattccctagtctcgttgccattgctgttttttgtgctgactcggcagaatccgtacgtgttcatgcgcggattgcttcaggcgtggatcactgcgttgggcaccgcctcgaggcattttgttgaaatttcaatttcaatttaattttttcaaaaaaatttttcagttccgccactttgcctatctctttccgttgcttggaggaaaatttgggcgttgatcggcgtgtcactcgctttgtgctgcccgttggcgccacaattaacatggcaaaatttgtctttttttaattttctaaaaatttttgaaaattttttttttgaaaaatctctaaaatttttacaaattttttttaggatggcacggcactttacgaggctgtcgctacaatatttattggtaagaaataataaataaaatagaaattaataattaaaaaacattgaacatttagcgcaaatgaatgacgtgcatctttcgtttggccaagtgatcactgtcag

SEQ ID NO: 82073 - DNA, 336 bp, Heterodera glycines
atgtatgccgacgatgttaaattatattatgcctatggaaatgatgaccattcaaatcagttggataaagcaattgaggctttggaaaaatggtcaaaaataaaatcgaaaataataatataaaaattataaacaaaatagaagtaaattgtaattgcttagttaaaaaatattaaaatataacaactttagtttttccgagaattaatcaataaatttcattagcaaattttaaaaattcatatgtggcagtgttagtgaaatgcttaatatcgtagtcgtcttcgatagaaatgaagctttttatgcaaagtaaaacataaatatttcataaaa

SEQ ID NO: 82074 - DNA, 1103 bp, Heterodera glycines
atggtcagagcaacaacggccaggacaagggcatcagcagagcgagcacggaccatcaaaatcaatcgtcgaaatgccaagaaggcgcgtgccgcaattggacgagccggacatgtgggtgacgcgagagagggagggaggggcaattaatacactaattaattcaattcgacacccttttttaattgtgccaatttttcagtcaggcaatgcgatgggacgcgagaagtgcatgatgtgcctgagcaaagtgagcgacatgacgcgtgtgaccatgggctgtgtgcaccaatttcatcgcaggtggaggagtggctaattcctattaatttagaacccatggatccccgaattcaaacaagtctaaaagccgagtacttttcctggtctttttgcctttttctgatcgctattcgaaatccgttccgatcagttttgaaccgctgcgtatccccgaaattgacagggtggaattttatggattttttttggggcctaaaaatccaattttgattttaatgatttcggataaatgcatcatcgcttattatccccccatcaaggtgcctgtatcgctggctcaaatacaacatcaactgtcccgtgtgccgctacaatttcatgagcgcaattccccctgaagaaccggaagaaccgcaccagtggcaaggcgactgatcgatccatcattgaaaatctgtaccacccgcaataatgtgtgtattatgtatatgaatctgtaccaccataatgtgtattatgtatgtatattgtatatgtctgtatgttgttttgtgtattttggataaagatgatacaaggttaaatgaaagttttttgtcgagattttcgctgtaggtattatgttgaggcaattaatggagttcggattttcagattttcaccaaaaattcaggatccattcacttaaaaaagttagaagtgccaatttttctccacttttcgaattctttgtttgtttgttcttttgatttcttccgtttattttgacacccttttttgtctcccttttttccccttttatttgctgtcgcattctcgtaccattaaccaacccacacactcttcttttacaaaataaa

SEQ ID NO: 82075 - DNA, 195 bp, Heterodera glycines
atgatcaatgtatggaaaatgtggagaaagaatgttggacaaaatgatcaatcagtgaaagaaactgatcaaagtgcgggcataagtgatcattgtatgcttcaagttgatcaacatgatggacgcagtgatcagaccaataaatgtgttgatctagtattattgaaggcagttaaacgaagtaaatgtgccaat

SEQ ID NO: 82076 - DNA, 254 bp, Heterodera glycines
caaaagaaggtggttatttgacgaggtcatttaactatggttatttgacctggtcatttgaccacgaaatacgagaaaaacggtagcaaaagaagatagtaaattttctgctggagcaaccaccagtcaccgttttttaaccatgaactaacttcttttgctataccaccaactttctaccacgaaatttttatttacatatatatatatattttgcttcttttcatggaaaacaagaagtcaataagttgttt

SEQ ID NO: 82077 - DNA, 153 bp, Heterodera glycines
atgtctttgttctccaaacaaatgtctgagcaaattgcaacttcaattaaagacaattacgcaacattcttcccaaacagcaaagaagctaaatttgcccagaagtcaaatactgcctgggacgacttaacaaatgagcttatgcaacttggg

SEQ ID NO: 82078 - DNA, 341 bp, Heterodera glycines
atgccgaagaccgagttcggggcaacgccctctccttcttttttgccaaaggcatttcgtcgaaccgtaaaccctgttgtcgatctgcagcgcgatgtgctcgaactccaaaaagactttttcaaacattctgccatgcccttggttgacaaaatgtcagcttactatgactataaaatcgccaaaatgatggcttcgaatgatcagcagcagaaaagtgaagaaaaagaagaaaacaaagaatttgatgaaaatgagttggattattaattattgactaatcttatgatttggcatatttggctttataagccttttgatcaattaactaattatgttta

SEQ ID NO: 82079 - DNA, 612 bp, Heterodera glycines
atgttcctcaaacgaaactccgtccttcaaaatttgccatttgttccccgagccgtcgaaccatcgccgatggcaccggtgaagcatatttttatggaaaatgcgagactcttgagtatttctcatttcaactttcacataaatcgcccgtccatttgccaatcattggttcaaattacctatgcaactttttatttcagaaaatgccggcctggaagaaatatgcgcggatgtgagtattgcatataaaacagactaaaaaacgaaactccagactctgtcactccgattaattaattgcccctaattaattaattaatttcgatcccccccccccccctaattttcagtgttcttccccatgtcggactcattttgatgtccgtttgttacattgtcggtggtgcctttgtgttctaccaattggaaaggccaaacgaaattgcggtccgaagagaggcgagtgccaacaaattttttgggagcggcaaaatattactggattgatttattggccaatgcttattcagacattagacatcatcgagcgggaaaaacacgaaatgctggaccaaatttgggcattgatcaatgatccgacagtgccgcagg

SEQ ID NO: 82080 - DNA, 1656 bp, Heterodera glycines
tttatcgttgcgcgcaagcggaaactccgtccgtcgccattaaatgttctgatgttttttgttgttgtccacctttgtgctgttttctctctctgtgcacttttgagtgtatgcatttgttcgggaatggcattttcaaaagcactcatttaaaattattccctaatcaattaaaaattatcaaatgtggtagcatttttttaatcggaaataatcatttgtacatataaatgctgaaagaaaaaatcgttgactttgaacggctaccagacatttgcggacaatttcgggaaaaaacaaaaatattctttaaaaaatctcaaaacatggaatggagactgcaaaactaaataaaaatttatttttggcttttaaaggtatcatattttatttttacacttcaaagaattaatttcactggccaaagtgagatgctgttccttaagtgattaaagaagagttgatccccaacactgttcggggaattcgaacgtcgtctgtttcactctgtcgggtgagagtgctttttttatttttagaaaaatatttttttctatttgacgaccaagtttttgacccccccccccaacatttaaaatttttttttagccttatagataattctcggggaatttgataccagttccccgacttttttcccagatagtaggggaagaaccatagataactcttgctctcgtgttcaattggatagcatttcgagaccccaaaaattttcggaaaggaaaaccgaaattccatggcacaaaaattacgggaatctgatgttggaaatcgggatttcgtgcagctattgatttttgaatatggacctccaaattgataaaaatgagtactccgggattatttctctaaaatacgacaattattgggtattttatttatatcaatttttagccctttctttcttctatcgaatgcattttgtttcagaaaaaatatttgtcttttttaacaaagacattgttgttaaatataggtgccaaagtggggaaaagcacattttttgacccccatgttacaattggtcaaaattggcacttcaagtttaaaatgtgtaaaaccgaacgtgccaggaattttcgacagtggctgatttcgacagtgacctgatttcgacagagattatgatcattgtctaatcgaccttgttagcattctaccgagtagcaccacaccgctcattgactgtgatgtggactttagagtgccatggtatatatccgttgagaatctgagtaggaactgattaggtcgagtaagatgagaagtacgatatgcagacctacgagcggaaaactggaaacctatcagcaacttacatgatatgtcatctagtctctctcagactttatgctataagaggctgactataagcaatccaatctcatgccaaattctattgtatagatctcgctctataggccgaaaatatcagcgctcgacacggactcattgtcaccactcgtcacctaaaatctactcagcgtcggcaaaggagccatgcagtctagcaactaacttacctgttgaaattcgaacacccaaacaaccttgttaatatctattcgaagcgaatgcagattgaagaaacctttcggagacttgaaaagtcctgcctacgaactaggccta

SEQ ID NO: 82081 - DNA, 221 bp, Heterodera glycines
gaaatgtctgatagagtaattttggctccattgaatgttgatgtagatgagatcaacgaaaaagtattagacttaattaattctgaggaaaaaatatacaaaagtattgacactgcaggaaatgatagctcttttgattgtgtgccagaataccttaatacattatatacaaccagtctaccaaggcatgaattgagattaaagaataatgccattgtaat

SEQ ID NO: 82082 - DNA, 922 bp, Heterodera glycines
atgttctttttgaattcaattcccagcgagaatgggctcattttgctactgtttgccatcagattcatttcaacactttgtgtagtagattcaccaaaggctggtaaagatttaaataaaataatattttaaaaaaaattaattttaaatgttttcgacaaatttatttaaatcaaaggattagctatctgaaacagaagtaaatttagtcaattctcatgtgtattattttgaaaatttgtagaaaattataaaaaaaattacaaattattttaaatacttattttttcctgctttatttcgattataaatatacgaaaaacatatttttaccaaggaaaatcttcgctttaattttcatatgcccctagaaatccttattttagattttttatacctaaaataaggcccctattttcgcgtttttttctcctatttttgcccatgttttagtttttttaatccttaattctaaattaaattaatcatttttatagatgagaatgtggaggataaaaacaactcacaaccaattgtgccaacaatgaatgaccaattgaatgaatatatgcaaaaaaatgaggatggtcaatcaaataaaaatgagggtaattaacaaataaattaattaatattttaacaaaaataaataaataattttatttaatttagatagcagcattcgtgccgaacatgcatcagtccaatccagctcatttggtggtaaataataatcaaatgaaattactaaattaaaaaaaaaatttatttaatttctgtttgaaaaagtcagtttttaatggattaattaagtttcattaaattttattggtttccgtcatccacatcttttttaaaaattatttttagcctaacacggttataaaaaatgtttcaatttcaaaatttacatcttgggtaa

SEQ ID NO: 82083 - DNA, 631 bp, Heterodera glycines
aatcgaatataagcaaaattgatgaagaatatgtagcagaaagtagtgaccaacaaaatgttggaaaaagtaaatttatgatcaaaggaaattgtaattgttttaaattaaattaatttaataaatttggctaaaaacttaaaattattattttatttccgtctcaaataaatatgaaaaaaagaattatgaaatagaaaattaaatattttttaattgaattaaagattttagaaatataattttaaaaaaagttgatttttcatataatttttaaatattttttctatacatttttaattgaaagctaaaaatgaagatctgacctcgtcaaatattggagatgctaacattgagaatgagattcatgaagaaggtaaaatggttaaatttaaatgaatttaaatttgatttctctgcctattatagctacaaaattggacggaattgaagaaattggtaataaaagtgccaaaaataacggcagattggagatgtatgaacagaatgccaaactcatagaacaattgaaccgcgaccaaagtgaacaaaatgccaattaaaaaaatttattttaaatttaaaattttaaggcacaaatgaagcagacaaaaatggcaaggaaaagaga

SEQ ID NO: 82084 - DNA, 478 bp, Heterodera glycines
atgccacgttcgaaaagcgtaaatgagaacaatgaaaaagaggtaaattaattattagtaaaattaaaataagagattttaaaaatgaaaaattaaaataaaaaattttgaaatttttaagctgaaaattcgccgtcactttccagaaacatttcatttaaattaatatcattaaaaaagattaaaatgtctctttaagaaaattcttttttccattttttaaatgataaaaaattttcttaaaaaatatttgattatatatatatttttttcaattttatgtttttagtcccatcaaaattcacctaaaaatataatggaaagacaattggacaacgcggaatcaagtgttgccaaatctgctgaccatatgccaccatcatcaccatcaccaataggttgggcaaaaggaagaaccgtcagaaacaaaatgccaaattaatgaaaaaaaatgttaaataattttaaaaaacgccaa

SEQ ID NO: 82085 - DNA, 1802 bp, Heterodera glycines
atgaacaagtggattgcccttgggtaagtgttaattgggggaacaaattcataattaaatgaggcaatttaaatcccaaataaattttgatcagtgatcacaaaaatgatttcaaatgttttcaattggtccaataaaccaaaataaactaattaattaaacgtttttaaacgggaaaccctgatataatttgactatctgctctcattttagtgtgttgatcgccataatcagcgcgctggacagcgctgttctgcgacaacggcgcattgttaaggcgggaaatgcaccgaaatcggagcaaaaggaaaagccgggtaaatggaataaaataaaataaattaataaattaacaatttttttcattttccaattttaatttaaggagaagccaacttgcgcaagaaacggcaaagtggaggacagggagatgaagcggaaaaaatgccgtacaaattcgacctgacttgccgattttattcttccaacccctttagaatggaaaatgacgaagtgccgccgagggacacatttgcaagcgaagctgaatatgaggaggcgcggaggctggccgtgttgcgcgttcgggcggatgaagaaaaggcacgcatcaagaagccaagcgaggagtcaagcttgtttcaaaatgatgtgaaatattttcattgtctcgacgatgaaacttattacacaaaggaactcgatccacaggttttaaatgcaaaggaataaattaagactccaaaaattatttttttaagaaaattatggcccttcatcacgcaatattggtcattaaaaaggaccgggcttccgcagcaggcgtttaccgaatgaccgatgtattcgttggagacgacccgattggcgtgcccgcatgggaaattccggcagccatggcgcatttctgccggtggctcaaagtcgcagaagaagagctgaataggggaggcgaactggcaagatttgttgcaacagcgcatctccgtctggtaggttgaattgtcaatcctttggagaaaaataggcttaggttcaaatccacccggcagaagacgcgaacggcagattagcaagattgctgatgaatcttttgctaaagagaagagggaagggcccaatcatcctgcgcgagtccatccatgacaagtacgatgagtgcatgaggaccggaaacatagaagctttcatcgtggagatcaacgttgaacttaacaacttggagaagccgggttgcagttgctaacgcggtcgaattgtgtttttatttaagagtccaaaagcttacttttagcatattttttgcgtttttcataactatgttccttaaacgaaattaaatcgaaatgcacccaataagattggcttttcaagttttgaaataagtaattttttattaactcaaatactcagccaaaaaaagtgctaaaaatttatgaaacaatttcgttctttttgatgaatttgatgcaaaagaggactaatattaattctggtcctattttttcacagcagttaaatttaagttttttcctattttggtggttttcggtgcttaaaaaaatcaacattatattagtagattccgattttttaataattaaaaaaaaattttccagtgatggtgggtgtgcttctgcaattcttgctcacaaaggaaggtccccaggtgtccgtgggatttccaaatgaaatttggtgggtggatagagcacccatgggttcttaagaaaagtgtttttattttctgcgaaatgagtctgagtgccgagttatgacgtgccaaacttttttttattgca

SEQ ID NO: 82086 - DNA, 403 bp, Heterodera glycines
atgtccgtaaatccccaaaatattattgtccttttaaaaaaatatttttccaaatataatgatgaaactccaataaattctgtcgaaatcaatatttcgaaaaattttgccgcaactattgaaaaatgcattaaatttgatgaagaaatgcttttatcggaggatttggtgattgatgaggaagcaaattttgatgaattagatgacgaaagtgatgaattcgattatgattccgcagaagaatttgatggaaatcaaagtcccaacggttcaggtccattcgtgtattgtagatttgttttctgacttaatacataggtggatggcgtttacaattttaatcatgaacattactgaaaatttttcaaaaaaaaaatttttttttttgtttttttggacggta

SEQ ID NO: 82087 - DNA, 737 bp, Heterodera glycines
atgcagccaaaaattataaaaaacattttcacgatcaccgaaacgctgacgccaaataaattctgggaagtaggtgtcgtaagtttcagtcttgttcccaaattgctgtttgaaattcctcttcaattttttccacatggattcaacattttgggtatgggcaagacataaatgcgaatttcgaaaaatttgagttttcgatttttgttcgaattcggatcaggggttcggaattgggtgaaatggatgccatattcgtgctcagcgaccccgaaaaccttataataaatatttttatgacttttgaaattttttaaaaaaatttcaaaaaaggtgtgataccatcggtactattacccatattcgtttcccccacgtcgtcatcccccccgaaaaaaattttttcgggggggggggggggttgggaatgatgtgcacccctaaatatgggtttgatacagggggttttcaggggtgttggtatggatctgtcacccatttttatgaaataccaccgatatccttaattgaataatatacaaacaccgttatagttggagcatgatgaggatttcgagtctccaccacactcgtcggacgaggaggcgccagaggacgaggtggattcggactttgacaaagacgaggaggaggatgagcccacgccggcggaagaggacccggaacaaattgagcgacgacgaaaggtttttttttggaaggaaattaattcataa

SEQ ID NO: 82088 - DNA, 93 bp, Heterodera glycines
gtggacctggtcaccgaccgtggcgagctggccgaacttgcgcacattctcaccgagggcaccgtgggcggtcaaccgatgaaaacgaagccg

SEQ ID NO: 82089 - DNA, 916 bp, Heterodera glycines
atggacaaacttttctgtgcaaattttgctgtaaagacgtgggaaaaggaaagcggtgcaccgattgaatgccaattcgatgtaaaaagtgtcaatgcaaaaattgacgaaacggaacagataggcaccaaatgggtattttgcatgtacgcgagtgccaacgagaaactccaaggaaagccaaacatattcgagcagccaaataaggtcgaagagattctaaagccaaaatattttatttttaatcttgaaataaaaccgacatatggaaatgattttgtattttatatgccatgtatattaaattctataataattaacaaattttaatatagaatattgaaaagatttcaactaattttgtaaattgaatagagcggcaccggtattcttcactaaagcagatgccggtactgcgatcacctatgccgataccgtatgcaagtttacgaccggtatcgatatcaacaggacggttagttgcggtaccgccggtactgcaagattcgagccgggtagtttattttttactaaaaacaggtactggtcccgtcactgttgtaaattcaatttttgaaactcaaaatatgcgcacaatgtaaaggagcagcagaaaggcggagcgatgtttggagaggcgccaattggcgggcagcacaaccaattgggacacaatgccaagcgcgtaaatgatgaacaaagtgatggcggacgaggtcagcgtcaggtcacgccgcgttgggtcgtcacaaaattggacataatattggtaagcagctgagacatttgtggaaaaattcggaaaggaattgtcgatgggcgacggaatggctgaggaagaagccatcattattttctttctctaaaaagcattttttacggttactgtatgcaataatagaaaaaatgtaataaa

SEQ ID NO: 82090 - DNA, 1101 bp, Heterodera glycines
atggaccaaaatgccaaaatatggaaatatggacataaatcgcgaaatatggaaaaatatggatatagaaatccttcttttctgtcttcatctctgcaggcttttctcccaccaatatatcgatttttttatggtgacaattttagttgtgagcagatagaaagaaaatggagaaatagtgtgggttagagaaatcaaaaatatttggaaaaaacggatgaatcaatttttgttctactgttacgtcgggattaatacaaaatgtttgcaattgatggaaattttgaatttagcgaagaaaatgctaaaacaataaaaataaacaattacgattggtgaaaaaatcctgcagaaacactcgaaattgttgagatgactcggaaattgaaactcaggcaaagaagttgaatttaaaattctttcaatttcattttattaaacgcactgaaaatctgctgtcgccaatttcgcatgttaaacttatgaatgacattcaattaagtctgtgcaaattcgttttcggctttttggcaatctttaggttttttttcatctaattcgctatatttggccattactttcgagttatatgtaatgcgggatatgcatccaatagtttcgtcatactgcagcagaaccaagacctgctgcagttcaagcagcacaaaatggtagaggaagcggtccaagagcaggaacgtcgccggagtatcgtcgtcatggggttggccgagtcggccgaaacaaagccgtcggatcgcgttgctgccgaccataccgctgtctcaagtgtactcgatgagcttggcatcaagtgccccatttcaaactatcgaatggggtccccccaatggaagaacatgaacattcgtccgtcgctgagcccagcggaattggacgtacgtcgacagctgcagaaagaatgtgcagagaagcgaaaagacggcggtgactgggtgatctacgctgggacggtcattgaacggtcggacattcccaatttccggaaaatcaattgacttctccccaaatcacttttgacaaatacatatttttcacaaaataagaatatattttccggtcttaagcatgttaagctca

SEQ ID NO: 82091 - DNA, 155 bp, Heterodera glycines
ttcttcaaatttattggttgaaattgcatatgagatacatttccaaattttttgactcggtaaggcgctttgacaaagacggctttcgttttgcaattagtcggtcaacattcggaaattggtctcgaattttttcggcaattacgtgcaatcat

SEQ ID NO: 82092 - DNA, 87 bp, Heterodera glycines
atgtatttgacgtgcagcaccgagcggcccggctggatgaggtcgttgccgctgaatagcacacggccccggccgcagtcgaacacg

SEQ ID NO: 82093 - DNA, 870 bp, Heterodera glycines
aatggcataaattcccgttttttgtttttttgcaggtgttggtccaaaaatgtcaaatttggcacttcaaattgcatttggcaaagtggagggcattgcggtggacactcatgttcagtggggttgccttcccgtctttgtcggcacattttaaacaatgtttttttggcaggtccaccgaattgcaaatcgactcggttgggtgagcacaaagagtgccgaagaaacggaacaacggctcaaggaactgctcccaaagtgcgtaggtgttaaagccagaaatttgaaataatttttgccattttcgggtatcgtttttcttcatcaacaagaaaatggtaattcctacgggaaatgtttccatttttaggaatcattttcattttatacaaaaattttgctttattgacttgttgttagttctttgagcggcatttagatttttcaaaaagaaaattttattgtttgatttataaaaaataaaaggaaaaaaatttttgaatactttctcagcaatatttttgaaattttgggaaaaattagtaattcatcataaaatatgaaaaaatcgctataaatatttttttcttgaattttcttatagaaagatttctataaaaaaatttttgtaaaattctaagtagtaaattttcggaggagaaacaagctgcttcccatactttctcacatcatctcccctaaatcagcaggtctgaatggccgtccatcaacaaactgttggtcggctttggtcaaacaatttgtttgccggtgcgaccgaagtgcgacgagtgcgccaaccgttcgctctgtccatggtcatcaccagcaaatggagcagcaccaaaaccgaagagcaagaaaaagaga

SEQ ID NO: 82094 - DNA, 1059 bp, Heterodera glycines
atggacattttgcccagttttgaccgtcctcaactcggcctcaaattggcaattctttcgccacgtttcaatgcgttggtgggcaaacatttcgatggcaaaagcgaattgacaatttggagaacaatcataatagacaaggacaaaggacctgaaccgaaactttatgtaatggatgaaaaattttacaaatttgtgccatttccgttgcccgagcgtccgttgcccagcaaaatccgttttaagcgccttcggattgagtaattaaaaatcaaagctttatggcaatgaaagctttccttccattttcagttacatcgatcacttcgtcatcgcttttcttcgttcaaatcaccaaatttttaacaaaagaggcaccaatttagagttgtggatttattccgcacacagctcggatgaccagccgatttgggatgtttttgttcgtgaaatgtggccaatttttgcatcaaacattcgccacttggactttatcgatggtgatggtttggacaatttgcgtcgtcgcacttcgccgacaattcttaccgatcttaaccaattgaattcaatctattcatttggtctgttgcctgatccaattagtgattttgatgtgccaaatgcaacaatttctgctggccaagcattgtccaaatggttgcaaactccgagaaaagatggccaacccaagcgattgcgttgcaaagattttaacaaacatgtggacattgattgggtcaacaaattcaaggaggtgtgaccataatttcggcaaatcaatgctttttgattgcctctatttttgttttcccaattgtttagcaatttctccgtgccaatgccatttcttccgtctgttacgaaattcatttttctgttcatgggccgtcaatgcaaatggtgccatttgaattagcgaacgaacagaccaaggaaaagctgacactgatcaaagcaaaggaaaatgacttggaggacaattgttggataatgaaacgatgcaaaattggggaatccgcggcggttcagcttcagaaagatgaaaattgtaacaat

SEQ ID NO: 82095 - DNA, 765 bp, Heterodera glycines
ttttcaacacgagccaatcaaaatgggcagcacggaaatcggagtcgcgaagttcgtttcgacaacacaaatggacgggcgtacacacgtcgcaacggcagttattcgtcggaaccgtcgtcgggtcgacgaagctccttttcccgtcatcaagatggtgctcgtacatacgtaccctccactgcagtacagcgaccgatcagcccgaatgggtgtgacagtggcggcatgtttctaatggtcgaccccttcaacattccaaacacattgggcgcccagtaaataaacacattaattttcattcatactatattatacataattcttataaattaatttatattattcagaattcaagtatttgatctccaagagagttagttcctttttattttggcatcattcgcctttttatttatatgtccaaaatcagacgcgaatttaggcatccgacatattattggttactgcattccattgcgttgctgtgtgggtctgttcaagcacattcagccatgccgtgccatcaagtcgatggaaagtcaatctatggatgaacagttcgcgcacaagtacaaattccaccccaaccttccattgagcgttgtcccgcttcacgacacggaattccatcggatgatgggctcaccggtgatgccgttgcgcgacggttatcagcaacgtaacagattctttgtgcgtccctcttccccgcggttggctcaacagcagagacacgaattcgacgacaccgcgatgcattag

SEQ ID NO: 82096 - DNA, 384 bp, Heterodera glycines
atggaggacatgggcctttacctggagaaaaaggagggcgaagtggccgtttttgacgcgacgaacaccacacgccagcgacgcaaatggctggtcgactactgccagagggagcgcatcaacccaaagtttcgcatattttttgtggaaagtgtgtgcgatgacccggacataatcgcagcgaacatttcggtctcacccattttggcccatttctcaactaaaatgcatgcatttcaggaggtaaaagtcaattcgcccgattatcgcggaaaaatgacggaggaagaggcgaaggccgactttttgcgccgcatcgaaaattacaaattgcaatatgaaccgttggacaacgaaaaggacgaccacctttcgtacatcaaa

SEQ ID NO: 82097 - DNA, 1070 bp, Heterodera glycines
ggaatttgtgagggtttgacctacgaggacttccaaacccgataccccaagcagttcgctgagcgggacaaggacaaataccattaccgctacccgtccggcgaaagttacgaagacctcgtggtacgactggagccggtgatcatggagttggagagacagtccgacattttggtcgtttctcaccaagccgtgcttcgctgtaagaaaggaaaagcaaattgcaagacaataatcccatattaaggcattttggcgtatttcaacaataacaaccgggcagacttaccgtatttgaacgtgccattgcataccgtaatcaaactgaccccaaaggcatacagtgagtgggcggttacggcacgatctctgctaattggaaatacattaggctgcaacgtcgaactgttcaaattcaaagtggacgctgtcgacacttatcgggagaagccaaacgagccgatggtaagcgaacggcggaaaatgaaaattgtaaacaaaaagtggattagttccaattaatgattcttcgcattgcctttgtcctcggaattcgcttcatttgtctttctttctcatgcctctctctctcttgcattccctcgcatttattcgttgcctcttttgtagtgggaacacatcgaaggtgaaggctgcattcgcatttgtcgctctccctggtcagttgcgcttgttttgcccacttttcttttcaatgtctttctgttgtgcatctttgcccaccttttgtgcttggtcccccccccctaacaaatccattaactgcgctatcactcctttttggcttctttcgtgcttttgctttccttacaattattttttggttttctattactttttaccttggcctgaaatgcactttcctctctagtggtttgcttttttcactttctccactcttttcgttttttcctaatttttctgtttcattaattaagaagaaactcttggccgagcccatccccgcaccaattcccgaggagagagagtcgtcaatctccgatgatgctgtcgaacctccaccatcccaaatagttcctctcaattag

SEQ ID NO: 82098 - DNA, 967 bp, Heterodera glycines
atgccgacagcggaatgggcgatggcacaacaaaggtccaccaaacggctcgcggtcgaggcgacggaaacgccggcagcgaaaattcgggcgaggatggcacaacaaacttccatcaaacggttcgcggacgagtatacggaaatgccggaggaaattctggagcgggcacagcaaacggccaccaaacgattcgcggacgagatggaaatggaaattccggcagcggaatgggcgatggcacaacaaacggacaccatgcaaatgccggcagcgaaaattcaggcgatgtcacagcaaacggcgccgacagcgcaaattcaagcgatggcacagcaaaatgtgtcgggctccgaggtggccgaattgcagtcagacaacgctgcgccagaaattacaacaaagagagggaggccgaaattggagtacgacggctatttgtacttgttcgagaggcggagtgcggacggcaaactcaaattctggcgctgtgagaagttcaaaaccaagtacacgaaatgctcggcccgactgcacaccgacgagcacaacgccatgcgaaaaacactgaatgagcacgtgtgcgaccaaagtgcggcacacgtggaggcgcaacggttgcggacggccatcaaacggtacgcggccgaggcgacagaaatgtcggcagaggaaattcgggcgattgcactgcaaaatgtgccgggctccgtggtggccgaactgccgaacaaagacgcgatggaaaaggtaaaacataacaaaagattttttgtttcgtattttcgagtgatttggcacttttttcagatggtgagacgtatgcgccaacgaaattgacataagctgaagggagctaacaaatgaggagaaaggaggaggaagcaaagcgatgtcaatgccgaagcgatcaaaaaaggacgaaaatgcttattgttaattaatgccgcccatatttttgtgcaca

SEQ ID NO: 82099 - DNA, 1147 bp, Heterodera glycines
atggagtgaaaacacctcaaattgaggttgacggcgacgacgatatagagagaattataatagttaattaattagggcaaggcaatgaaagtttttgcaaaattcaacgccttttatagaggtgaattcacttaaagaaattcattccaaaaaaggcaatataaaagcaacaaatctccgcaaagtcctcactaatttcaaccttctgcctatttggttgagttcatcactttcaccactgttctccaatacctattctatttcaacgtcaacacccaccgcatcttcgcccgctgcttctgtgcgacgacgacccaattttgtgaggcgccccccccaccctttcaaattttctgtttttcatttttaattgttttttttcagattgtgccagacgacaacagcagcacatcaccgcacttcagcagaggaggaggcagctcatcatcatcaacaacaacaccaaacaatgagcgacaagaagaaggaggagccgaagaaggaggagccgaagaaggaggagccgaagaaggaggaggagaagaaagaagagccgaagaaagaggagaagaaggacgagaagggcggcaaggacaaggaggagaagcggcgcagcaagaagagcgggaaatcatcgaagaagaaggacaagaagaagaaggacgggaagaaaagccgaaaggatcgcaaaaaggaggagaagccgagcacgggagacgccgctgtcgcgacgacgcctgccgctgccgcgacgacgcctgccactgccgaagcggcgccgaccaaggagcaaccgccagcagccgtcgtggaagccgcaacgccaccagccgcagccgagccagcagctgacgcagccaaggaggagccgaagagcgcggagacgacgaccgaccaaccgcccggcgacgctcctgctgctgatggtgccgcggagcccaaagaagaacagccgagcgcggagacgaagactgaccaaccgcccgtcgacgctcctgctgctgatggtgccgcggagcccaaagaagaacaaccgagcgcggagacgactacggacccaccgaccggagacgctgctgctgctgatggcgccgcggagcccaaagaagaacagccggagacggacaaacccgctgcggacgagtga

SEQ ID NO: 82100 - DNA, 170 bp, Heterodera glycines
aggtacaacattggtcagaagaggtacaacggtgattaaaagaggtacaaaagtaaatggaagaggtacaactttgattagaagagatacaactgtgatcagaagaggtacaacagtgattagaagaggtacaactgtgattagaagaggtacaactgtgattagaagag

SEQ ID NO: 82101 - DNA, 227 bp, Heterodera glycines
taattaaattcattgaaaataacgtaaaaatgcacaaaaaaaataatgttacaccgtccggattcgaacctgcccccccccccctcaaaatgatgcctcagaatccccaatcacacagggattctgaggtcttgacgatgtcaaaagtaaaatctgatcacgtattcgtgatcagcggcccaaataacccctaaagacatatttttggaagatttttgtgagaaaaa

SEQ ID NO: 82102 - DNA, 664 bp, Heterodera glycines
atgtccgctgaacgcgaggcgcagagagcgcttgaagaggagagaatgcgcgagagggaagagcgagaacgtgtcgcacgggaggaagcggaacgcgaggcggaagaaaggcgcagaatggacagaatcgaagtgggaaggggggggggggctaattaggggggtaattaatgagaatggaatgggccgagtcagccgagagcaaagaagactcacttgagaacggcacttttggctgtggaggggagggggcatcacttgacatcccatagtttttgccatgcgattgatcgcccgatcacttcccctaacttttcaaggctcgtgatcaaattgaacggtcgactttggcgtgtctgcagaagggtaaaattatttcagcaatgacgcgccttttgctaattaattggccaaatttgaggcccaacgcgaagccgaacttttgcgacgtgccaaactgtttcggcacattttgttggacggagacggacaagcggacatgaaaacggcaagagaagtgctcaaatgcgagccggaagaagaagcggtgctgaacgacgtgatcagacaggtggacaaagtgacaaacggtggaaaaaggaacagacaattgagagaaaagttggaaatggatgatcaagtcggcaggaaattaagaatttaa

SEQ ID NO: 82103 - DNA, 1830 bp, Heterodera glycines
atggccgctgacattggtcaaattcttcaacaattagttaaaaatcagacggaggcttttcaagcccttctccgaaatgcccaaacaaatccaaattccgtcaatcattccactatttattcgactatcaatagccaacttggccaattcacatataatccagaattggatttaacttttcaagcatggctcgaccgttttggcccgttcattcaggtggatggcaaggaccttccagacgcaatgcaagtgcgactgctgcttgggaagctcggtcaggaggagtacgctcgtcatgccgaacgtgtacttccaaaactgccgaccgatttcactctggcacagacaattgataagctcaaaattttgtttggggaaaccaaaagcattttcactcgtcgatatgagtgttttcagttagctaaatcattttcccagtcaccattagattttgctagccaagtgaatgccatgtgtgaacgttcgaaaatggacttgacaaaagatgaaatcaaggccctcattttcctcactggcctctcggatgaagacagagaactgagggaacgctgtttgcggattttggaggaagccattaagaaaacaccgccggaagtgatcacttttgagaagcttactgaagagtgccgtgcgtttttgtcattgcgcaacacatctcaatctttggcaactgtttctggaacaaacgccatcactctcaagccgcagaaattgaaggaacagcagctcaaaaagcgcagcatatcgcagcgcccatcggcgaaggcacaaagcaacaaaaatcgcagcccttccccttttcagcgccaaccaaagccgccatcaccgtgcaggttttgtggtcaaatgcattgggtgcgtgattgttcacaggcgccgacttgctcaaagtgcaaccgccgtggtcactaccgctccgaatgccgctcagcatcttcagcccggcccaattcacaacggtacaacacaacaatgtcggtcttcaacattacggacgacgacttatcggaatggataatgatcaactgcaggattaacaatactgatgcgtcattgatggctgactctcggtcccgtctgtcggtcattcagattggtttatgggaaaaattgggtaaacccaaactcataagtggcatcaaaaaggccaaatcatattctggtcactttttcgaaattttgggattttttgtgtgttcagtcacgtaccagggctgcactcttcaactcaaatgccacgtcgccccggacggaccaatgaatttgttcggattgccatggatcaaagcgttcgaaatggcattgcagcgaccaatcgctacgacactcaatctcgcacaggcacacgccgtcacagtttgcgacgacccaaacactttggccaaaaatttaaaacaaaaattttcaaaagttttttcctcaagtttgggtctttgtacaaagatgcgggcgcacctccagctcaaaccggacgcacagccaattttctgccggcctcgtccagttccacatgcagccaaagcagctgtcgacgacgaactcgaccgtttgctcgcttgtggtgccataaaatctgtggacttcagcaaatgggcggcgccgattgtggtcgttaagaagaaatgtggcaatgtgcgggtttgtattgattttgcaaccgggcttaataacagtctggaactaaaccgccacccgctcccacgcattgatgatatttttgcctcgctggagggttgcacagtttttagtcaaattgatttccgcgacgcgtacttccaagtcgaattggacgaagagtcaaaggagctg

SEQ ID NO: 82104 - DNA, 65 bp, Heterodera glycines
aaaacgcagccaagaattcttccgctgctgttccttggtgcgcgttcggttgaactgagcatttt

SEQ ID NO: 82105 - DNA, 402 bp, Heterodera glycines
atggccctcacgcgaaaatggccctcacgcgaaaatggccacgcgaaaacggccacgcgaaaacggccacgcgaaaatggccctcacgcgaaaatggccacgcgaaaacggccctcacgcgaaaacggccacgcgaaaacggccacgcgaaaatggccacgcgaaaacggctacgcgaaaatggccacgcgaaaacggccacgcgaaaacggccacgcgaaaacggccacgcgaaaacggccacgcgaaaatggccacgcgaaaatggccacgcgaaaacggccacgcgaaaacgtcctggcccgctaaaatcataaatttttatacaaaaagcaacaaaactatgccaaatcaatattgagataaataatttttaaaatcaaagatttgccaaaaaaacaa

SEQ ID NO: 82106 - DNA, 226 bp, Heterodera glycines
ggccgttttcgcgtggcagtttcgcgtggttgcacataagcgaattttttacttttttatagtttggaaaattttttcactcccgttttacttctggtgcttaattcaatatatatttaagtgaattttataaactaaattaagactgacaaattattatacagtcaaataattttttcacggtctaatgctctgctggtattagtgtaaactcaccatcccaaat

SEQ ID NO: 82107 - DNA, 577 bp, Heterodera glycines
aaaatttcatccgaaacgttgtcccaataccatgtcaaaggtcacatggaccattttgatcagcccgccatttgctacccgcgctatcgtggcccatccacgcgcaatcggttgcccacagggctgaaactgatcagacgggtgggcgaaaagctgatcaaggagaactacccgagcacggaagagtgagcataaattagggcaattatatctgccatattagtttttaataacaaattgagagtaacaacgtaacaacattttaaatgatttttttgaatcttttcgttggatcattcgttatcccatcttttccaacttggcattctgcttttatatctattattggactaattaatagatctaattttcctaacttttatattgttttgagcaaatgatttgagtacgtttcgctcggagctccattttccacttttctgctaattaatagggatgcgatttttaggttttggctacttcgtcactaaaatagttaaaaatcactattttggcgtatcgtcactattttttcactatttcgacattttttggaaaattccttaacaaaaatgca

SEQ ID NO: 82108 - DNA, 230 bp, Heterodera glycines
atgccaaaaggaattgaatcgaggttaactaaaatagtgagtaaaaatgccaaaatagtgaagaaatagtgacaaaaagtccgaaatagtgacgaatagtgacaaattttcagccaaaaattgagcaaaaataatttttattcactgattgcagttgcaaatgagtaggactgggatttttaagaccaaaaaacccaaaatagttacctaaaaaaatttttaaaattaaa

SEQ ID NO: 82109 - DNA, 683 bp, Heterodera glycines
ttatcccccataacacacaggcggatgacaccgtggtgattgacattggcactggcaaagtgacggactacgtgaagtttgatgctggcaacatttgcatgatcactggtggacacaacattggccgtgtgggcattgtcggacatcgcgagcgtcacccgggctcctttgacattgtgcacatcaaagacgccgctggccactcattcgctacacggttcgttcgttcattgttttttgggtttagttggttgtaaaacacttcatgaccaccacttttgggtcccaagcgtttacccgacattaattgttaactgtcatttcatttattttttttgtgaattttactcagtttccgcaaattttggtcgcgtataacggaaataggcatcaatttgtgtagcaaattatgtgaggcatagaaaattgggtggaaatttcttcattttcgaaaatatttaattgtttggattatattccaatccctttaaattcggaaaatcttgtcttaccagcaatcaggccccctatttccaaaataatttttttcttttctgtccaggatgaccaacgttttcatcattggcaagggtgcaactccgttgatcagtttgcccgcttccaagggcatccgtttgtccattgcggaggagcgtgaccgccgtcttgcgcagaagcagaaa

SEQ ID NO: 82110 - DNA, 131 bp, Heterodera glycines
atattcgagaacccgacagcaattttgtcgagaacgattcctggacgagaatggaaagctaaagcgagtgaatgaattgatcccattctcagttggaaaatggtaacttttggtggattgtaatatattta

SEQ ID NO: 82111 - DNA, 1767 bp, Heterodera glycines
atgccgcagtctcagccgtccgtagttgtcactgattacctcatcaaatggcacggaaatgtttttataaattggggcaaatttgtgccaattgttaatggtggaaaattgaccaaatatgtacatacgtaagtacaaaagggggattaaaagtttgatgccaattcggcgttatatgaacttaaccggggcaattactcattagtgatccatttattccttttcattttagttagtttttcttttctaatttaaaaaatgatcattatattatttttcaaatgggataaattattaattaagttttattttgcttaaccactttccatgaaattattcaatgtgaaaaactgaataacattgtttttatgaaaatttaaattttccaacaatcttaaactatgaacgcataattatttgggaccatttgaacccacgcgatggaaagtgccaaaatatactactcctaagttataaaaaaccaaatcataaaaaattggaaattaaataattctacaattttctctttttagcttagaatgactagcttcattcctcccgaacttttattcgaaatttttcaatttacgacgtccgttaacaacaaaaatttggttcgcttacgatccatttattacagaatgatcggcacagttgactacaaaaaaatggcaatgttatgcagttttttccaaggaattgtcaactcgtattttgcaaagcggaaatggattgtcgattttattgaaattcgttgcaatgaaaaagagggcaaaaaggagtttgaacttgcggaaaccagaagcaataaaacgattgaattgccgaaacatctgccagacaaaattcgtggttttgtatgcatctcgataacgtaaagaatataaaattgtattgattttaacattttgtaacatattacaggtttcttgaccaaaaagccattgaatttctgcgccattttcaccgacttttcggcacgtgccaaataaagttgagtattggaacaagcagcattttggcaattggattcttttattgtttcttatggccaagaatcaaaaaccaaatatcattcattgaatttcgggatgaccaagcgttcagccgaatgcgagacattgcaccgtccatattcagtgaattgccttctctccgtatttttgagtcattggaagatccattccccgcgtttcctgccatcgacagtaccaatgcggtaaatggacagctattggcacattggctgatcaaggcgcttccgaatgaaatccctaaaattgttcgttgttcaattgaggaacccgacacggcgggtgatttgccagcaaaaattggcgcaattaaatcggtatataaaaaattgaaattatttatgtttgtaactaactgttaatccctttaggcattttcaaaatcttctttttctgccaatttcataatccaaatgacgatacctgatgaaacaatcattgcaccattcgatgtgttcaacaaaaaaactggaagacgtctgttgctggatgattcccacgatcaaaatctgctgctaatttcatgcccaattaaacgggacaaaaaagcatggacgaaatggagggaagaggctcttcaaggaagtgagatttacacgtggaatttaattgatctcaccgcgggggacgctgacattggcgaatggtgaaaaatcattttgtcaatgcataaatttttatttttaggaattcggcacaattccccgatttaatggcgaatatgcaaaagtga

SEQ ID NO: 82112 - DNA, 395 bp, Heterodera glycines
atgtttgatatgtttgatgccattctttttcaatgtaaaacgttcccccgtctttctattgatcatttcaaatggcacaatataactaacatctctccatggaggaaacctaatagcaatgatgaaattcacgggagaagaagcattggcaaaagcctaaacggaaaaaaggttaaattagcaattaactattaggtggaacgcggacagaaaaattaagtgttttcttaataaattcgggataattaaattttatagctttctgagccaatttttagtcgatgacaattaatttatacgcaaaaattgatatgttccgttccaccctattttctgttactatcaccgatttaatgcttataattttcggcctccattggtgttctcgaatttga

SEQ ID NO: 82113 - DNA, 1512 bp, Heterodera glycines
atggacagaaagaatgtgaaggcgaattactacctggggaaggtgtacgtacaccagggacagtttgatgaggtgtgaaaattgggaacaaattgttacataattttataaatagtcaaattgtatggaaattcaatgcttacgttccattcatttttaggctatcaaagtgttgtcgcgggctcatgaaggcgttctcaatcttaagcaaacatatggcgacgaaataacccaattgttacggttagcgcgcagagaaaattgagttttttcattattttaaagtaattcatttgaactttgtttttaggttccgtcaagaagaagacaaacgcataactcaggagattgaacttcaaagttacttaaaccaattaattgacgacgacatcgccaaaaaagtgaaccaattggaggacaaaaaggaaaatgacgttgaagaaaaggcggaagaactgaagacacaaggggacaccttcaaaaaacagctgaacaatctctttgctcaggtaaaaaaagggagaattgaaaatcggtaccttttatttggggttgggtaaaaagaaaggttattcttgccggtattttgcaaaataaatgcattttttaaattttacaatacaccaattttagcaggtttcattcaaatttgaaaaagttcacttcacccgacgtcactgtcggcggcggcaccgcggacgactaattcctataactatttaaaatttttacaagaaacctgttaaaataggtttttctcccgaagcattttccatgaaaattacattttaagcacaaaaaaattgtctttcgtccattgatgcctccccaaattttggtaataatttcggtggtgtccctcctctcttttcgagtcaaagcgaatctgacatccatttcgactgattccatacccaggacccgaattcgaacaaaaattcaattcccgaatttcgaatttttcgtttaaaaatggtttaattgatcttttattgtagggttgctggttttctttgtttccgtattcgaaaagttcgaacaaatactaatttcaaaaaacttgtattttcaacttttgtttgaattcgggtcctgggtacgaattgatcaaagtggatgtcagttttcatattcagcgacaatcaaaaccctaggaaacattttttatgactccaaaaccgtttgtgacgctaattttaggttgacgatcgtagacggaagcgcgacctcccggactatttgtgtggcaaaatcagtttcgagctgctcaaagaccctgtaatcactccttccgggatcacttacgaccgacaggacattctcacccatttgcaccgagtcggacatttcgaccccgtcacccgggttccgtaagtttcgcaatcatttaattacttgtcctaagaaccaatttatttaagtctcactgccgaccaactaatcccaaatttttccatgaaggaggttgttgaccattttgttcaggaaaacgaatgggctatagatttttga

SEQ ID NO: 82114 - DNA, 3687 bp, Heterodera glycines
ttttcatgattaacatatttaattttttttcttactttgatattgcccaatgcatttgggtaagaatcgatattaaaaatttaaaatacttttcccacaactgccaaataaccattagaaaaagtttttgttgtaaaacaaaaaaaaatttttaaattaatttttgttgttttaaatgtgtattttggctgctgggataataataattttttaataaaattttatttaggggggttttcgttaattaccttatgctaaacctaaaaatgttaatttaattttaaaatttattttatcgtaaaaaaggacatttttggtgaaaatctgttaacaaattttgcactcaaattaattttttccaaattttagtgttggaggcgtaaaatttaaaaatttattgactttcaataagctttgatgcttaatttaaatttatcttcatttttaattcgatatattttcattagttttgtggaatgtcgaacaccaaataaatttattaaacacaaatggaaaataaattaacaaatatttgtcggagggacggagcaaattggggaagcacaaataggaaggaaaaaaacagaatgaatgaaggactaagggaagggtttctaatttgttaattatataaataaacatactaagaaaatattttgctcttaaaatattagaatttgtatttattcaatttaaaacgctaaatttatatttaattattctgttaaatttaaaatatggttatgattttttaaaattatttatgattttcatttgtttataaaaatttgtggactttaaaatcgtgtttcgtggtgtggcatatttctttctgccctcggcacttgcatcttggtttgatcttttttctgcttttatttaatttatcgtttctgattaaaaaatttttccatctgtttaataaaaaattgtatttatatcaatgattaatgttgtgtatatcactcaatattcaaatgtacgccatttactgtactcaatttcgtgtcaatactcatctctcagcatcgtccataaatacccatcactttgtcactcatttgtttcttcttccactcattcaacacatcattttattattcatttattcttcatccaccgacacaccaattttattatttattcttttgcctccgacaaataaactatttttattcttcgttgtgttcaccattgaacataacatttttggcgcagtcagcgaagtgatttatttttgtttcatcatctttttgcgcctagcatttggcgcaaatcaactttggctaaattgtcaacaattcgattggagcatctcaaattctttatttattttattctctcatcattcattttggtttttgcgaagttggttgtcagcagctcgcatcggtcggcacttcacctatttcactcattttccatcaatttcgacctttgcccaccccgtaacacatcggcttgaaacgtcaaggcaaaatcatagcccgctgaacgccaagcaagccgagaagcctttttgcaacacttacgccgtaaaaagcctctgagtgcactgttttaaggaaagacacatttgtgaaagtgtaagtcattgcgaccgctacactcagcgcatttgtgcatcttcccatcaccaaaggtcgtttattgatttcccactcatttttctgtgcctgaccaccactgcagcacttgctggccgacaccaagcaaagtcatttcaatctcttaccaccattcaaattcactactcatcaaatcattgctccaattgaattcaatttctgacaaaaatggccgttgactttgctcaaatcctaaagcaattagtcgaccaacaaactcaagcatttcaaaatttgcttcaaaatacccaaccaaattccaatgttcccaatcaatcgacaatttattccaccattaattcccaacttggtgaattttcatacaatccagaaatggattcaacatttcaaaattggctcgaccgttatgggcctttcatccaagttgacgggaaggacctccccgatcagatgcaagttcggctcctgctcggcaagctcggatcggaggagtacaaccgctatgccgaaagtgtgcttccaagcaagcccactgatttcacactggcgcagacgatcaacaagctcaaggctatgtttggtgaaacaaaatccattttcacccgtcgatttgaatgttttcagctcacaaaatcaatttcacaatccccattagatttcgcaagccaggtcaacgcaatgtgcgagcgatcacaaatggatctgaccaaagacgaaatcaaagcactgatcttcctcacgggactttcggacactgatcgagaactccgtgagcgttgtttgcgacttttggaggaagcgaaaaagaagacaccgccggaagcaatctcattcgagaagctcacagaagagtgccgcgcgtttctctctcttcgcaacacttccaactcattggcacattcaactcatgtggccaattcaatcacaataaaaccccaaaattaagggatcaacaaccgcgaaagcggaatttgtcgcaaagctcgtcaaaggcgacgaccaccatcagcaacaatgaacgatcatcccaatttcagcgcaaaccgcaacaaccaccgtcgccatgccgtttctgcaatcaaatgcactgggtcagcgactgtccaaaggcaccgatctgctcaaactgcaatcgtcgtggccaccatcattcaaaatgccgtctgccatcgccctcatccaagtccaattcacaccgcaaccatgccacaatgtctgtcttcaacatcggagacgacatttcggattggatcatggtggattgtcaactcaatggcagcaaagcatcactgatggccaactctggatcacgtttggccgtcattcagcaatcattatgggaacagttaggcagccccaaactaaaaagggaatttcaaaagccaaatcatattcggggcactttttcgaaatctctgggtatttcttttccaaagttttctccccaagcttaggcctttgcaacaaaatgtgtgcgcacctccacctcaagtccggagtgcaacccgtcttctgccgtcctcgaccggtcccacatgcggccaaatcagcagttgacgccgaacttgatcggctcgtcgcttgcggtgccatcaaacaagtcgattacagcaagtgggcagcgccgatcgttgcagttcgaaagaagaacggcgatgtgcgtgtgtgcattgactttgcaactggcctcaacgattgtttggaactgaatcgccacccactcccgcgcatcgatgacattttcgctgcgttggaagactcaacagtattcagccaaatcgacttccgagacgcctatttgcaaattgcgttggacgaggagtcgaaagagttagtgggaataaacacacaccggggcctttttcagtaccaacgcttgccatttggtgtcaaaagtgctcccagcattttttaaaagcttatggatgagctcaccgccggactcagcggagttttttgctacttggacgacttcattgtggccacaccaacactggaggaacaccattcgcttcttaataaattcttttcccgtctccaagactggggcctgcgtgttcatttgaacaaatgcaaatttctgtgttcccaaattaag

SEQ ID NO: 82115 - DNA, 1409 bp, Heterodera glycines
atgggaagatgcacaaatgcgctgagtgtagcggtcgcaatgacttacactttcacaaatgtgtctttccttaaaacagtgcactcagaggctttttacggcgtaagtgttgcaaaaaggcttctcggcttgcttggcgttcagcgggctatgattttgccttgacgtttcaagccgatgtgttacggggtgggcaaaggtcgaaattgatggaaaatgagtgaaataggtgaagtgccgaccgatgcgagctgctgacaaccaacttcgcaaaaaccaaaatgaatgatgagagaataaaataaataaagaatttgagatgctccaatcgaattgttgacaatttagccaaagttgatttgcgccaaatgctaggcgcaaaaagatgatgaaacaaaaataaatcacttcgctgactgcgccaaaaatgttatgttcaatggtgaacacaacgaagaataaaaatagtttatttgtcggaggcaaaagaataaataataaaattggtgtgtcggtggatgaagaataaatgaataataaaatgatgtgttgaatgagtggaagaagaaacaaatgagtgacaaagtgatgggtatttatggacgatgctgagagatgagtattgacacgaaattgagtacagtaaatggcgtacatttgaatattgagtgatatacacaacattaatcattgatataaatacaattttttattaaacagatggaaaaattttttaatcagaaacgataaattaaataaaagcagaaaaaagatcaaaccaagatgcaagtgccgagggcagaaagaaatatgccacaccacgaaacacgattttaaagtccacaaatttttataaacaaatgaaaatcataaataattttaaaaaatcataaccatattttaaatttaacagaataattaaatataaatttagcgttttaaattgaataaatacaaattctaatattttaagagcaaaatattttcttagtatgtttatttatataattaacaaattagaaacccttcccttagtccttcattcattctgtttttttccttcctatttgtgcttccccaatttgctccgtccctccgacaaatatttgttaatttattttccatttgtgtttaataaatttatttggtgttcgacattccacaaaactaatgaaaatatatcgaattaaaaatgaagataaatttaaattaagcatcaaagcttattgaaagtcaataaatttttaaattttacgcctccaacactaaaatttggaaaaaattaatttgagtgcaaaatttgttaacagattttcaccaaaaatgtccttttttacgataaaataaattttaaaattaaattaacatttttaggtttagcataaggtaattaacgaaaacccccctaa

SEQ ID NO: 82116 - DNA, 292 bp, Heterodera glycines
  unsure (1)..(292): unsure at all n locations
atggacctaggattccatgttggtcctgattttttagacaaaaaacccnaggtccagggtaagtctgggttaccgaaaaaccgaaattctgatttgtaaaaacggtttttcaatgaacatcgtttagagcaattcccgaatttgttcgggttccaatcccgaatgccatgcctggacctgagttttcctgacaaaaatcaaggaaaatgcattttattatgatttactagttttttcaaaaaaattttaaaaaaatcgctgaaaatttttgaaatttttttttactttttta

SEQ ID NO: 82117 - DNA, 762 bp, Heterodera glycines
atgttgctcaacgaaaaacagaaacaaaatccatcgggcgaagctgcttcttacgttgttactggtgctaatgcgatttccgtcagtgaaaatgggcaacaaaaaaaacaacaacaacagcaaatgggtaaaaaattagaaataattaaattaaattaaaatggaaaaatatgcgggaaaaagtgccagcaaaatatttaataaatctcgagtcacttctgggccaagtcttgataaatttccggactttggcattgctccgaaaaaattgtattttaatttatgtacctatataaatttatctctgacaagcattaaaaacagcgaaaatttccgcaggaaaatataatttttgggtttttaaaaaccattatcattttttgaggggggggggggaatcttttacattttttttttgaaaatctttcaaaaatttatgccactgattttgcttacaattgtcttaatttgttttttttcctcaaaattagctattcgtcacgctcgtcgagttggccttacgcccgcactggtgggcaatgtcaaaacgcgcaaatacagcagagaggtgacgggggaagaaaaaatgccacaaaaaaataattcaaaaaaaaatgccatcccccaatattttaggagcgaaatcggcgccgaatggaggaggtgaagaaggaggaggaggaaagcgaaatggacaacaatttaaatgataaaaatgagaaatgaattgttttttgttttttgaaatttatttataataaa

SEQ ID NO: 82118 - DNA, 157 bp, Heterodera glycines
atgtctatggcaataaccaaatgtgctggtcaagcggcagtcgatagcacgggagctgttccgccagcgccgctttgctgcaacaaaattggatggaaatggttcattaatacggtatcacgaatatacagtaacccacacgatgcgattagttaca

SEQ ID NO: 82119 - DNA, 935 bp, Heterodera glycines
atgactttttcaaccaatttcatcattgtccttggcaccctcgtccacttaagaaaaaagatattcggcaattatttaaaaaatgaactattctggagtcggagccctcactgttccattccaaagttgacaagcgtcttgttgtatatggacgttgatgagcttgatatggcgtcaaagttggtaaaatcgcagaaaatttgcaattcatttcaggaaggttgccgtccggaccaacaaaaatactccaaataatccgaaatcacgtcgtcattaagccaattgtcaggctgttcattttttatttgaaaataatttataaggaattttcttgtacctttaagcatatgcgggtgtcgttgagtattccgttgcgtacccaccatttatctttgtagcatttacaatgaagttcttcattttgcaaaaaaagaaggcttcgctagcattagggatgtgcgagaagtgatttttgccgggaaccgagaccgagaattgaccccgggaaacgatacgagaaccgagacccaaaaaacccgagaaatttctcgactcggcaatcgagaacttttacgagatacgtcgggtttttcctttgcaccagttcgttgaatgataagcagccctaaaaattctaaccagaaaatcataattgttttcaaattcgtttttagacacctttttgtattttaaagtgttgatgttacatggaaatttaatgggctttattacactcaatggcacattaactattgtggttttttttttgaaacgtaggataaataatgatttatccttattttattgttttttgcaacgattgtttttcgcgttaatttaaaatatttttgatccttcattttaattttcctttttattgttgtcttagtgttctctcaagttttttatatattttgtgcttttctaaaagagta

SEQ ID NO: 82120 - DNA, 1221 bp, Heterodera glycines
gccttcctccatgacatctctgttggccattgcaaacgctttacactcatcggaaaggactcaaaaagcggcgaattcgacgccgtgttcgaccaggacaaatggcacaatcagctgttgatgagcagcaccaatggacgaccaaccgaagaacagcaacaccaattcatggacgaattggccgcgaaattgcctcccgctggacgactttgtattccgatatcggtcagtcagaaaaacgaataaattgatcaaattaacttttgtttgtttttgtttttttcagatttcgcctgctgactggttttttgacgtgattggcatgcacaaaaaccccctcaaaaaactcactttcttctatttttccgaccaactgttcgtcgcattgtgctcgttttacgtctgttacgccgaattaatagattttctgctattctctggggaagaatatgaagtgagcgagcgtaacacgtggccacaacaaattcaacccgacaaaatcgcgtcaaaaattgcttttcagtcgaaatccgatggatttgtttgtggatcaaattgaaattcatttgctggttttgtcgtgtgagtttctttgttcgcgaagtgttcaaaaagcatttaccattgcgtcgcttaatctgtttttgcttgttagatcactgtcaattgggttgccttcgcttctatcttctgctggtgttgctgtgctgagtactccttcagattgctgctccattggacggacttttggacttgcgtcaacttccaagcggatcacacaaatgtgccgttgatcaatttcgtgagtttttttgccatttggttctccctttgccaattttaaacttttttaaggtgttcagcatcagcatggtgtgtttgtacgtcttcgagatttttcttcaagatgcggaatgatgtcgccacggaatgtgccatcgagtgaacataagcagagacgaatggaacgatgctgatgccaacaaaacataaccaatgcgatgaaacaataatgtgatggatgatatatgatatatcagattacctatatgttcataaactgttgtattccattatataagtagatgtatatgttatgcatggttgtataaactcactcagtattttgctgaccaattagttttggagggaatcgccacattttgggtttcacacttttcatatggcttttaattgtgatatttcagttttttattcaca

SEQ ID NO: 82121 - DNA, 1100 bp, Heterodera glycines
atggaaattatcaatgccaatggaaaagcattgccaatcccacaaaatccgttgccgaacaaattcatcggattcagaagcattttgatcaagtgaaaaatgaattgaatttgtaaatgttttctggcaatttttttgattttcagcttcttcgaccacaatgtgctcactttccttcgccgttttttcaccaaatgtgaaacaaaaattcacattaccactgaaaatattcgaatttctgagttctttgtgttcaccatttggccaatgttcaaggacataattcatgtgatgattttcaaccccatcacttttcgtcaaaaccgccaatttgccccgtcaatgctcaacttttgtccgtcccttcgtgttgttgcttttgatgacggcattttgcccgaatttccgcccgacgacagtgccaatgcgtcggatggccaagcggtggccaaatggctgttctcgcctaatcccgacaatttgccgaagatgcttagcattgagaatttagctgtgaaccaatggtcgacattaaagggacaaatcaaagcggtgatttgtcaaatttaattcgttcgtttttaaattgttttcttcactttttaggcattttccaatgcttcttctcctgtttcctttgtcatttttgttggctttctgtcgtcctcttctctttcttccgttgtgccattcgaactgaccaacgaatttacccaagagaaattgacactgtcacaagaatatgtcaacgtttttaagcttatccgttgttcaattgcagcaggtggtaagggaaaatggatgaaggaaatgaatgaattggtcggaggacaaaagaacaacaaaattggcattttcatcggagacgacgcaatcgacaataagtgaaaatagataatgtaaaaaatctgctaattttctcattttaaaattgtttttctttcagtcttctcggcgatttgcccggggccaggtgtgatcactgatcagaaacattaaaaaatgaatttgatgattggcttatgagattatttgatctaaatgttgggcattgttatttaaatgttgttgtatttgattttcgttcattcacaaataaa

SEQ ID NO: 82122 - DNA, 307 bp, Heterodera glycines
atgacccctggcggtacaccttttgtgctggctgttgttgctgctgttggtgttcttcgtctaattgctgttgatcatcattttgtcgatgttgttgttggtcgtcctggtgatgttgctgtgtactggttgatgtgcttggatcaacaacggtcattctgctgacacttggagttttttgtttgtttgtgtgatcaaatcgacgatggacggacgattaatcgtcacaaattaattgattaatttgttccacttcaattttagagcaattatctttattatgggaaaaagcataaaaattgcataa

SEQ ID NO: 82123 - DNA, 1887 bp, Heterodera glycines
agcacttttgcagacaccgtttttgagcctggccgggacaacgcaattgttgtggagttttacgcggattggtcggtcatttgatggattcccttttcttaggcttttcccctttttcaggtgcggtcattgccgtgcttttgctccattctatcgccaattcgcttcgttggtaaagcgatggagcgatatcgtacaggtgagaattgagattaagtaaggcctgatcagaaggccattggtccatttcccgatcaaatttctccctcactttcattaggttggcgccgtgaattgtgccgacaatttcaatggtcaaatttgtcgttccaattcggttgcctattttccgatgataaaatattttcctcggtctgccaattccgtcagcgatggcattttgatggaatccgcgcattccggcacaaatcttagggaccaattggcagcgaaagtgagacggagggagaaatgggacggttaatataatacaaaaatgatgaaacatttagcttctcaatgaatacaaccgatttggctattcgaattggcccaattttcggcatttggaagtgactgtgtcagttggaggaccatttgatggttttacatctctttcactaagttcagaaacactcgttttgaggacctttggcatggcattttcccgtccgccaactttttactcataatctttgaacaatttgacgctgttggtgtccaagtgaggacaaaagcaccggcttttgctcattcgcattttagtcaattctcgacctttggcagaatcggaaacaaatcggagtgagacggacgttgtcaaattcaccgctggtgccaatgttgggtaataattgattaatcggcagggactcattagcaccaaaacagaggaaaaggccgagtgagggagagggcgtattaagcatttgcaccagagaagggatacgatggatttccgttttccgacacttttaggctcggaattccgattcccaattttttgggcgtcggaattgctttctcaacgagtgcccccccccccctctcccccctctccctctgccattttccccccattctccaacgattaatttctcctaaatttaggaatcaaaaaattcccttatgtggccatgttcaagagggacgaccaacagtccatcttcatggagcagtaagagaatgaaacggaaagggaacaatttttggacagatttcagggagccgtcactctggacgaagcgatgcagagagtgcagccaggtaagagatcgggcagacaaagagtggggaaggaaagagtgagtagaacggagagaatagaagaaaagggaagagagagagagagaaggacgagagaatagaagaaaagggaagagagagagagagaaggacgagagaatagaagaaaagggaagagagagagagagaaggacgagagaatagaagaaaagggaagagagagagagagaaggacgagagaatagaagaaaagggaagagagagagagagagagaaggacgagagaatagaagaaaagggaagagagagagagagaaggacgaaaagaaggaacggactcgacccctcccattgaagggaatttcatttctttggacactgagcagcaaaagagcacccaatcggtgcgtccccacgtcgatgtgatcgactgcgaacgttttcccgatcggtctgtcctttcctttgtctgatcacttctttcgcctttcccttcacaatttctctttcagctgtaagcaattgtattttgtgtcggaaactgatctgctgaaggcggtaattcttctgccctgtcgccccttttaccctttctcaggtgagaatggcactgcttgacgaagtgactcgaatggatgaagt

SEQ ID NO: 82124 - DNA, 384 bp, Heterodera glycines
atgaaccgacggtaaaaggattttaaaagtctaaattcagcattatttagctaaactgttttccataatttcagttggatttgcaacgacgtttggatggacattttcccatcctttgaccgtcctcaactcggcctcaaattggcacttctttcgccacgtttcaatgcgttggtggacaaacatttcaatggcaaaagcgaattgccaatttggagatcaatcgaaattcacaagggcaaaggaccagaaccgaagctgtttgtacaaattggtgacaaatataacaaatttatggaatttccattgcccgaccgtccgttgcccagcaaaatccgttttaaatggcttcggattaagtaatttaaaatcagagttatggca

SEQ ID NO: 82125 - DNA, 103 bp, Heterodera glycines; identical to SEQ ID NO: 81019

SEQ ID NO: 82126 - DNA, 263 bp, Heterodera glycines
atgtcccaagaggaattgctgctgtcgttccaagatgaaactgctctggactggttcgttcggcttgcccatccgtcgttgtcctttcgttctggccatgccgaattggacgcactaaatgccattgtcccgggcgaactggtcgaaattgttgggcgggaatcatccggcaaattgcaggtggaaaatgaatcaaatcgctgaaatgccatagatggtggacctctttttgaaaaaaaaaatttttttttaatttttcgcga

SEQ ID NO: 82127 - DNA, 661 bp, Heterodera glycines
atggccaaggatagtaaaaacaaagttgccaaaatgaaagaaatgataagtgaattaaaggaaggaaaagatttcttcttatttgtgagctaattaataaaaattaattgaaataggatttaaattattgtatattattaggaggtttttaatttttagaaaaaattattttttttcaaaaaatttaaaaaaatttgtttagaattcataatggtaaaataatgtttgttttcaataatatttttatcattgataccaaaatatggtttttcgcattggatattcttttttttaattttcaagtgccaacttggctaaatcaatcactcttttttacagtcagctgatcagactgatgatcagccgatgtttttgtgggaggatgggccctccgacgtttctctgttccgcgcactgaaaatttgcgtaagcgaagtggcggatgagtacgaccaaaaatttgtcgacataaaattggacgcccttttccaactcgaactgacgcaatttgccaaattcattctgtgcatggacaaacatttgaaggataaaagaaaaaaagatggtgacgaaatggtggccaaattgcacttggacaaaatggccaatttattggagggagaaaatggggacgaatttggcgcatttctggtcaaaaaca

SEQ ID NO: 82128 - DNA, 121 bp, Heterodera glycines
atgatacgcgggaaggcaccacaaaagcgccaaagggtgcgaaaggcggcgccgcggcaacaaacgcaaatcgcccattggtatcgccggaagttcagtcccgaccaccgatcactgtccg

SEQ ID NO: 82129 - DNA, 1352 bp, Heterodera glycines
atgccattcaatggccaaggcaaacaacagcaacagacaattgtaagggatacggtaaaggaaacgggaacagagatactgtacaaagaaaacgggagggaaatcagcagtcacacaaacaaaatgatatcaaatttatcaatagtcataataattttcccatttcgtgtacagtccgtcacccgtcccgcggccggcgctgctccaccgccgccgccgcatgtgatccggacgacagtgcgcgatcggctcaacgccgggccgttcttgcaaaacggggataacggcccgcggatcgcccatgtggccaatgcggcggcagtgctcaaaacgaccgaaaggggcgaagagagcgaaacggggcgcgatttgagtgccgaatttcacaaattggagaggtaagtgacgaaaaagaaactaattatcacttaatattggcttagactgttaaaatcggctgaagattatttggacgaaacggaaccgaacgaagcgaaacgaacggcgaaagaagaaggaaggaaagggacggcggtggggagggaagtgccgtcgtggacggagggacacccccaaggtaaaatgggcaacaaatcccgaaaatgaaacaccgattcaggcgagggcttctcccccctgcgcataaatccgcttcgaaggccgtttatggaggacccaagccgaccccacgcgattttttactcaaccgaaaaaatgccgcggccgaaaagtggggacaacgaaaggtgagaagggatttaagatagaagggtttttattttttaaaatttaaatgccagaaatggagaagaattttatcaacggcgaatccgacgaaacgaaagcgaagaaagaaaagggaaaaaggagaagaaaatgaataaatgagagaagaaagggagggacggagggaggacaaatcaaattgttggattaagaggacaattaaagacaaaccaaaataattttattgctcaaaaattaataataattgttaaaaatatgcaaaaatatatgtttttattggcaatttcatttttcaccacttttcttcgtttttttcgcgtgccatccttcgctttccgattacaatttgtccgaaaatgtctgcgattccgttgcctttcttttccacttccattcgcttgacccaatttcgccgtcaccaaagtgtttatcgatcaaaatcccttcctcccctccccatttctgtccaatttgtaaatgttttttcactttttaaattggctggcagcaggccaaccttggcatttggttttgtcggttgtgttgcattttcttggcattttcactggcctttggatttggtatatctttccaaaagaggtaaa

SEQ ID NO: 82130 - DNA, 506 bp, Heterodera glycines
atggggctgttagttttcgacagtggtgatatcgacagtgttggtttcgacagttattgatttcgacagtaaagcttatttttaaaaaatttgttccatattgcataagtctcgtaaatttgacaattaaaatgataagaacatggctcttatacattgcagaggggttcgagattttccaatttgtaatggctgatcaaaatagctgtggtagctcaaagtgctgtgggagcaaaagcaacaggggccaaaatgaaggaaagatgactccaaacaacagtcaaccctccagtggtggatgtggtctagtggctaagacaacgggtccacgtaaggggccccgagcagcggttcaaatccggccttccactccaatttttcgcctaaataatatggttacacttggcggacaccccaggtcgtttggtcttcacaccactcgacactccagaaacaacagctggcaatggggcaaaagaaccggaggcgcgccgatccttgcatag

SEQ ID NO: 82131 - DNA, 416 bp, Heterodera glycines
atgccgttgagaatcggcttctgcatcggcggcttgtgcgccgacaaaaaaagagtgagttttttcccatcccaaaataaataaataaataatttttttcaagaccagaaaacgcttcagtctctctgacgccagggtgcgcaggcgaccccattggtcatggccgccaaccgcccctttgtgtcgcctttggctgggacttcgcaggccgacgtgattgttttttttctcaacattaaatttcagcccaatgtgcagcaccgggtgaaatttgcgcaagatgagctcgtgtactatgtgccggcaggctgaacgaattgtctgagggctaaagagagttagaataggatgatttaattttttaaatcgatctttttatttttaataatttttacatttaacttttgtaaagttta

SEQ ID NO: 82132 - DNA, 307 bp, Heterodera glycines
atggagctaaacgaattatcgtcctggtacgacattctgcaggatgatgaggacaatgtaaaaatgttttttcatttttcattttcaaaaattattattccagattttaaattggttcacaccggtgacggctcgcgacgtttgccaggaggtgttagcaattgcacaagagcgctgcatgccgtttgaaaagattgttaaatggaagcaaattttggacaaaatttgtgctcagatcgcccaaaaaaaagtgatcattttgtgaggaattcattttaaacgtatgcgcttttttcacactgttaaa

SEQ ID NO: 82133 - DNA, 737 bp, Heterodera glycines
atggcaattaatatttgcgacaagaaagcgcttgtgaatcaaatcctcgggcaagcggacattacagtgacaacaagcggcataaccgtgagtgggccacgtctgtccacaccacggtttattccgttcgatgaatgcggccgttgccgcgcatgtaaagcaacagaggttgagatggacacaatggtgaccaaagaggggatcacattgtggtgcagccgggtcagcaagtcccaattcgtcccatttgatgccgtttatgatctacctggtcactgcttcttccgtgtgaaaaacaaggccagggtgttcaacgtgccctacggtgacttgccctccgacacgtgcaccactcccaccactacaacacaaggaacgcaaaccaatatgcagcaggacctgaagcgcaaagctaaggtagcacttgatttagtggaagccgggctaatggccgataccatgcaggacggcgtgcgttggaagaaggccaaaaccgcattcagtgtactcgggaacctacttttagcggaatcgttggacaacaaagtgacaaacagtcctgtggaggaacagaattatgtccaggaagagcccagacgagacgaagaggaaaacaaggaggaccttggcgacattgacaaaacgcttgacgagttttttgctagtattaaagcttcgacctcaaacatgtaaatcattttgtccccaaaaaatgcttaatacacaatcctttacca

SEQ ID NO: 82134 - DNA, 338 bp, Heterodera glycines
atgagcggaaagtatttagttttcaaagtgctggtcattatctctacaattaaagtgattgttgataaatgcgtggattattacggcagttccaagcattgggaaaagttgggcaattcggcaaatgacccattttactttaattgatgtttcttttttcacagattagtcagatgcgaactttccgacccggcaaatcaatccgaaatcattggttacacagtttataacatactgattattgaggttgctgaatttttgtgctacgcaatgctttggctgatcagttggtggaatcagtgtcagtgaatgatcatattaattcataggcacaaaaa

SEQ ID NO: 82135 - DNA, 861 bp, Heterodera glycines
atgttcttcgccctggacgaagaccgattgccgatggcgtccacaagcatggcggtgtacccaaaaattgcacattggagcatgtattacgtgaaggaacgctaccggggacaccaattgggccgtgcgctcactcgacgagccatggaaatggctggggatagacacattttcggttacggaggtggggaagcagcgcattattttttaattggcaatgcttgagactctcggtctcgactcgagaaaactctcgggtttaagatttatgaatttttgggcccggcggtgccgattggcgcttcatcgaaaaaattaagattgcgatagatttttgtttttcttcgatattttggtcacaaatattttaaagtgtattaaatttttctgatacagtcaaatgctcgagactctctgtctcgacttgagaaaactcttctctcggggttttttttccgctcatttcaactcgagattgagcataattagtcaaaaataggaaaacatatcgtactattattttctccttaagaaaaattacatttcgacaaatttggttttgcttgtattccgttgagagaacccgctttagttgctgaaatgtgggccaaatacgcggaggagtacggcatgtgccatttcttggactggcagctgtggtcactgctcgccaaaagtgccgacgtgcgacccgagcggctggacaacgactcgagtgtggtgctgaaggattggcaagaagtgcccttccagacactgttgaatttcgacgttcaacagacggcgggcatcgaccggtcgatgtatttgcgagaggcactgcgacttcccgaatctgtggcgaaggtgtgccatcattga

SEQ ID NO: 82136 - DNA, 369 bp, Heterodera glycines
atgtggcgaaaagcgtttgggcccaacaatttcggcatgttcttcgccctggacgaagaccgagtgccgatggcgtccacaagcatggcggtgtacccaaaaattgcacattggagcatgtattacgtgaaggaacgctaccggggacaccaattgggccgtgcgctcactcgacgagccatggaaatggctggggacagactcattttcggttacggaggtggggaagcagcgcattattttttaattggcaatgcttgagactctcggtctcgactcgagaaaactctcgggtttaagatttatgaatttttgggcccggcggtgccgattggcgcttcatcgaaaaaattaagatttttgcgatag

SEQ ID NO: 82137 - DNA, 381 bp, Heterodera glycines
atgttcaattggttcagtcggtcgcctcctctcttctccgtgccgtactgctccaatttgccggccccgacccgtccgccaagttcgactcgctgctctacaaaacaccgtcgaccaacgccgagtcctgcgcatcctccgccaactcatccaaaatgggcccgtgcagcggcatatactcactccgcagttcacgcgccattctctgcctttccccggccagcgcattttttcgatcagcgacgaacacgtgtcgctgatctgagcagcaagcagcagcagcgagtggacgaatttagtgctgggcaaaacagtggaatggcacaaaacgatggaaataatgccaacgaattaatggacaatttaaagctagcagccaat

SEQ ID NO: 82138 - DNA, 1166 bp, Heterodera glycines
atgtgggccaaatacgcggaggagtacggcatgtgccatttcttggactggcagctgtggtcactgcttgccaaaagtgccgacgtgcgacccgagcggctggacaacgattcgagtgtggtgctgaaggattggcaagaagtgcccttccagaaactgttgaatttcgacgttcaacagacggcgggcatcgaccggtcgatgtatttgcgagaggcactgcgacttcccgaatctgtggcgaaggtgtgccatcattgatgccaaattctctctatcatttcaatgccaaattccttcaaaggttgtcatatccaaagagacgggcgaagttatcggcatgtgtcaggcacggcatctgatgcgccgaaggattggcatcagtctgttctatgccgaaagatcggtcagtgtgtgaaatttcaacaattttcattatctaattgttgtgctaataatgcctcgaaagtgccttaatagctaatgatgcattactgccttaggcaatagcattacctataattagctaattagttcatacgcacatttgcccaattttcccttttttctctgctaaaacatatgttcaattggttcagtcggtcgcctcctctcttctccgtgccgtactgctccaatttgccggccccgacccgtccgccaagttcgactcgctgctctacaaaacaccgtcgaccaacgccgagtccttgcgcatcctccgccaactcatccaaaatgggcccgtgcagcggcatatactcactccgcagttcacgcaccattctctgcctttccccggccagcgcattttttcgatcagcgacgaacacgtgtcgctgatctgagcagcaagcagcagcagcagcagcgagtggacgaatttagtgctgggcaaaacagtggaatggcacaaaacgatggaaataatgccaacgaattaatggacaatttaaagctagcagccaatgtatttaaaaaagtgccgattatatttatccgtatttattttttgactgttatgccattgtatatatatgtatgatcataaagtttaaagcaaaagcaatgaatttaaaagaaatgcgcagtttaattggatagcttaaaattaaaaaagttgctatttttatattcggatattagcaatctttttaaaatagtca

SEQ ID NO: 82139 - DNA, 1219 bp, Heterodera glycines
atgcacattctcaagtccctcactgtcatcattgtgttcgtcatgttcggctggactctgaacggactgagcaccttttatatgccacttttgaagctgtcgccggaggacagcatcagttttgccgctgggcttgttcagatgactctcgtcgcatcggccagcaatacacccgttctctatgtgttcaggtgggaaaatgtgcccaggagtgtaataatttaaaccaaaaaaatatgacagcgaaattcgggattggtcataattagagctcgacctggacctggatacaggcctgaatttttcctgggtccaggtccaggacatttttcggcaacctgggtttttcatggacctggatttttgtccagaaaatccaggtccaggtctaatgtgaaaaaaaaatccaggtccaggcaaaacacgaaaaaacctggatttcctggacaaaattttagaatttattatttcaaatgactgatgttttttttcaagttttcaaaaaatgattaaatagatttaaaaacagattattattgtaaattacctatatatttttaaatgttcccatttgtttgcttttaaaacaaatttcaaaaaatccagggccaggcttggatccagaggtctagaagagccttgatttttctggatttttgtccaggaaatccatgttcaggtccaggccatttttcaaaatgtcgagctctagtcgtaacgttatccaaaacgaaagcgggggcgggggaggattcgactttcgccaaaaacctcatttttacttgccaattcccaaaattttaaaaagttcagcgctgaatatcgtcattgcttccaaaaagcctttccttggctcgccaaacagcaaaatgccgtttctaacgttgttttcgttggtgcttcggcatcgaacttgacacgtcgaagaggccaacaaggacaagcagcagctgatcaacaacaacaacaacagcagcagcgcagtttgccaattgtcagtcggacattgtgactcacaaatcagcagagagagggacaaactaaccatgcattacaactcgaaataattcgaatttcaacagtgatctttgtagtttgacccaagctaccattgttttaaactaaaattgctgaatccgtagtgcgagatttgcggaccgacatttgtggcttaactgtcgaaaaaaagaaaagaaagacgactgcatttctcaataaa

SEQ ID NO: 82140 - DNA, 339 bp, Heterodera glycines
atgaagcgaacaaacgcaacaaacatcactccgcctcgcgccaaacgttcaatggcacctgcacaggacctggacccaaacactgttgcactcacagaacaagaacgacaccgcacactggttttccttggccttccggaaagcgctgctgctcttccatcggaacgtgtacaggaggataggaaagtggccaccaaaattctggaccatcttgatgttgaggctgagccaaccgccgtttttcgcctcggccgctacgaccctcagcgcacaacaccgcgcccgctcaaggtggtcatgcctacaccgacacatggcactcggaggctggaagcgtga

SEQ ID NO: 82141 - DNA, 58 bp, Heterodera glycines
ggattgctggggtcgtgggttcgattcccaccgggcgagttaccttttatgttctaca

SEQ ID NO: 82142 - DNA, 349 bp, Heterodera glycines
atggcccgtctgttcgtccgccctgcgctgaccaaagaacagctcaagaagaaatacgaagagcgcgtccgaaaacgtcaactgacaccaactccaatggcaccggcaagctcacagacaaatgccccgactcccgttgtcgaagatggacctaaccagaaggaggccagcgacgatatttcccaaccgccggaagttttcgataaaacaatcctcgtctgttatgaaacattaatttcattgccaccaaccgacaaaattgttcaccaaattcaatcgctcaaaaaacaataccctcatcttttcaataaatagttcaaccagacctccaacaatttcttcaaataaa

SEQ ID NO: 82143 - DNA, 1234 bp, Heterodera glycines
atgctggagaatcaaattgaatctttaaaattttcaattttcttcttattcatctcattttttatatttaccatgcctcggggctgtagtgccaacttcagcagcaacaacaaaaacatcagcaacagacgggtgccggcacttcaatttttggaaacattgcttaaattgaaggatgtcagagttgaggttgtgaagaattggaaaaaaagaaaaaattttaaaattttaattttcagttagccgatttttctggcgatgatcacaacaacaacctagtttcatttcaaagaggtgaatatgactgcactttactaattatacctacatatgtgtataaacaaaattcttttttaagctaaaaataatttttagaattcaaactagacctggatccaggctggattttgcctggatccaggtccaggtcaaatatgaaaacaatccaagtaaggcacaaaaaacctgggttttctggataaatttagaatttgttatttcgtatgacctttttttatttcaagttatcaaaaaaaaatgattaaaaattttaaaatatattaatatagtcaatttggtgcttttagacttcctaagcaattactaatgattttcactcattttttttggtaaatacagtatattttgcacagcaccgtattcgtctttttgtaatacaaaaaaaagcataaatattttgacagcagatgatgacgatgccctgctgattccgggccgacgtggtggcgccgaaacgcaccatcgtcacaacaattttgcaatggctgtgacgaagccgaaagctgtgcggactgaattggcagcgacgagcgccgcaaagcggatgagcggcgctgagacggcactgatggaagcgaatttgcagagggcacttcgaatcagtaacaaaacaattaattaaattcaaaattttttttttacgcctaggagctgttgaggctcgtatgggaaaatttgggcacaatttaatggtttaaaaaagaaaaaccaatttaaaatacttttaaaaaatagaaaccaataattaaaagcatgataaattttgatcaaattttcgggatgtaaagtttttaatgaattgtccttttcaagtgcaaaagcatacaaaagtataaaaaaatgattcatgcacttgaaatttgaaacgcggtgcttcttcaatttcagagagcagcctgttgaagacgacaaaaaatttatgctttttaataaa

SEQ ID NO: 82144 - DNA, 566 bp, Heterodera glycines
atgcctttcgcttgctcattttatgtgtttgttactgctccattgaataagcagcagctaatggacaagtgcagtgaatttttttatcaaagcattgaacacaaaaaaaaaagaaaagaagcaaaattgtcactataaaatggacagacactttgacaaggaataaagagaaaaatttttaaatgctaatttaaatatgaaaaaataataattgattcatttaaaatgaaaacatttaattaatatttaatttcagtctctataatttatgaaataattgattaataaaaaaaaatttgtaagaaaaattgttactacttattaaaatgggcacaaacacttcgacaatgaatacagaaaaaaggtttaaaatgatataatttaaatatgaaaaaaatgtttgaattatttaaaaagaaaaacatcagccataatttaattttggtctccataatttatgaaattattatatttaaaaatattttgtaaaaaaattgtttaaaatgaaaacaccaatcaaaatacctagattttgatttacataatttatgaaattattttattta

SEQ ID NO: 82145 - DNA, 825 bp, Heterodera glycines
atgatgtccggacaggaaacttttgacatgatgatgtcaactagtctcacatttttcataatcgagtcaaactttaaaatccgtgaaaatgcggtaaaattaaaatttaagtttaaaattttggagttttcgggtaattttttgattttggttttcatttatcttactaatttattgtttgtttttttaacagtacaagacaaaccttctcctaataattagcccttaaattgttcatttatatatcgcctcttagtacaataactctttgttaaaaaaacgagtgaaatttaaaatttatcattcatccatttttcattaaatttcgggtgaatttttctttgttgcaaatctcattgttttttagccattaattgatccatttctcgccctcttattgtcttcttccaccacttttttcccaagcttcagtgcaaataaataaataaatcagattaggaaaagtactgctggaattggaccaatttgtttcccctgaaggctcattttgccctgcggataaataaatttattgggttttaatggacaaattgtctttgcccatccatccaaagtccaaacttaccatcaactcagcagggatattttaggttttttttcgaatttctatgaaatgttgctgtttcatttttaagaatcaaagtgtttcacagtttgtccaattttgtttgccctctaaacatgaaacatttgcataatttggccaattcttgggaaatcctcgccgttgatttaattatatcattttataaaaattcataatttattatttcagtagacggaaaattgatcgtttattttcca

SEQ ID NO: 82146 - DNA, 633 bp, Heterodera glycines
atggactccgatgccgacgaagccgccgaattcgttttcttcgcaaatttggagtctttgcctgtgtctgccgaagaagttgctttgtgtaccgcagatgaagaactgctacaacaagtaattgggtatgttcgttcgggctggccaagcaaatgtcctgccaacgatttactgtcgtttttccaaaaacgtaacaccctctcggttgtgggtggttcccttttatcaggaaacagagtcgttgtgccggcatcacttcgcaaacgtgttctgactgctttacattttgctcatcctggaattgtccgcatgaaagctttggctcgtcaacatgtctattggcccggcctggacaatgacatcgaaatgttggtgaagcattgtaccgactgtcagtccgcggcaaaactcccgaaaaaagctccattgtgtccatggccgacttctaatcaaatttttggtagagtccacattgatttcgcaggtccatgccccgacggcaaaacgtatctgattcttgtcgattcgttgtcaaaatggccggaaatcactgagatgcactccaccacggccttacacacaattacggcactaaatcgcatttttcacagatatggttttccatatgtactt

SEQ ID NO: 82147 - DNA, 841 bp, Heterodera glycines
atgtcgcgaccactccggtgccaaccttgccaattcaaccaacgcctcgtcctcagagacaacgccgccccccaatacgttattcgccgtgaggaaacaaattttaagaagggagatgttggagatggatgttgatgttggattttaattaatttgaattagcgccatacagtaacagtgatgttcctgtttgtttctccgcgccacatttccagttattattttccctccgttgttttcctcctcattcattaattatttccttcttaatttttcggttctaaattaaatctgttttgctccttccattttcgtcattcctctgactccgtcgtcatcttttatttatttattgatttcatttgtctttccacaataaatttaattctgttgttccttgcggacacaacaataataaggacggagaagaagaatacagtacccttataccgtcacagtatccccgtttttgaaaatacattatttctgaagctttttctattcccttttcagctctgatacagcaaaatgggtcactttctgcagctgaatttgaagaggcacttccgcttggctcatttataaaagatttttacggaatggcgttgcgaattgtggcactgtaacttaccaagggcattgaacaaatgcacggaacgaaaatgtgcaaaacaatggtgggtgctgtaatgatagtatacttacgacaatcgaattagttgatgggtgggtactgtaatccaaatggtggcttgatttcctgtaataacttagcttttctccgtccatgctaatgtcagccttttcgatatgcaggtggccgccctgaaaatttctctta

SEQ ID NO: 82148 - DNA, 889 bp, Heterodera glycines
atgttccaaaacattggctcaaataatctgtcaattcgttatcaggtaatccatataatttaattatataatcattatttattttgaaagctctctgaaaacattcgcattggcaaacagctaataccgccactgtttctgaatttgggcaacattttcgcggggacaatgattttattatgggacattctcaatttgccattttatatacatatattcaatttggttgcgattatcaactcaattttcggccttcttatcgaatttttcattataacgtaaacaaatgtaaaatttaaaatattaatttaatttaaaagttttaagatgccacccatttttgaagagggatttatgccaatttgtgaaccgtattggtaaaatgtttggatttaatcatttggtctataatcatcgaattggtgatgcaactgtaagatttggcacaaataatactgctccatctttggctgctgtcaatggcattgttcagcggaatttgatcagtggaaaagcattgattgataaccaaacaaaaccagaagatcattttgccatgctgaaagaagcatgggagaaggggccgatgaaatgacaaaatgcacattagcagcaaaaatacactgtgatctcccaattttacatttgtgacactaatttttttctattgcctttcaaaattcatattagaggcaactaagttgaaaccgttttttttttgctatgaaattctcaaaaaaccaaaacaaactttacaaagattttttccagtgcgtttctaaaaactgccaaaagggtttttccgacccaatgccacccattcgcgtttcttattattgaaaataagaaaaattctaatttttgacaatataacattgtaaaaaataaa

SEQ ID NO: 82149 - DNA, 1319 bp, Heterodera glycines
atgtatgttattcgtgataagctagctacccagaaaacagcaggaaatatgttttcaggttctattaaaaataaaaatttcgtccaaaaaaggtgaatcgcaattgacttaaaaattctaattgattcggcctcgatttttcgcgattcaattctataaaagagttggaataataaaacgatttggggtaaaaacaaattgaccaaaaacgagttgcgtctttaccgtcggggacaatcgaccaaatttggcggagattcaataagattttttttcattttacacctggaaacaaaagagattctgaacaaaattaaattgtcacttttcattaattatttctattaccaaatattttgctattcattaaaattgaaataagaagttacttgtgggatagattcatttaaattgaaataattaatattgtttaaaataatttttatttgtaatattattctaaatttaagcgtggttcctgtcgttttgtcatttgtctgttcaaattttcctttgggatccaattggtgccgaatctatgcaatttttcccgtcacttttaaaaatgtatttcattggcatttacgctcgtaattttgtgccatttgtcgtggtcattgaactcatcctggccacattatttgtccgaacatatgaaaaaaatcgtggccatctgtttaccgttctgtgggcgccttttgcggtgagagtaatcacattttatttcttggtcattgaactcatcctggccacattatttgtccgaacatatgaaaaaaatcgtggccatctgtttaccgttctgtggacgccttttgcggtgagagtaatcacattttattagccaattataactaattataacgaaacaaaatttatttggtattcattcagttgaccattcccatttacatcgctttttctccatctccacaaagtgaacaaaaccaactgataacaaatctgatcacaactgtcgtccatttgctgattggaagcattgagttaggcattttctaccaattatgccgatacaattccaaaatttactcgaataatctatcaattcgttatcaggtaactaaataaatatttaataaaaaatctattttattttgtaagctatcggaaaatattcgcattggaaagcagctaattccgccgctgtcgctgaatttgggcaccattttcgcgggaacaatgattttattatgggactttcttgatttgccattttatagtcagatattcaatttggctgctattatcaattcaattttcggcctccttatcgaacttttcattataacgtaaataaa

SEQ ID NO: 82150 - DNA, 248 bp, Heterodera glycines
gcttaaaaattagcgcaggacaaaaaaatcggtgggtgtgtgtgtgtttttacatttatgctaattttttccaacttttagcaaaacggcaacttgacgcattaattactcattttatgcggtaaaaaaaaggaaaggaggaagaggaggaggagaggaacaaccaagcaacaacaacaacatttaactcataaaaatacattttttgatcacaccattcattcatttacattttcatttcaaaaaat

SEQ ID NO: 82151 - DNA, 831 bp, Heterodera glycines
atggctcagttggtaatgcttctgatagacactgttgagcgctttcttcggttcgagcccgtttgcacgcgcaattttttattttattaatttgaaaatatttttatttttatttttaacattggttttttaaaattcagataaaaaatgtaaatttccataaaatataacaatgaatataatatactttttttttcctttccaattcacacgtttaaaattttatatcctcaaactaccgtagctcgttttcaaaaatactgtattacggccgaactttccctggcgcatttttctgatcacaaaaaaaagcttaaatattaatagagggatcaaaaatgtgtccttttataaaaaagaaacttggacatgttgcctattttttaaaattttattttttttttcaaaatttcttacagtattttttcctgtactctcacagattgccgtgttcatcgactacctgctcaccttcacgctgctctgtcctgtcgtcgttctgctctcctcccaccagtgttccgctgttgtcgttgctgatgaccagcagaagcatccgccgcttcttctcaccgccgccgcttctccgcctgttgtgccgtcatccgccggcgatgccgaagccaccggcaaaatgccaccatccaccgctgcgcttccgtgccgtcccgtcgtgttcatgccgtcatcgccgcggtcgtcgccgcttcatccgacgcctccgccatgggtgcaccgctatgcgcgcttcctgcactcggcacagggccggctggcggcactgtgtgtggccgcgctgatgtacgcggtcggcacaagcggagtgctcag

SEQ ID NO: 82152 - DNA, 650 bp, Heterodera glycines
atgaccatgcacacttgcgccttccccgcctttttgttgctggagggaagcgaaggtgcgtattcgacgccatttaacacagcctaagggaacattgaagttaaatggcaatgatttcgctgtttccttccctcactttccaaaggtatcgccggttgttgtgcggacccgactcagcacaagaaaaatccggattcttccagcgatggcgggcgcactgctccatcagcacggagaccgggtttttgcctgaatttcggggttttcaattcgtttaaatagcagcggaatttgctgtcgaccggcagagtcgagaacactttcccgagtcggcgcccgctcgagacaagagaaaagacctgccaaattgagggaaaaggattaatttaacaaaggcaatttgtgcaccttttctgtccgccttcacatccaatgccaacggctccaattgcccggccctttcacggccaaggccttggcccggctgccagcccatccgctgcagcaatttcaacccaattccgctgttaatctccggggctgttcgaaattggtcctgaaaagcaaaaccttcacaaatgtaaaaaaacacatttggcatttcaaaaaataactgccaatggacggagaaaaaaaattgatttagtaaa

SEQ ID NO: 82153 - DNA, 1795 bp, Heterodera glycines
cccgctttgccgccagccaccaaattagcgttcgtcccttccgactctggcacaccgatggtattgccaacgaccaaaaatccggcacaaaccgatcagaggacgacaaatggtcaacagagcaatgagacgatgaaggaaacgacggggggccatggaaaggactttttggaccgatttaatacttttgtcgaggcacaggtccttttgttttttggggtgaaaatgcctcaggcgaattgctttgttaaggtcgcccgtcagaaggccgagtcggcactgcaggcgaccattctgtcaacggctgttcagcagcacggcccctccggcggggaattggccaccttttcgagcagttcggccttctccgctcgtccttcctccgccgttttctctttggcctcctctcggcccgaccccattgggctgacgaaggcactctttttctcccaaaatattaattaattaattttgtacttaagcctcaaaagagtgttcaagaattggtcgcggaacggttgcgctacaatcagcgattgcaacgtgacccaaatgattacgaggcgagaaaagcgttggcacgggtggacaaggaagtgagtttcactaccgaggaatgccttgacaatggcattcattcactcccatttcagatgaattcgtgggcccaggacagctcattgcccggcgaatttactggccatactggtgctcgtgtgctcagcgagaaggaattggaaccgtctgacccgcgttttcacgcctgggccaaaaaggtgggcggacagtcgcttttgctttggccgttttaatcttcagtttgagatcacaatgtgcttggacctgggttatttgttgatggtagtgatgctcgtgaattttgagtccgattttgaagttttcagtctcgggcatcgcaatcggtcgggaatttattttctggcaaaaccccagaaggtccaattccggtccaggtctatgtcgagctcagttctcacaacaaggttatattcggaattgatttggatgtccttgcggagatgaacattccttcaataaatatcattggtttttcttgaaggaatgttccgctcctttttttattcagaatttgtttccgactcttcaccaatgggaagagctgtcgccatttgcttatatttatgggacaaaatgctaaaaaaggacaaaatgtcctcttctcattaaatcttttccgagttttttcggttgggtaaaccgagaatcgaattttgtttctttttaatgcctaattatttttttgattccatttttgttagcattttctcccaccttcgatgtctctccccatgttttcctccaattatttcgaatgttgcgcgtttctttatttcttttctaacgcgcaacattcgaaacacgttcgattttataggtgccgacgaggcatttaatattcattgcaatgtttgttttaatgaatttaatttccatcttcgaaattgcggcagaatgcgtaaaagataactgccaacggcgccggaaacaaaggcaaaatttggcaattttattttactaaatcaattttttttctccgtccattggcagttattttttgaaatgccaaatgtgtttttttacatttgtgaaggttttgcttttcaggaccaatttcgaacagccccggagattaacagcggaattgggttgaaattgctgcagcggatgggctggcagccgggccaaggccttggccgtgaaagggccgggcaattggagccgttggcattggatgtgaaggcggacagaaaag

SEQ ID NO: 82154 - DNA, 611 bp, Heterodera glycines
atgagagaaaaagaaaaaactttgtcctgggtcaaaacttttttcatagggtcagattttcttgaaattttgcataggcccatattttgacctcctctatcgattccctctttatttatttgcactgggagcccaaaaattggaaatcgcggttgaaattaatgactaatttgtgacttttaaaaaaattcattaccgtctgttcatttttgtggcacttagcagaatttgccttatttggaataatgtcacacagatagcaaaataagtgtactttagtcaactccccggaaaaaaatggcacaaattatatagccttgtcttggagggggtaccaccgcccggtagaatttgttaacatatttgttcacaaaaaaggttgatttttgggagattatttttaaatttttgcttttaacaacaattttcttcactaattttcactaaaatccccattcttccagagtattttttggtatccgggtacccggacctaccgggtcgggtaccgggtattggattttcaaaaaaacggacccgggtaccgggctcgggtattaaaaaaccgggcgtgcgtcccagtaaaatggaaacttcagtaccgaaaaata

SEQ ID NO: 82155 - DNA, 339 bp, Heterodera glycines
atgactcatccgacattttttactttgaaatttcgatcaaaaatttgggagggtgagagcaatttgtattttaaatataaaattcagttagtaacattttttttacgtttagctttcccatcgttttcggattcgccgtcaaacagcagacaaaattggacaaaagaatttacccgcgtaatggcacttatgcacgctcaagcaatggcacattttggattaacggatcaccaaaagggccaaatgccgattattcttacggtgttggcgatgttgtcggatgcggctttagtttggccactcggcaaattattttcaccaaaaatggacgtcgtttat

SEQ ID NO: 82156 - DNA, 690 bp, Heterodera glycines
atgattttgttattcgctcaaagtgttccaataattgagggcgaaatgagtggcaaaagaacacatcaaatgtacttgccattcttggtcattagtgtatgtttttaattgtttactaattagacaaattaataataaaaattttcaacaaaaataattttttattgtattgaaaaatgaataatttaaataaaaatatatttgtatatattcagtgtatccaattggcattcacaatgattggaggaattgtgatgttctttacgctgggtagtaaaaaatttatatattttatattattataaatataaaatagatcattcttagctcaaaatctggtaacaattaggcaaataacgcccaaaaatcccacaaatttctgcggcggcgcctgtgggccactgaaaaatcttacacgtcgattgtggcattatgccggccattaatttgtcacattttttaaagaccaaatgcgtcaacaattgggcgggtattcaactggaataattctcggctatttgtttggacttctgttgccgctgttcattttcttctggtgctactccatcgtttttcgagcctacaaatttgtgaaggaaaaaaatgacgagaaaaaccggcacaacgccaagaaggacattcaaatttgatggtgtagagaatttgttaattaaatgttttctaatttta

SEQ ID NO: 82157 - DNA, 980 bp, Heterodera glycines
atgagcggaagagcaagagaaataacgggggagatgattggaagatttcgaagaatgccggaagagatgaccgaaagagtaaaagtaccggagggtatgaccggaagaggaacaaaccctgaggaggtgaatggaaggaatacagaaaagccggaagagacaagaggacgaataatcagagcaaagcagcggtggttcatccgtgcccacataaaggtacggtatcaagaagggaccgatacagtaactgaaacagtatcaacaaaggatcactacagtaacagaaacgatggaatgaaggcaaattttatggtactcttatttggctatcggaactagcgaccagacgggatcgggatcttacgggattttctccggatcctgcaggatttaattcggaatcccaaccaaggagtacatcccggttgtttttttcaaaatcttcgggattaatcgggccggcatttggacgtaagcttgtactgctccaactccatgcatgaagttcgagctgtacaggtttgttgcgatcccagagaccaaatctaagaccatattcgaactcaacatacccgatttaccttgtttaattaaattcagaatttccaaaaccacttttaaaacattatgttacttggtggtcttgaaaaatgccgtttttggagaccactttcagtctcggctctccaataattcaatttttgtaattaaaattttatatttttgtgttcttatagtcctaactttgctctatttaatcactatttctctggctctgtatctcttttatttttctttaaatcagccatcaaaaataccgacctctaaaatgaccatttttacttacttaactctaactccctaaatacttttccattggtattgatctcttgccagaataatggcaacatattattgataataatggcgggtattttgaatcatgattgtgttttgttgaaattaaaaaaaaattttta

SEQ ID NO: 82158 - DNA, 759 bp, Heterodera glycines
tcttctccttcttcgtccgtctctctgcttgccatcgtcgctattttctgtttgctgtgcaaatgttgcatttcggcaccgcgtaattaatctttcttactagtaattaactgtaattaataattaattgcttttcaacagatccgtgctgtcccggcagtcaaaaagtggtttcgctgatggccaattacgttggcactttcgcccattccttttccaagtcatcgctttgttcggatgcccaaagtgttgcgggcgcattgaaaggccaactgatcggctgctcgaagggcggcgacgcaactcttttggccgacatcgaagcatctcttgccactcattctgctggtaatgatggactaatggatcaaactaattgccaaattagccaataattattttatttattttaattattttgatgtttttcttcccctttttgatgagtgtgcccacagcctcggcttcgtccgtgccatgttcgccattgccgcctccgcttcttcccatgccagcaacaacaacgaatggcaggcattgagtgcccagtttggtcagcaaatcagtgaaattgactcgaaatgtgccgagtttggcattggcattgccaaagtgccatatgacggccccaagggtaaaactaataagagacaataattcattaattatgcgatctcttaaggtgatcactcccaacgaaatgtgcatggcacggacagtgtaattgccatgcctggattggccggctcacacaaacaa

SEQ ID NO: 82159 - DNA, 2329 bp, Heterodera glycines
  unsure (1)..(2329): unsure at all n locations
atggttgacaacaacagcaaaacacggcttgatgttgtaaaaagcatggaaaataaaggtaaaaaaatcggcaaaaacaaaaaaatacatacatatttctcggcagttcaaatcacgccaagaaatgttgtgccattggctgacgcccacgaattggtggcattggccaattcaattcaatctgcgcgtgattttgtgaaatgtcaggcggttggaaagttggaaatgatcgctgaacagatggaatttctgcgaaaagtgtgtcgtcggacgggcggaagttcttatgacagtttcaatcaaaaaatttttgatttctcgggactcccgagttttttggggggaaatgatcgggaccagggataagtgccgaagcctaaaaaaattgtggaaaatcgggattccaatgactcaaaaattttttggcataaataattgaaaaacggttgtttgtttagcaagcgattgaagtgctgcgaaaagcgcaacatgacaatgagctgcattgtgttgaatgcaaagtgaagaaagtgccgggcaagttgagtttggcacttttgctaatcaaaatacattcataaaatagaggtccaaatttctcgaaaggcttgtcatgggcttgatccccaggcctggagctggattttttggaatttgtttaaaagaaaaaaaatgttaaaaaaaatcatttcattgctgcggaaaagctaaacatctaattaacagagataatgttttgaaacctacatatttaaccattttttggtaactcaaaaaaaaatatttgtcacttggaataatcaaactaaaatattgtccaggtttggtacatacttttccgttttcaaaattagaatttaaaaaacatcaagcacaagaggaatttctggtgaaaaattaaagcgtctctaattcattgtttttgttttgtccaaaattttggaaaatgtgtgtataaaacccctcattttttgggcggcatgcccccgtccggctggctccagttttttacaatgttttctttttctaaaaaataaataattttttcaataattgtttccttattctttttgttttcaggtctattttttgtaccaacaatgccctgttggtgctggtgccgatgacggcgaaccaccacagcaaaaatgccaagaacagcagtgccgccgccgtttcttttccctaatttcgcccgatgaatggggcggagagtgcgcgttagcgtgccgacaaatgcattttgagggcgcctatcggcttgaatttgaccaaagttggagccgagtgcaacaaaatgccacagatgaagcaacaaccaagacaaaaatgccaaattcgggcagccaaaagatgcaaattctggagcgagtcgacagactgttgcagggtgattgcaaatttttttttaattggatatttttgaaaacagcctggacctgggttctatactaggcaaaattccaagaaaattcaggtctaggaaaaacaaggcttacaggagaacattacatagttaaatatttgatgttttctgcgagaaaacatcaaattaaaaattaaaaaactgcgtgcagacggaattgaacccgcgataaattaaacctgtgtggcgcgctttaaccattgcgctatttttacacgacagcagagatgctctttaaaatcatttattcctctctttttattaagaatttataaaataaatttttatttgtgaattaataaaaaaatagcgcaacttttttttatattacttgatagaccaatccgagcctcgaattaactgtaattaattattattgtttggttaattagttaggtattttaccaaaaaataattatttgaattatctgtgtggaaacatgtcaaattaaataaaaataaatgcgtgctcgtggggctgaacccgcaatcatggatttctgtggcgcgctttaaccattgcgctatttttacacgacagcagctgatgctttctgagaacatttattttgtcggttttttttcggtagagattgtgtttttttcaaaaaatccaggttcaactttttgccattttgggtgcaaaaaaaaacattcctttaaaaaaactgaaagtagaaaaattgaaaacccattgaaagaattttncatttcttttatttgtaaaagtcgacaaaaacccgcaaattacaaattatttgttaaaaataattttttctcctttttcagcttcatccttcagcagtttaatgacggcatcaatggagttggatgggatttgaaaagcaatttgaaaaaccaaaatttgaccggaaacattttattttcaaaattaaaaataaa

SEQ ID NO: 82160 - DNA, 62 bp, Heterodera glycines
cagcaccaattgttcaatttgtgcactgcgactgccgagggggtcacgcgcatccaacacct

SEQ ID NO: 82161 - DNA, 2047 bp, Heterodera glycines
atggataaagttttggatgacataaaaaatgtaaatgtttacattgatgacatattgatacattcgaacacattagaagagcatttggaaagtttggatttagtttttaatcgcctacaaaagtacggtctaaaattaaagggagataaatgcaattttcttcaaaataaatgccattacttggggcatattttgtcggaagcaggctatcaaccgtcgttgggcaataaagaggttattgataagttcccggaacctacaaatgtgaaagaggttaaacgatttttgggaatggcatcgttttttcgaaaatttattccgggttttgcctcaatcgctcaccccctcaataaattgacaagaggaaatggcacggaattcgtatggggaggagcagaaaaagccgtgatggatgaattaaaacagcatttgttgaaagcaccttgcctacgcccgccaaactacgacttggccttttacttattcaccgacgcatcagcaatcgcttatggcggggctttaatgcagactaaggataataatgagatgcatgccgttagcttttggtcccgtacactcactccaacagagagtaaattaccacccactcatggggaattagcggcaattgttcatgcgatacagaattttcgagcaattctgtatggggcagaattaatcgtactcactgaccatcgaccattaacattcctcttccaaaaagccagtacaaatccaaaattaaaccggtggctcatggctctgcaggaatttgagccgaaagtaatatacattgagggtaaagcaaataaagtggcggatgctttatcacgagtccctatcccatggaaaatgtggaaacaaaattaaaagaggatgtcccttatgtgttggcaatagaaagtagtttgaatagacaaacatttgtaaaagaaacaaaagatgatcaaattatgtcaaaagtaattgccaaaataaatgaaaactgggcagagccaatagagaaggaactggaaatatattttaaaaaccgagataaattgtatgtcgaaggcggaataattcgaaaacatccccagggccaatttgtggtaccaaagaaattaaaagttgccattttggaacaaattcacaaggctcattttggaatcgtacggggaaagtcaaaggccagaaggtatgtatggtggccaggaatgtcggaggacatcgaaaattttttgaaagaatgtgaggtgtgtcaaagaaatggcccaagcccgccccgattggatccggaacaccgttggcccgcagcaaaataccccttcgagaggctccatgccgatttggcaggtccggtttggggaacaaattttttaataatggttgactcgtattcacgctatccatttgtctttcagacaaatcaaccggtagcgcaactttgatcgcatttttccgggacatttttgccttatttgggtccccaaaaaccttaattaccgataacggcccacagtttatttcggtagaattcgaaaattttttgtgtgaggaaggggttacccatttaacctcgccaacatatcatcccgccagcaacggagaggcggagcggttcgtgcgaacctttaaagaaggaattaaaaaattgttggatgaggggagaaacctccgtattgcacaattcatccttttacaggaataccgatcctcaccatgcccaattttgaaaggaaatagtccggcacaaatgtttttgaaaagagaaatgcgcacgagtttggataaaataagaatttcccaagtggaaagagacaaaggcactcctacgggcgaccccgtgagagataaaggggctcaaaatcagcaaaggcagttgccgaaatatgagccaggagattcggtatggatgcgcgaccaacaggacaaaaagtggacgccggccatactgcttgagccaataggagagaggatgtggcgtttggagatggaagggggcggagaaagaactgcgcatgtggagcaaataaaagcgcgtcgaatggtcgccggacgagcctag

SEQ ID NO: 82162 - DNA, 834 bp, Heterodera glycines
atggagccggtgctcagcgatcagtcgcgctgcattgcggcgctgactgatgcgattgacgagttgtcactcaagggaaccgagcaatcggtaaacccatccacggatggaggtccagctgagttggccaaagaagcaccgatgaacccgcagggcggaggtccagcccctgagctggctaatgaggccccgttaaacccgcagggcggaggtccagcttctgagctggctaaagggcgtaccagcccagctcgttcgaccggaagagcatggcacggaaagcaacatcgacaacccgcacgcaaagccggccgtctaaactacctgatgcgccaattggagcgcgaggtcggcggcagccaaatggtccgatccccgcatccgtactgggaaaaccgccgagggaatggttatggaggaccgcgcggtgggggacgcggaggctacaatgcgtatcgcggagaccgttctgagcgcgtcggcccgtcaaacaatggacgttgaatctgtggtgtggtttggactccggaaggggggagagatgttgaatccccttttgacaaaatcatttatttaatttaatgatcaattttcacttatttattttgtacaacttttcctctctctcttcaccgatttcctctcccatcctaaccaatcgttacactttactgtaaacccaagccaagccaatttgtgtccatcccagctcactctcgactccaccccttttctcttttgctatttaaactgaattcattccttgcattattacccttttttctactcgctttgactcattcccattttactcacctttctcacttttgctaa

SEQ ID NO: 82163 - DNA, 267 bp, Heterodera glycines
tgacctcattcggaactcggccaaattgtgctaattagtaattaccaaaaaatgaaccgacggtaaaagaatttcaaaagtcaaaaattcttatttgccctaatttactttcattatttcagttggatttgcaacgacgtttggatggacattttccccagttttgaccgtcctcaactcggcctcaaattggcacttctttcgccacgtttcaatgcgttggtggacaaacatttcaatggcaaaagcgaattgactatttggaga

SEQ ID NO: 82164 - DNA, 1062 bp, Heterodera glycines
atgggtcttccaattatccaaatttatatgatcgtcgccagacagttgtcaaagcccatcactggatattttatgggattggggaaagaacacccggcatttcggaacagagtgttaataccaatagggaaaagtgtgtgcaccggagaaagttccaaagaataatcgtcgtcaatttcagctatcacaaattggtccacaaaattgcgaatgaaaaatttggacctcggctcaccaacttcagtggtaaatgtatcggaagagacagcgcttgaacaggtccacatttaaatgacacctttgggtcaccatgggctcctccattttgaaattaacgtataatctgatttttttttttgggggggggggtgatttctgccaccaattagctaatatggttaaattaaaaagataatttccagcatccgttcagttcaggcttcagaagtgatccatcaagtggccattttcggctacactgtcgtggtgttttacgcttattcctatttcacacacaaagaggagaaggaattggcaagcgccgaggaattgagagagctgagcaaaaagacgagccaggagataatgcgactgaatgtgctggttacggaattgcaggacgaaatgcgaatgccgcggagggtgggcaaccatcgaccatttgtaacaaagctaatcatcattttcaggaccgaaattggactttcccatggtctggggaaggcaaaagtgcgttgcgtgaaagcgccgtcgttaacccaatgatgccaagtgtggtgatgaccgacagtcagccgaaagaacagaaaaaagacatgaccaaatcaatctcaaggacggaagcattgaataggcttgcaaatgccaccgaaacttcatcgtaattgctcaacaagcatattgtaatttattattgatactgttgttggggcatgtgtttttagttattttctaataccagaaagtgaattcaaaatggactagttttattcccttaaaaccatgcccttactctgtttgtatgaaagcactgaaaatttcttttattatcaagacaataaa

SEQ ID NO: 82165 - DNA, 56 bp, Heterodera glycines; identical to SEQ ID NO: 58360

SEQ ID NO: 82166 - DNA, 204 bp, Heterodera glycines
ttggatttgtggcgacgtttggatggatattctgccatcttttgaacgtgctgaacttggcctcaaaattgcattgctttcttaccgttacgatgctttggtggacaaacattttgacggaaaaaaagaattgacaatttggaggacaatcaaaatttgcgacggcattggcccagaaccgaaattgtctgtacagatcgagga

SEQ ID NO: 82167 - DNA, 654 bp, Heterodera glycines
atggaaagcaattcttattaccgtattaatattattacttttatatttttcgttcttcccaatgtctttttccgctgttgtgagacaacagaacaattacaaatttgtgtcaaatatgagaaaacagtggcgaaacgagaaaccaaaattgcattggaagaatttcgtataaacaatcaaattaaagaaattaaaaatttgccggaaaattttcaaaatggcgagtgttttggcattttaattgagccagaggacgaggccaaagtggagaaattttcactcacatttgcaatttcagtgaaaccaatggaaaatgagtaccaaccgtcggcgaatgaaaataatgaaaaccaaccggatgatgaagacattcgaacaatggtccgaagaattcgattcaaattgtactggacaaacatggcaaaggtgtacaccgtcaatttaggcaaaattgacccacccgaattgtattttaatcgcacaattttggtggacaagaaaaatgatttggccaattaccatgccttattgtatgccaaaattcatataaatcgacaaaatatgtccaatgttttgacatataattttttgggctatgctcaccttataaaaatcaacgaagaagaagcatcctccagcagctcagaaaataaa

SEQ ID NO: 82168 - DNA, 2006 bp, Heterodera glycines
atgacggtcaaaaagattgacccgaaaattacaaccgatgacgttaataaattcctaaaaaagcagaaaacatacacgattcacaagcccatcaggaaaagattcccgagactaaagacgataccaagtggcttccataccaattggcagtgcgatttgtgcatatttgaccagttgaaaaagcataacgacggttataaatatttattggtctgcatcgacgtgctgagtcgaatgatcttcagtgcaccggccaagtcaaagaagagtgaggacatgatcgaggcttttgatcgggtgttcgaaaagtctaaaattatcccgatgaaaatatatagtgacagtgggcttgaattccaagcaggaaaaatgaaaaaatattttgaggaaaaattcatcatcaaaaatgtaatgtatagtcctgatctgcacgccggagtcgttgaaagggcaaatcggacaataaaggagcgcttgtacagatattttacaaagaaagacactcttcgatgggtcgacgtaatagacaaaataataacaaacattaacaacagtgtgaatagaacattgggagccaaaccgtcttcaattaattttgaaaatgcccgtgcgctctgggaaaaattatataaggatagggaatttaaaattttaaaaaagaaaaaatttaaaatcggtgatatcgttcgtattaccaaggaaaagggaaaattttcaaagggatacctcccaaactttaccgaagaattgtttaaaattgttgttgccaattcgacgacaccagattcatacaggatcgaagatttggaaggaaatttaataaaaggaatattatataaccaggaattagtgaaaatagatggatgccttacattgtgctaccctcgaacacaccgggaccagggaacggtacatcaaaattcacagtacgactccccgagactttggaattgggcacaaattggtcagtagctctctcatcaattatttacccctactcattcaccgcactcagtataaacggtcaagagtttattaaagtatgggaaaacgacagcagtgtcccgactcaagtttatttaccggacatgaattttaaaaccgccgggggcctgggaaataaaattaacgaggcattcagccatcattacaaaatcaaaaaacaacgtggaaagagagaagccaaggctgaagataccaaagattcaaaaattgatgtcgcaaagagggccgcagaacgcgccgggagagacgtagaaagacattttaatcagatcaacaatatctcgaattccatccaaacccaactaaacacactacgagaaacaaatcctcacattttagaagagcctgatataaaaatttggtttgacaaaatggttgagatgggaaccgaaattcaaacatcccgaaatgaacttaagtcttttcaagaagaagtagataaagccaaaaacataacattggagcatgtggaaaagaatgacttgaaaaaagcaaagaaatcagccgacgtcgcaaagggaatcgccagacaggcaaagaccaaatatacatcaactctcgagggatataatgataaatcggaaaagggttttagcgggatagtgaataggcttaatgaggcgctcggtgagcatattaaacgtaaagatattgaaaatagacaagtatctgaagctgagaaaggaccacaaaaaagagagagattagccaatgaggatgttcaatttaactacgacagcattgatcaaaaatttattgtctatctttccgctgctgtctcccatatagatttgtcaaaacacctagcctatgtgctcggatttaagaatacaaggctatttcacgcggaagaggcgacttatatgccggatttgacgggaggtgtaaggcagctatacatttatgcaccaaatttaatcgaaaacacaattatcgggaaccagatggctccactcttaggaatagttaacgtcgtcgatgacccaggatcgattagtgaa

SEQ ID NO: 82169 - DNA, 596 bp, Heterodera glycines
atgttcaaaaaaaacaatttttgttttcgaaagggtctaaccatagaattctgaattttccgggggattttttattggtaaattgactcccataaaatggcgaccaccttttttgatgagcatcgaaaatatgcggttggaaaatcagaagaagggcatcaccgtctcgcgttttgtttctccgccgcttcgtttggtcccttcgtcctccgttcgcttttccctgtccttcttctttttcttcttctccttcttccgctttttctccttttcgcgtcctccgttctcttcggctccgccgctttttgctttcttcgcttttcgttcgacttctgttcggcaaattcacagtataacaatggtctttcattatcataattgcagataccatccaatgtcagttcgtccaatgaccgtttgacgcgctttcgctgtcggcgttcgtcggtggttttggcctcggactcaaattgtgtcgcagatgctgagtgggacagaaatgccgtcgttgtgctggtggtgctgctcgtcggttgctccggcaaatcgaagaagcgattggcgttgggaattgggcctaaagaactgtgtcctct

SEQ ID NO: 82170 - DNA, 1075 bp, Heterodera glycines
atgccccaaattttggatggaataaagcttgactttcgtgatgttgtgagtttatcttatccattcatttcttaatggaataaatttagttgctaatgcccaaacgttcacagctcgccagtcgttcagaagttgacttgaacagagagttagttagctatactgcaaaattacatttttttcatgccttttagatttgtttttaagaactcgaaagcgacgtacacgggaattccaataattgcatcggtgggatagctcgttccaatgttatcagttttgggctgcttttatagaacatggacacagttggcacttttgaaatggcggaaacactcagccaatccaatttgttcactactggttcgaccccttacttttaacattgtcttcttcatttttagtacacaaacattacagtgttgaggaatggaaggaatttgctaatcgcgtcagaaacaattcgaatgtacagtagtgaatcgttttattttattaagggggcaatttcacatgcatttttagcattggaaattttttgtttaaaaaatcgcattcttttctttgtattgctagataagtacatgtaaagcggattttgccttctttaatttggaaattaatttaaggtgctcaacaatatcgctatttcgtccgggtcgcgttccgatgaccttaccaaaatgcgtgacatttgcgacgccgtgcccgaaataaaattcatttgtctcgacgtggcaaacggttatagctttattttttcatcaacattcccacttttaggctattctgaaactttcgttgactttgtgcgcaaagttcgggaggaattccgcacctccacaatttttgctggcaacgttgtaagttattttttatttggcacttttttgtcccctttttgattggattcaattcgggactttgcgagaaatgatggcttttttttaggttaccaaagaaatggtggaacagctgattctgtcgggtgccgatgtggtcaaagttggcattgggccgggcagtgtgtgcaccacgcgtaaacaggtccaaccaacagcaccgtgcccaacta

SEQ ID NO: 82171 - DNA, 540 bp, Heterodera glycines
atgattgacattgaggaggaagaaccactgctagaaaagatggacaaagacggtgtaagaaaggtgccagaaaaaacgggtgcatcccaaaatctcgccaccgaaatctcgctgatacaagatcaataaaaaacttcaaaaatagaaatgcaaaattctagcgattttcgaaaattatgatgaattactaattttttcaaaactttttcagaaaaatcgctagagaaatctttacaaaaattttttcttgaaattttcttataaaaaattatcgaagattttttcttaaaattatcttacaaaaatgtttataagattttaaatttaaaattcggcggcacggttttgttgcggcaatatttcggtcggaaaaatttcgtcccatctccgaaaaactctcttggcatttttgtggaattttgaaaaattgaattttagatagaaagtcaaaagaccagccgcggcagagccaaattgccaaaagcaggacagaatggacgggtcagtatttttttttttggcattttgtattaatttcca

SEQ ID NO: 82172 - DNA, 1023 bp, Heterodera glycines
cattccaatcactggcactcaattctcctacattccaatcattgggactcaatccaccaacattccattcaacgggactcaacccaccagcattccaatcactgggactcaatccaccaacattccaatcactggcactcaattctcctacatttcaatcactgggactcaacccaccaacattccaatcacttggactcaaccctccagcattccaatcactgggactcaatccaccaacattccaatcattgggactcaatccaccaacattccattcaacgggactcaacccaccagcattccaatcactgggactcaatccaccaacattccaatcactggcactcaattctcctacatttcaatcactgggactcaacccaccaacattccaatcaccgggactcaaccctccagcatttcaatcactgggactcaattctcccgaattcaaatcactggactcaatctcatcaatccttcagcaacacaattaccgggactcagttctccgacatttcaatcaccggaactcaacctcagcaacggaatacagaactatttaaaaggaatccagaaattgaaatataacccataaatcaaaacactatggtgtataattattgcccccaccccataaattcaaattaaaactgacctgtttaaaactttccacctaaatttgatccgcaagtgtcacgtcaatatcccaattgcatataaatattccactcgaacacaggcaaaacataagatgtagcatttatattgctttttctatccatcaaaggctttttctttcattttttattactatcataacatgctttttattcaaaacaaatatcaaaaaccaaatcagataagtacaaaaaacttttttaagtaacaaacctttttcattcaaacaaattctaatgcatttttttaaccaaacaattctccattatcgtttacataagcaaaacaaaagctttcacatcaaaatcaaatcaattaacaaaaacataatttagacaa

SEQ ID NO: 82173 - DNA, 688 bp, Heterodera glycines
ttccgttgctgaggttgagttccggtgattgaaatgtcggagaactgagtcccggtaattgtgttgctgaaggattgatgagattgagtccagtgatttgaattcgggagaattgagtcccagtgattgaaatgctggagggttgagtcccggtgattggaatgttggtgggttgagtcccagtgattgaaatgtaggagaattgagtgccagtgattggaatgttggtggattgagtcccagtgattggaatgctggtgggttgagtcccgttgaatggaatgttggtggattgagtcccaatgattggaatgttggtggattgagtcccagtgattggaatgctggagggttgagtccaagtgattggaatgttggtgggttgagtcccagtgattgaaatgtaggagaattgagtgccagtgattggaatgttggtggattgagtcccagtgattggaatgctggtgggttgagtcccgttgaatggaatgttggtggattgagtcccaatgattggaatgtaggagaattgagtgccagtgattggaatgctggtggattgagtcccaatgattggaatgttggtgggtttagtcccgttgattggaatgttggtggattgagtcccgagtgattggaatgttggtggattgagtcccagtgaaatattggtgggttgagtccc

SEQ ID NO: 82174 - DNA, 3033 bp, Heterodera glycines
atgtttggaaagcgtccttcttcccatctttctcctctctcagacaacgcatcaaaaaagtccacctctgactacccatacaccgctcttagtgaccaacttgcggcaatttcccaacaaatggacaacaacagtgtcgaccccatcactaaacaacttttgaaaatttgtgtcgaacttttacagcaggttcagcaacaacagaccgtcatctccgaacaagaccttcaactccaacatttcaaacaacagaaaatgatggaagaagccattcaagaccatgagcgtcggcgaagcgtcgtcgtaatgggtctccctgaatcgcagaaacaaaagccgtccgagcgagtcgctgaggaccgaactgccatctcaggcgttctcgatgagcttggcatcgagagcccaatcactgtgtacagaatgggttccccagaccaagcaaagacaggtcaaaaccgcccgaggttgatgaaagtaattttcgggtgctccaaacatcagaaacaaaccttggcacagtggaacaaagggcgcgcgcaaatcaatcaaaaattggggatgagcaacatccgaattcgcccttcactcagccaagaggaactcaaggcccgacgtgtgctgcaagaagagtgtagcaggaaaagaaaggaagatggcggcgagtgggtggtgtacgcggacaaagtgatgctgaggtcagacattgcggcatttaaaaataacaccaattgacttgctgttttaccaaatcacactcataaaacatttataaattcgcacttttccggtcttaagcatgttagactcaataacccaataccgaaaataggggaagttaaagcctgcttagttaatattagatcactttacaacaaaattgatgaaatagctttaaatttggtaaataaaaacatagacatttttctgttaactgaaacatggacaaaggagggaaacccaatcttctttagtccatggataatcgaaaattataactttgttttttgtcatagaaaatctcaaaaattaacacgtgggggtggttgcggtgttttaattaagaaagaaattgagttttttgttaaattttctgaaacaaaatataattgcgaaatcttggtttttcaattacaaaaactaaaatcaattagatttgtgcttgtttatcgaccacccaagacaacatatagacaaaccaaggaaccttttaaatttttagaaacattctatagccataattgtgttgtgttgggtgattttaattttccgaataaagacctggtatggaaggaagggcagcccatttctatgagtaaatttggtgaaattttttgccacttttttagtaagctttcttttttcaatgccacgagtggacccaccaggggaaattcgtggttagacttagttttgccggcaaatgatcaaattgtaaagcaatgtactattgaaggtggtgttttttcatcggatcatttagcgcaaattttcacattgactattccaaaaacactacaaaaaacaaacttcttttacaatcgacggttttttccgtcgaatgtttctctttttaatattatggtttcttctagaattagcgctttatctaacgagcattttagtgtgaacgaaaaatacaacgcatttaataatacattgctagaaaccttaaacgagtgtattccaatgaaaaaaattaccaaaaaagatttgacccctaaatatccaacgcatttattggcctccatcaaagagaaagccagactgtataggcaatgtaaaactgacccaacaaaaaaagcactttatgatagcattagtttacacataaaaatacaaacaaataaatttcactcgcaaattgagaaaaaggctatttcaaagggaagaaattccatttttaaatacctacaaaaatacgatgttaacccctttgaaataccgaatttagtctttgaaaacaaatgctatcatgatggtgatgaaaaatgtgaattattagccaacttatttgcaaattcgtttaacaattctgatgttgacccaggctacctaaacttgggcaatacttttgttaatcaatgttttatatcagatatagactttaacatcatcgagacacaaaaacttttgaaaaaacttccgaataaaaacgggacctccccggataatattagctataaaatattgaaaaactgccattcttcattagcaactgttattactgacctattcaggatttcgttagactctggttctcttccagatatctggaaggaatcaatagtttttcctcttttcaaaaaaggggacaaatttaatcctgaaaattataggcctatttctataacctgctcactttgcagggttatggaaagaattcttagccaaaatatttacaactttctcctaaaaaacaataaaatttcggaataccaatttggttttgttagaaataggtctacgacaagtcaactaataacagttgtggaagattggtacgaggcaattataaatggaaaaaatgttgactgtatttatattgattttcaaaaagcatttgactcagtgccccataatttacttttatacaaattggaaaaaattggtataaagggcaaacttttaatgtggataaagggctttttgagtaataggacttttcgagttaaaattggggattctttatcctcaagtaaaaaagttacctctggcgtcccccagggctctgtcctgggccctttattatttttgatttatattaacgatcttcctgatgctttgccatcaggagtgaaaataaaattatatgctgatgatgttaaattatatatttgttataaagcaagagccgacacagaaattatgcataaagcattgcataatttattcgaatgggcaaataaatggcaaataaaagtttcaatgcaaaaaacttttgtattatatttgggttcaaaaaacccaaaagaaacatataaatttgatggaaatacaataaatgctgtggatacaattagggatttagga

SEQ ID NO: 82175 - DNA, 1553 bp, Heterodera glycines
atgcgcgagttttgtgcacatctacaaactcttggctttcgaatgataccagggttgtttgggtccgggtccgggaagtgccctaaaaagggagctcaagcacttttggtcggtatttttcccaaaaagaaggaaaaagaaaaggaaattaaaagggtggaggcaagccagccgatggtcaagtggttactgtgcttgcttttggtggcgtggtctctgtggttcgagtcccattgtgatgtttgtttaaaggaaattaaaagggtggaggcaaggtcgagctttttgcaataaaagaaaggaaggaaaatgggcattgaaaggtgaagtggcaagcggccagatggtcaggcggttagtgtgcctgccttttatagtgggttcgggtcccactgcttcagagtaatttgaaaaaatattatatataattctactttttgttttgtttttttatttaattaactttatggaaataaaatattagttattttaaattaatgaaataagatttatttaaaaacaaatttaaaactgaatttaaaatcaaataaaataggtaaataataataaaaaaaataatataataaataaatctaaataatatttaagataaataagtatttacaagtacaagacaagcaatccggtgaacaagtggttagtatgcctttctttgttggtgtagtgtatagggttcgattcccattaattctgattatcaaactttttaattttttttttgataagtacgtttaggaaattaaaaaaaatttacataaagagtgaaataatatgttttttatgcataccgaatgaactcaaaagtaaaaatttgatccttttttggacaaaacttgtaacaaattgaaaattaatttaaactatccttggagcgcctatcatcagccagaccggactcgctcagttcagccctcacgattcggccccagcatgcttttccattataccttttttctttatcatccaaatccaacattgttggtatcatacgaaagctcttcacatgctctattagctttacaaaaaacgaaaagattttcaagcctcgaaaaaattttattaagaaaaacttcaaaatttcatttttttcgcaattttcatgtataacttctttagcaattgtctaatcataaagcaatagcttagacaaagcttttaaacatgttaagatttcaaataataccaacaatgtaacattgttggctttggatgaccaagaattaacagtataaaaattgacaaaaaaaatgtttctgatccaatttaacagaataaattttgatttatggcttacggaaaattaaaaatcgataaaaatttaaataaaacaaacaaaatttagaacaaaaaaatatgaaagaggaacagaaagtggaagaggaagaggaagagaaacaaaaagaggaacagaaaaagaaatagaagaggaacagaaagtggaagagaaacagaaagtggaagaggaagtggaagacgaacagaaagaggaagacaaagtggaagagaaacagaaagtggaagaggaagtgtaa

SEQ ID NO: 82176 - DNA, 1087 bp, Heterodera glycines
ctcaggggagaaattttcataagaagtcgaaaaaactgaaaccaaaaagtcaaagaaacccatttaaagactaaaattcaaactgtcgcgggcaatggaataaacatttggatttgttaactccgttttccttgtcagattggactttcgctgctcatttcactgcttgctgctgctgcgaccacattgggcgccttctgttacatcgaactcggcacgagcattcgccggtcgggcagcgattttgcctatctctcatacgtcaaatggtcagagtttgtggcgctcaattaaatgtttcgaaatgaaaaaagctcattaaaagacgaagccaaccttcaaaactgattttctcatttaaaaaattatttgagcacagattacacttttttaatttgaatattatttttggccaagtgtcccttttgtccgtcttttatttgtccgtccaattttaggcgtccgctcgccttcatgttcatggtgtccgggtcggtgctcatctgtccgctctattcggccattcaggcggacactttcgccgagtattttgtccagggccttggccttgactcgctgctgatggacgcctctgatcagcacaattcggccgctgcgttcgctcttcgcaaactgatcgccctttgctccgtttggctgatcattttcctcaactttttctcacttcgttcggtggtcgcgccctttcaattggtcaccagcgtggccaaatttctctcggcacttctgatcattggcattggcttctattggcttttatttaaaggtgggcaaagcacaaaaaagggccaattgaattttataaaaaacaaattaaatatttttatttaatttttttttaatttccaaatgcttttcctctttttttaggttacaccgaaaatctgcgccaaccatttgccaattcgtcgtttgatgttggcaacctaacaaatgcattatttgcgggactgttcaactacgacggatgcgacgtgctcaactacggcatcgaggaaatttctaacccagcgaggcgaataataataataataattattattattattattattattatcatatt

SEQ ID NO: 82177 - DNA, 239 bp, Heterodera glycines
atgcatgaattggtgccaaaattatttgtcggttatgacagaaacgcacggccaatttcaaaggatggcaaaccgattgaggtacaaaaaagcaaaaaataaaaataaaatgttaaattgaaatggatataatatccaattaatttggcctatctttctcgaatgagcagagccaattaatgattcatttgcagatacaaagtttgttggtcgtggatcacattgaacaattggtgtga

SEQ ID NO: 82178 - DNA, 159 bp, Heterodera glycines
atgtctccaccaaaacgtgccaaagtgtcagccgatgatgatggggagacaatttccgacgacggggagccgtccacgtccgcgggggcaaagcgaaagcaaaaggcgtcgaaaccacgccagcggaaggcgcacgaggcattcattttgctggtggac

SEQ ID NO: 82179 - DNA, 528 bp, Heterodera glycines
atgcaaaaggatgagacgcatgtgatgcaaaatggacgcaataggaccaaccatgacgaagtgcactccgtcgacgaggcacacgaccatgtcagtggtgcagtaggcgatgcgcatcatgatgatgtaaatttttattattatggcgatggaattcggtaaatggtctcatgaaaactatattttttggaataaaatttgcaaatctgatttttaactaaagtgaggattgtctatcggccaaatgctgattttgaaaattttcagtagggagcgcttgggaaaaattggagtagagagaaagagagagagagagagaaagaaaaggggagaaggaaagagaaaaagattaagagaggtgaaatggtgaaaatttgtattttatgtaatatatgtattaaaatttttcatgtgcgttaaaatgaatttagacatatgaaattatatattataaatgcttataggtgagcagtgtgaccgaatcggttctgccactgtatacttttttttgcatctgcatttatgcag

SEQ ID NO: 82180 - DNA, 744 bp, Heterodera glycines
gtggccgaaagctgcttccaagttgcggacgacgcgaagagacaatcggcggaacacctaaaagtgacgacggatggccccggagtttcacaggcgacgactgccgcccttcgggagaagccaatgcccacggagaagccgcccagtgacgccgaggaggaggagagcagttccgcagcttcatcggacgaggaggaagaggaggacgagtcgtcggttggggtggcagtcgccaaagaaacgcgcgaggatttattcgcgagggttcgcgccaaaattacggtccgtttatgtgagacaagcagtcctaacgatgagcttggaattgcacgtttcagaagcgcaaggaattggccaattccaaacgcagtgtcagtaatttgaggtcacccgttatttgtgtgcttggccacgtggacacgggcaaaacgaaaatgttggacacggtttgagaaggggacaatccgcatgatgcagctatataatgaatgacactttctgcagatccgtcgcagcaatgtgcaggagggcgaagccggcggaatcactcagcaaatgggcgcgacgcgagtgccggggcaagcgatcaaagagcggagcaaaatggtgaagaatgtgagcagtttgatgatgttgcaaaactgaggagcattttcaaaaactcatttttagttttgcgctgattcaatgcaaatccccggctttctgatcattgatacgcctggccacgaaagctttgcgtag

SEQ ID NO: 82181 - DNA, 1092 bp, Heterodera glycines
gtccgttctttgccaggattaggcacgacgatcgatgtcattctgatcaacggcacactgagagtcaatgacatcatggtactgactggaagtgacggaccaatcgcaacgccaatcagagacttgctgatgccacagccgctaaaagaaatccgagtgaaggcgagtggcagggacaaccccaaggcgtaccctcaaaagggctgaagttattaagaaaactcagaataggcaaaccatttttcatctgtagtaacccccccccccataatcgtaatctttgtcaattttttcccagaatgattatgaacattacaaagagattggaggggcgcagggtgtcaagattttggccaaagggttggagaaagcgattgccggacttccgctttatgttgccacaactgaggaggagttggaggtgttgaagtgagtagacatagcagccaaatcagagggaattcggccgttattttcccttaagggaggacgctgaagttcagcttaagcacgcgctcatggcgattaagaaaaagtcggaaggggtttatgatcagcccaccaacctttagaaaaatgcttgtcatcgacattaagcttttagagacgatagacaagtatcgttagatttggagaacaaagaaaaaagttatagtcaaaaaattggctggggccgaaccgtgcggggccgaactgaggtaaaccgcgtacaaataaacatgcattgacgtggtgcctttataattatcactaaaaatggattaatgttagttttttctgaatttttcattacaaacattaagttcaaacgacgcagaacgaaaacggcgtcaattcgacgacgaacaacaacagaaacaacaacatccgctgctggtgaggaacagcggacggcggtgttggaaattgagtcaacagggcccgtcaaattgaaaattaaatgtaaataatcaaaaatattgttccataaaaaatttgggaatttatttttattgccttttacagtgccatgttggagaagtagcggatgttcaacgagttcgcctggtggtgcccactcatcgcagcaacagaaacagcatttcaatgtga

SEQ ID NO: 82182 - DNA, 706 bp, Heterodera glycines
atggtgaaaaaaattccaaatgaattactttttgaaattatcggtgccattcctttcgacaaaaaatgggctcaaattcacgtgtgccaagtgtttaaccattttctgttcaatcgtatgggctcatggcttagtcaaagcaaaaatttggtgagtgtttaaaggaaaaatttatgtaaaaaagaaaaaaattattttttctttttcaaattcccattggctgatcactctttaagcataaatggctcataaaactgtcagaattttttgtcaaatcatttaatttctttggcaggttgccaaatgtatgttcctctttcgaagcatagtgaaaatgatcagatcacttcctgataatttgctgtctgtcaacgcagattcgaggaaacactttgaagcttcaaaattcgtgaatggttttaatagcacaaaaaaataaattaattacataaaatttcgaataattatttaataatttcctaattatctccccccccccattaatgacactgtttactccattgtacgttggaccaattgttctcaactttttattgaaattaatggtttgccgttcaattcgaacaagaaggacccgaataatgtaagtgatgcagtttagtattcgaacttcggtgcaacaattgcagaacgaacttagtgcctgccgatatttcaagattaaattttgaaaaattttaataaa

SEQ ID NO: 82183 - DNA, 491 bp, Heterodera glycines
atgaaaagccttttgataaataggaatagaatggatcatttgcaaaagatatggcaattatgtgataatttgtttgggcggtacgattttgatgaatgtttggtgtggaattacaatttaaaaaattaattaattatgcgtatcaaaaacagagataattattgtcaatgaaaaggttattttgtgttttttgctattttcattatttttaaatctgtcaaaaatctcagacaatggcacattttatcctcaaaatttcttgcaccggacgacacacttcactgggccatgtcgccccgcctactcaacgttgtactttgggctgatatgcatgtgtttggcggagatgactggaaaaacattcacattggcaccataagataatacaaaaaatatttattaatgattttgttttaattggtaccattttttaatcgttttcaatgtgagttgtggtaatattttggccttttttgatgagtgccatagaa

SEQ ID NO: 82184 - DNA, 761 bp, Heterodera glycines
atgcagccaattagccctatcaaggatttgaagcaatcgatggtaagcaaaaatgttgcggtaaaatctcgaattttcatttttaagaccacttagtcaatgttcaatcattttcattttatttttagtcaaaaagtgcatcacttcgatatgcaatatggagggagggtgcctattctctcaaatttaaaggaaaaacattcgatgaagaaaatttttggcattttctctaaaacctgggaccggccctaagattaaaaaaatgcattttctcccaaatgataacacgaaccttttaaaattattttcagaccaaagacacggaatcgtcgatgcgaagcctgaagacaatcatcctaaaaataggggcggaaaagaggagtgctgaaacgggtgcgccagcaaaggaatacgaagccggccgattttacgagggtaaaaaaagaattaaatgaattttgtaaaaattggagaaaattaatattaatccaacaattccaaatttagcgcttctcattcatacaagcacaggaactttccccccaaacattggcactcgctttgtcattccgcaggattcaaacgcgccaaattatgtaaaatttttagttcgtttttctttaatgcaataagttatttttattattcatagattaaaaggggagtttaaaaacttaatttgccaaaataagggtgcatttaaccgaaaaaattggttataactatttaatttgttgtgaaatatgattcagttaaataaa

SEQ ID NO: 82185 - DNA, 1167 bp, Heterodera glycines
atgcgaaccgcagcgggagaacaatcgttgcgcgattggctacaagaaatcggcaatgggatgcatcgagtgggtacggacagccaaggcttcaccaaccaactgcgcattccgcccgaacttctcgtggacgacctcgaccacacaattcacttctgcttcccagaagcactgtttgacgacccgctggccaacgctgacgcaattgcccacaatgccatcctctgtccaaccaacaacgacgtgcagcacatcaatgaggtagcgcttggcagaatgagcgggtgcggaagggaattcctgtccatcgacgaacctctggagccaaacgaagaaatgcacaatttccgcaccgacttcaacatggaggcggtgcacaatgaaatgccatccggaatgccgccccacaaactgaccattaaagtgaactattttttgttttaatcatttttaaccaattaatccaggtgggtacgcccgtgatgctgatccgcaatttggacgtcacccagggactgtgcaacggaacacgacttcaagtgatgcgcacttcggagaacaacctgttctgccggattctcaccggaccacgagcgggtgcgcagaacatcatcgccattccacaaattcaattcgaatatggccgcgcacgacaccaccgtggactacgcttccgccgtctgcagtttcccgtccgcctttgctttgccatgaccataaacaaggtgaaatacagattatttaaggattgaaatatataagcacaaaaaattaaaggcacaaggacagacgctgcagcggatggcgctcgtactcaacggccggcaatgcttttcgcatggccaagtgtacgtcgccatgtccagggtcacgcagatggacggcatcagggtgtacgcgccgctctgccaaagtgggtacggaacgcacatcgagaacgtggtttaccacgaactgttggacttggagccgcagcagccaaggacaccgattcgtggactgatcgacgtggacaatgacatggacgtggcaataccggacgtgggcacaagagtaccggacgtggacaatgacccggacgtggaacgagataatggaaacgcagcgggtgcgaacgatcaagaaccaaatgatcttgatagttcttttgatgatttttttgattga

SEQ ID NO: 82186 - DNA, 400 bp, Heterodera glycines
atggcggcggaatggctccaaaaaattgattttgtggtgccagttgagaccacaaaggctgttggatggcaccaaattgttggccacccggttgatttggagtggcatgctgctgatccgagcccgaaaggtttgacattgcactaaatttttaacacataaaaaaatattataaataatgaaagagcaaaattatgaggaaaagaagcagcctaaagaatcaattttcaaaaatgaaaaaggcggaaccattgggagggccaagggtgagaaaatttgccaaaagaagcatcatcttttactgatgaatcatttttattttggaatatataaacattaatatggcgctgagttgaagggtgtgtgaaaaaaaaaaacaaaccgtcttagcaaaaaaaaa

SEQ ID NO: 82187 - DNA, 1131 bp, Heterodera glycines
atgggcatgtcccttccacttgcaccaaagtaagggatatgctgccgacatattagcgcatcccgggcccacaccgtgaacctgcacatttgcgggtctggggtaaatttaagcactaattttgtcttttttattcgataattctgggcatgcggaagaagactgcagactgtgaacgtttatgacttcatacagagcattggccagataaccaatatgtgttttatttgttttgaggttcaagagttttttcagttgtttttttaacggcaactttcggcaggcagggcctcgcccaatggaagtgacagaagcgcacaaacagcgcacagccgtaccacccgccaaagccaaacaccgccagcacatttggttgtcaatgctgaacatgaaccgcacgacaaccaagctggtctgttgatcgctcaacggcaacctaacgcacaacagcgcgattggtttggacggttcaatgcggtgacaagcgcacagaagctcgacgacctgttggcacatttggttgtcaatgctgaacatgaaccacacgacaaccaagctggtctgttgatcgctcaacggcaacctaacgcacaacagcgcgattggtttggacggttcaatgcggtgacaagcgcacagaagctcgacgacctgttggacgagttcaccaacgccgtccgacaacaggcgcaagcgactttcacacaaaggcccgctcaacaacaacgacggccaagacagctaccgaaccaacatggcagacgccgcaaccaaatgaatgccgatgatggtccgccatttgatactgtcgccgccaaaagctgtaccgcgcttcacgcgcgagagcgtaccgggagattactgagcaggcgtcatcactgtgccagctctcggctgaagtgcttcatgggcatttcacaaacgtgttcggccccagcccgcctgtcgccgagcaaatgcccaactccgtgccatttcacgagccgcccggcgacaacagcccgttctcagccgactaacaacagtgaagtgcggctcaagcggtgcagtgcagcaacaccgcaccgggacccgacaacatccgctacgcggtgtggaaaaggtttggcccggctgccatatgctcactga

SEQ ID NO: 82188 - DNA, 3131 bp, Heterodera glycines; identical to SEQ ID NO: 17660

SEQ ID NO: 82189 - DNA, 67 bp, Heterodera glycines
atgagttggatggggctgtggtggctggcggtggttgtggtctttcatcttttggtgctttgcttag

SEQ ID NO: 82190 - DNA, 1209 bp, Heterodera glycines
atgccaaatatggacaaatatggaaatatggacataaatcgcgaaatatggaaggttgtgagacaggcgtcgaaatttttcgcaattttttatttccatatcacccacatatttggggcaaaatgcagcccaaaacgggtcggggtcacttcggcgcggaccatttcggcgccgcaaattttgaaatgctataacttttttatttgtcagttagctttagccaatctggcatcatttgaaagctctatgtgtgctctatatttacatgtaaaaatagaaatgaatgattcaaaaataaaaaagttatgccacgcggcgccgaaaaagccaagaaaaagttaatttttgaggttttttggccataacttttttgtaaactgacgaaattttttgaaattttacaggctaatagagaatctgaagagctatcgaatgataacaaaaatttttaatttggttgatcaggaaaaaagttgttagcaacggcgccgaaaaggccggcgccgaagtgggcggttccccccaaaacgtcgctttaaaacatttaaaattaaaaaaaagtttattttcaattttttttgaaaaacttagatgtacatacatacataaatgaaaaatgctttgctattagaaaattgagaattttttttatttgaaattcttaggaaaactttactattttattgcgggcgccttttttctcggcgacattttgtcctgctccgttttggggccgagactttggtccatagatcgaccacattctcgggccatatcaccacaaacagattattactctccgccactttcctcctctctatttccatatttagcactttccttttttcggggtttggcggtttggccaccctccccctcgcctgtcgccttttttggtttcattttagaattggcgggcggtgaccacacgggcaatcccatcccgaccgttaatggatgggataacacgcgcatcatcaccttctttaataccatccattatccacaaaatccaacggcacccccacaaagtgtccaagccacgaaatgtccaaaagagtaaaaacccacgaaatgtccaaaatttttcaaaatttataaaaacaaaatgagtataatttaggatttttagggttttcggggtcgctgaatacgaatataccctttatattaccccttgcctaaccttaggcccatctgaataataaa

SEQ ID NO: 82191 - DNA, 241 bp, Heterodera glycines
ccacaaaatgtccagcccacgaaatgtccaagtctcgaatttgagtttttttattattcagatgggcctaaggttaggcaaggggtaatataaagggtatattcgtattcagcgaccccgaaaaccctaaaaatcctaaattatactcattttgtttttataaattttgaaaaattttggacatttcgtgggtttttactcttttggacatttcgtggcttggacactttgtgggggtgcc

SEQ ID NO: 82192 - DNA, 771 bp, Heterodera glycines
atgaaacttttcatttcgaatgcttttcctttgttagccctttctctgctcgtttggctgctccgtgccgaccagggaaagcttgaaaagcgaaacacggcggaagtgacaatgagaaatggcaacgcaatggcactgaatgagcagtgggagtttaaagcacagccgcaagaattggacagaatggcagtggcgataatggcaagaaaaacattggcatttgtcacaaaaaacattcattggcatttgctgtttttttttgatggccaatatacaaaaatgcgtctttgggcctactaaataaaggccatctctgctgaaggtgcaattgaaaattggtcaattgctaccacccaaaatcctcacttttttttcctattttgggacactccaaaccccaaaaaggcgtgccgcctttttaaacactaattgtcatgcatttaaatgtttaggtgatggactcttttggtgaagtgggccattgcattttgggcgatttgtcgggcgccgatgcgacgggggcgcagcaatggcacgaagcgatcgaccgacctggccaaggcgtgacggaatggcacccactgagtgccaattggtgaaagctgtcgcaaatgatgccctttttgctcttttcaaatttatttggttaaataagaattttaaagaagaataacaattagttttgtgtttgatttttctggtcccaatttcgaccaaagaaaaaacaaaacaaatatttgtccatttcagtttgtatgtaaaaatatgtaa

SEQ ID NO: 82193 - DNA, 1912 bp, Heterodera glycines
atgaaaattttgttaacatttttgctttcatgtatcattcttcttcatccggaagtgaacggaaatcaattcaatgaagttgttgtttgggatgcgaaatgccgaaaacacatcagagaagtggaaattttggccaaatatggtaggaaatattaaaaataaataaaataaataaatattcaaataattttgcaaataattaatgattttaatgagaacatacaatttagaaaattattcaacctaaattcagaaattaaaaaaaaaactcgtggattttgattcggcttatggttagggtattcaataataaaataatgtttttacgaaaccctgagctcgacattattacttaatttgttcaaatatttttattatattcagaagtacttaaaaaaattcgttttcaatggtttgtttattaaactgtgaattttaaaaatttattcaaatttttttatggatttcaagattcaattcctgtttttagaatttaaaaaccgaggttgggatcggttgagttcgattttctcggacttagcaccctaaaattactttaagaataattttaaattaaaaatctcttgaaaatatttgtatcaattgacattacttaaaaaaaaataattcattttaaaatcactcaataaatggtggtgacgttttaaaatttgttcaaaatttttttttattaaattgagaatcttcgttgttgagttcgattttttcatggacttagccccatcgggaagggatacgggaacgggattcccgggttttcccacgggaatcgcgttcccgctgggcccttaatataaaatgaaattataacatggttggtcacttcacaaaaagtgcaaaaatcaaaaatctgatttctctatgattttttgtcaattttttaattataaacatattaaattaattaaattgatgtttaaaacacattcttctaagagttttttgaaactcgaataaaaatgattaaagtttacctaatattaaaaaaatccgtagccagatcattttgaagcttaaatgggtttataaattttacaaaaaaaaaaaaagtctaagcaaaggcctagacctaagcaatttagcttaagttgaaacggatacaaatatttccattttttatataatttgagttcatttttaatttaatttcatttgtaattgaactttaaaatattaaaaaatttaaaagtaatctgactaatgatttagttaatactaagaaattttacagttatttttattcgaaatccaacaaaaattaggtgtatttaacatcaatttaattaaattttaacatgtttataattaaaaattgataaaaaaatcataggaaatatcagatttttgattttatttttttaacttttttatgaagcagccaaatttgcacttttgtaagtgacctagcaccaattataactattaagaaaacagtgcaaatctaagcagagctttgaataatttgacaaacgaaattcgccaaaatgtcagatgcgaattgtcgtacgcaattcacaaaaattatatttccgatgctaaccaaaagaacaacaaattcgacgcctcaaattcgcactttatgtatgaattggacaaaatcaacaaaatttcaattgaccaatcaacgaacacattgccaactgcattgatatggattaatcaattgcgcaccgatttcgccacgttggtgccagaaattgggctggtggacatttggcaaaacgttgacagttacacggaaacccgcaaatccatggagcaattatatcaaaaaattgctacaattcaaaccgatgtattttatagtggcagtaatttggttaatcagatcatcagtgaggcaaaagataaattggaggacttcaaagaaaaaagcggtgggtcaaattga

SEQ ID NO: 82194 - DNA, 1278 bp, Heterodera glycines
atgtgtggcaggtgagcagcgccgggtgggccgagtgcgactactgcttgaactacgacgcgcgcagctgttgcctggtgtttctgcccattgggttggcactcctctttttcgtgtggctgttttctcaggtgaaataatttcaaatttttgtttagagaaaaatttttctaagattttttttcaaagagaatttgctaattagcaatttttatttttaatcaattttttattttaacctattttcatataaattataataacatatatttttatataattaaaatttttgttgcctagtttttctgcaagggaatcaaaaaaaatatatttttttgttattttccagtttaattaaataaaaaatatattgaaacaaaataaataaatacatacgatttcgaacaaaaaatattgttcattatgaatttaatttagaaaaaatgctagaacatatataaaagcccttaatatcctatattattattctcgcccggatttttaaacacatttaggtaattaaacctcaaaaattcttaaatttagcatgaaattatcataaaaaagcaaattatcacaaaaataaaaaacccaataaatttcagcgatttttcgaaaattagaaatttaaaaaacttttagagccttagatttattgcaaatttattgatttagtagatggaaaaaaatttagactcagttgacccccccgccgcccatgtggggggggggcttgtctgtgttgaaaaagtttggtgattagaagctgtaaccaagttcgaaatgcagttttcatgtttccttttgtttgccttagggcgtaagattttttaaattatatttattttttaatttaagaagggccatttcgcggttggcctcgtcattgtccaactgttggctatcattttgcttggcatcgccctttttctgctgttcatggcctttcatcggtgtttgcgccggcttaaggcacgcaaaaagtgctgtacaaaacaacagcaacaaacagttgaagaagcataagaaactaatcaataaatggccaaagaaaaatcgataattaatctttgatcagctcagtaaattatccgatgaatgaaacagacaagccgtgaagaggaaagaaaatcgaagacaatgtccatttttgaaattggaaaatttatataaaatatatttttcttttacaatatatcttttttattttttccttttttttgactaaattaaacagatgctttatgtacatttatttataaatatttgtcattgaaa

SEQ ID NO: 82195 - DNA, 968 bp, Heterodera glycines
atggatgagccaaaagcggagaaattcgtttccgatccaaacaaatccaacggcacagtttcgatggaaattgaaaaattatccgaatttgcgcgagaaatctacggaagtggaagtaaaagtgaaactgtgtatataaagggagtgccatggaaaatattggcacttataacgaaaaatgaaagcactgagaaatggttgagcttttatctttggtgcgactttactgaaaaaggtttgcttataaaattatataaagaattacaaattattttgtctataacttggtgtaattaatagctctattgaaaataattatttaatcaatagggttaaagttgtatgcactaaaaattgccgaatatgcgcataaaatatttggtgttcaaatttatatatgaaattgcgaattttttaaaatttttataatataccaaaacaaattatatttttatataaacaaatttttttcaaaatttcttgcaaaaagctcaaaattttcgtttttaagtatgtatttttttattcccaaaagtcgatccttggggggtgtatttttcgtttttattgcatttttcttatgaaaatttgccaaaaatgactaaaatatgctctaaaaccttgaaaatggtgaatatgtatttattctctaaaagctccaaaatatgcttttatatgcattaaaaaccttcaccaaatcaaaaaattttaacgtagaaatgctatttttgaacccctttcttcatagcatatgcgcagaaaaaatatgcaaaagcatataatttatagccctactaataataaataaatttaacgtacaatttgaagtgtttttttatccaaagattttccaaggtcatgctcattgtcagtttttcattctcaaaagttttcgattgagtgatgaaaaactaaaattaaaaattgttttaattgttaaaccttttgaaggtcgactcccagaatga

SEQ ID NO: 82196 - DNA, 101 bp, Heterodera glycines
ataaaagtcaacgtagaagcctcaaaccaagtggaaaatgcgttttttatgcttaatatatcgaaactagtgcgcagaaaaaaaggcatatgcctcaaaat

SEQ ID NO: 82197 - DNA, 428 bp, Heterodera glycines
atgcaaaatgagaaaaacaattcagatgatgaacatttttacccgcaacaacagcagcagcaacaatcgttggcacagctggtggagaaccgcatacagcttggcaccgcgattgatgagggcggtgagaagccgccgccgcagcagcagcagcagcagcacagtcgcgagttggccatggccatcgtcgacccaagcggtggcacgacgacgacaacacccgcaacactaacagtgaaggaggagcagcagccgcagcagatgaacatggagcatcagcagcagacacattttgtagctgctccaacgtcgtcgtcagcagcgggcacagcccaaacgatgcctaacgcagcacaaccgcagcagcagcaacagcaacagatgaactcgttggaaagtccatgcggagggtgtcgagaattgaaacg

SEQ ID NO: 82198 - DNA, 1885 bp, Heterodera glycines
ctataaaagccgcccaaattcacttctccattcagttcaaccaaaagttggattttgctaaaataaaattgtgcgctcttatttaaatatattaaatttaatttaaaaaatgacttcaaaacgcaacggaaatacggaacaagccgggccgtcgaccaaaaaatgggattttagatcaatcgggtaagtaatttttaataatatatttaagagacaattttaatcaataatttttcaggaacaattttactgaagaaatggaaaattataaattaattgacgaacggtcgacgatttgcgaaaaatttggattcacgaagaacattacggaatttcggatcaattcggatgtgagacgccctgacgaagcgatgagggacgcaatcgacacaatgattaaggcggcttttaagactacggaagaaaggatgaagcggaaagtgcggatgtttggagtggcaataacgggtgccgggcttgcttccccggtttgggtaccgtacagggcgtacccgcagaacaatgcggatgttattatgcaggagattaataagttggggcagagcggggacggagatgaaaataagaaaacgcttttgttgtcggagcctattatgatgaaaattacttgcgtcacactgcccagtggagaagggccgaggaatgtacataaatttgatttcggatttaaggaacaccaacggataatgtaagtttttgagaaaaaaaagaaaaaaggaaaatagaaaaaaagaaaaaattataattatttattaagtatttcgaatgtggataaattttgtttgttttacgcactggcgtcgtcgatgaattatttaattatggaccgttttgcatttaatcgatttatgaacaatattatgagacagagggacgcagctactgagcttttacgtaattgtggaattgatattaacgaatatagctatggagtggagcacttatcgagggttcagaattatttggtgggttctaaaattttggaaaagtgataaattaatggattttcaggatgagatttaccctggaaagtaccgagtggtggcatttgaaaagtcagctgatccacggaaatcaatccgtgttttgtggaagggccctataggacgtgaaaatgtagtgccgatatttttggagaatggtcactgggatggtctgaagaattacgtctgcttttttaatcgtgggagaaaattctgtaaggctggggctttagagttgccgctgtccctttacaatttaatcgttttttcgagttttaacaattactctttttctctaattctctcctctctcctatagtgaatgcgcatctctctgcccaggggggggggcccacatttctgtcctaatactactgagggcgtatggaagtacgaacagttgcgccagttttgcctggagctcagcgggttggccgtacttttacaggttttgttttttgacttattgcgaaacaatttcatcagagatgttttttggattttaaccatgtgaattatcaaccccttccccaaataggagcagtgtcaccccgaaagttgcacacaaatgaccgcgactgagcagtggatttgtgagtcttccttattgattttctgtctcaaaatagttagttgagcttggcttaggcctgggtttttccaggttatgtacgaaaaatcttaatttccaggaaaatacttaagaatttgctctttttattgttgcggtttagtcggttttacgcgtcctatgaatgaccatactcagtttcttaggccataacttttttctttcttgactaaggcctccattcttggtatcaaatgaatgcttaaactcttggtaatcttatgtataactaaattctgagctaaaggca

SEQ ID NO: 82199 - DNA, 725 bp, Heterodera glycines
atgaagcgaaccaacgcatcaaacatcactccacctcgcgccaaacgtgcaatgccacctgcactggacctggaccaaaacactgccacactcgaagagcaagaacgccaacgcaccctggtcttcattggcctcccggaaagcaacgccatccgcccatcggagcgtgttcaggaagacagggaagccgccacaaaaatcctggaccatcttgaagttgaggccgaaccaaccgccgtctttcgactcggccggttcgacccccagcgaacaacacctcgcccgctcaaggtggtcatgccgacgcccacacaccaacatgtggcactcggaggatggaagtacgagcgtgctcggctccgttcccaacagaacctgacccgtctgttcgtccgtccggcgctgtccaaagaacaactcaaagaggaatacgaagcgcgtctccgaaaacgccaacaaaacccagctccgatggcaccggcaactcagctcccacagacaaatgccccgactcccgttgtcgaagatggaccaaaccagaagaagaccagtgatgacattcccaaacaaccggaggtttttgacgaaacaatcctcgtctgttatgaagcactaaactcatttccacccaccgacaaaattgttcaccaaattcaatcgctcaaaaaacaataccctcatcttttcaacaaatagttctaccagacctccaacaatttcttcaa

SEQ ID NO: 82200 - DNA, 85 bp, Heterodera glycines
atggcaagcgttgatactgaaaaagaccgcgatgtgtgtttatgcccaccagctcctttgactcttcgtccaattcgacttggag

SEQ ID NO: 82201 - DNA, 2367 bp, Heterodera glycines
atgccaccaccgcatgacttacaaactctccgatcgttcttaggtgcactaaattattacggacgcttcattaagcaaatgcgtgaactccgtgctcctctcgacgaattgctcaagaaagacgttccgtggcattgggaggaaaaacagcaaactgcgtttgaacaggcaaaatcgatcatgcagtccgacatgctcctcacgcactatgatccgtcaaaaccgatcatcgtcgcagcggacgcaagcaaagatggaatcggatgcacgataagtcacaaatttccggatcagtcagaaaaggtggtcgaacatgcctcccgttctctctctccagcagagcagaactactcccaaattgaaaaagaggccctttcactaatttttgccgttcaaaaatttcacagaatgatttatggacgacgcttcacactgttgaccgatcataagccgctcatcgccattttcagttcgaagaatgggatcccaatctacgcggcgtctcgacttcaaagatgggctctcattttggctaattacgattttgaaataaaatatatctcaacgaattgttttgggcaggtagacgttctctcgcggcttgtggcaaaacaacgcgagacggtggaggcggaagaacgagtgatcgccagcgtcgacaaaacttcacttccaatttcagatgattcagcgctcgatgaatctgaaacggccgctgtcgaatacatcttcatggccaacattgatcagctgcccgtcaccgcggatgaagtcgccgagcacactcaattggacactacgctcaggaaagttttcgatttttgccgtaatggatggcccaagaaatcgcctagtgatttgtctgcctttttcactcataggcacaaactttccgaagtgaatggttgcctccttttcggggaacgtgtcgtcattccggcagctttgcgtcagcgaattttggccgctcttcatttcactcacccgggaatcgttcgcatgagggcattggcacaacaacatgtctactggccccgcatggaccttgacattgaacgttgggttcgccactgcatcgactgtgcgatggcggcaaaaacaccaacaaaaactacactctctccatggcctcgaacaaataaggtctatgagcgcattcatatggattttgcaggcccatgttctgacggcaatctctacctcatcatcgtggacgcattcactaaatggcccgagacttttcaagtgaaaagcacttctgcggacaatgtcatcgttcaactcgagtggctcttttcgcgatacggttttccacgtgaaatcgttaccgacaatgggccaccctttcattcgaaagatttttcccatttttgcaggattaaaggtatcaagcaaacatttagtccgcctaatcacccacagagcaatgggcaagccgagcgttttgttgacattttcaaaaggcaaatgaagaagtgttcacacggagacaaaaagtggatcaccaattccctgttagcctaccgcaacacaccaaatgctgcactgaaaggacaaacaccagctgaacttttccttggccgttcacctcgaacacaactgtcactgctcaagcctgacatttcttgctcaaatcgcaatcaaaatgactacacaaacaacatgccgaagcaattcgatcgcaaacatggtgctcgccaccgaacatttgcaattggtgacgatgtgctcatcatcaactaccgtaacaacaaaaagtcttggctacagggtaaagttgtctcaggttctggtgttatttggaaaattaaagtccccgtccttggtaacgtcattgtgcgtaggcacactaaccaaatgcgtaattttttccaattccccaaaaaagtcaaaatggaaatggacccggcacacagcatggttctcctggtcttgttcaaaagcgccacgttcgtttcgctgatgaagtggatcaaaacggtgccattgctcgagaccaacaacaaatcgccgatgtcgccgacaaacaaatcgaagtccggcgttccaaccgtcaacggcgttcaacaaagaaattggatttagacacttcaaaaccgcgttatgattacatttaatgatcgttttactttcgcctacccattttttttaaaccaattcaaatttaaaaggggaggtgtagagtacattgtaaatattcaaatttacgccattttcggattactgtaattccactctttttcctttctctcgctttcataaatacccatctcttttcactcatcaattgacttcgcttttcattattcaattcccttctcatcgctcgtcttctactccgactttttatttatttacttctgacaa

SEQ ID NO: 82202 - DNA, 1109 bp, Heterodera glycines
atggatattggacgaaaggtatgtcagataaataatatattttttaattccttggtcttactgatgactcgttgagagttttattttttgaaaaaatgacgaaacaattcaaattttttgtgtttttcaaaaacaacctattgttattatttggaaacgaataattgctcttaattaccccacccacgccggtacaattaagtccaattaaggtgcactttctcaaaatgttgcgtcccgcccatgccaacaatgagcagcaacaatcgctttgtgcccaactgcccaccaatgtttggtgcactccgtccgccatcggtcgcatggccaccattttgcgccaaatgcacgcggtggtcagcgaggaaatgggccgggaattgatgggacggcaacggttgatggaccatctgtgcctggtccatggctacttcttcatgttgcgcggcgattttgcctccgcacttgagcacatcctcttgtaagacaaggcatcaaaaaaaaaatttaatttgaaaaaaaaaaaattttttttaggttcacctcgaaaacattaaacaaaaaatttttttgtaaattaaaaaaattatgtaccccacaccagtgatgccaacccgaaacccgaggtttttctcaacccgaacccgaaattttttgagtgccgacccgaaacccgaaatttttctcaacccgcggcatcactgccccacacagctataatgtgctttttcaagcaaacaaattgtgtttttcaatgcctttttctttgagttatacgggtgctaaacaatttttttcaccgtcaaaagcacggactctccgatggcttatttttttttgtttgaaaaaaattttccaaatttttaaaattaattttaactgttaaaggaattttgtttcctcgaaaaaagcaaatatcatatcgtgtcccgacatttgcggtccagacatttgcggccccgaatttgcggcccgacatttgcgcctttgtccaaaatctggttcaaaactaagttttttcaatcactgatcgcataaatagctttaaataagcgattaaaagtgattgtacatgatcatttgatcttcaaaaaaatgttgaaaaaata

SEQ ID NO: 82203 - DNA, 1172 bp, Heterodera glycines
atggcgccgcgttatagtgttggccaagtgttggagttggttgagaagatgcgcaacgcgattccagtggtttggtggaaaagtttgagctatcattacatgcgacgaacacggcgagtgctgaggcaagaaaaatgataaaattgggaaaacattaaaattaatggccaatattgaatttaaaatattaaagaaaaagaaataaggaaaaatattgaaatgtaaaattacgaatttatgccatttttaaagggttcattgagttgaataggcaaaaataaaattagggtcaaatagacaatagtttataacttaagaataacctatattattaaaaagggtaaataaagttcatttaaaatgatttaatttaataagccaaaattattttaaactaacaaaaatatttgaagaaaaagcgattggaaatgaatgtttttaaattaattttcattttttaatttcataggtaccgtaatggggacgcggtcagcaccacccaagtgtactacgaacgagtcaactccaacagttccggcaatgtgtaacactgctaaatgcttttgctgtaaactaaccaaattttagatttttgtatgacgaatgcggatataaggtaaggattaatgaaatttttgaaaaattggataatttgtttaaaaaattgttcttggcactttttaggacctatccaagcatattgttgatttgcacaaatttgcggctgtccgaatgcgcttttccaagggcttcgtgttcgcctgtgtgcaggcggccaacgaatttgaggagcagcggacacgcttctttgccgagaacgaaatgcgcgacgattacatggaggtgctaacattaagcatagagaagagtgccattgatcaaagatgttgatatttgtgatcgacacgtttaacattttccacagttaaacaaccggtaatggtaattagaagtctttaccgttacatttgccggaaaatcgaatttgtggtcactactttatagtagattataaaatagtcgcataagcatttctgagtgccataatacattctactacaagaggatggattacggtaggaatgtagaatcaggagcatcattttgccagggttttaccgggaatgattgcttgactataaaaattcacttttaaatgcttccatattaaa

SEQ ID NO: 82204 - DNA, 890 bp, Heterodera glycines
atggaagaactattcttttcggttgatggcattgagtacaataccgtgaaacggatctcaaattgcgaaggtcaaccccaatttcgcggtaatttttttctcctttccattattataaatttaagttttaaaaaattgattcaaaaaataaaatttaaattttcaaaaataaaatgtatttttgcacgaaaaatgtatgaaaaaaactcttgaaattcttcgaagtggagaccccaaacgttatctctcagcaatatttagttaatttaattgaacataatattattattattattttgtttaattttaatcaattaccacttttttgttagttgcagcggtttctattgtatgcatatggaaccttttgcttttttctatttattttattaaataacgaaataagctaattctgtaaaggcggtattaatctgaataaattctgatatatcgaagaaactttaaaaaaaaaattaaaagttcattttattaaatttccaaattaactgagaagagttttgggcgtccgtcacttttgccaaagcgatgccttccattcatttttggattgcccccaaggcttttcgacgcccggcagggcggcacaacaacacaaacattttttagaagtgtctttgtgccggggacgtttaagatggattgattatttgccctttggttggcgagagttagtatgggccaataaatttggacttttttgacagttttggcacttttttagggccacagacggaggagggcgtgccaatgccaatgttttggttggcatcctcaaaagcagggaaagaagaaaggcaaaaaatgaaaaagaagtgccaaaagaaaaagaaaaaatattcactgacattttattaatgaaaatgaaagaa

SEQ ID NO: 82205 - DNA, 2329 bp, Heterodera glycines
atgaccatttacacggtgttcaccttttttggccaactgatttttgccattttcatggtcagcaaaagcaattttaatttcttaattgcaataataaataatttcaaattattatttttttgaaggttttcgtttatgtgaccgccacaaattttgttgacgaacagaacaatcgctattcatacgcacagaaatggtttaacattagcttggagatggatgacttgctttttattgcaaatttcaatcaatacccgtgggtgaacgatttggccacggtggccataccggcatggtaattaaaagaaccaaattgttaatttcatcgtaatagtttattcgggttcgcaatttaattagtcaaaaagaataagttcgcaattttaatggccgatttaggcttttgctgtgggtgtcgtccaaaatgcgcgaaattcttgccgaaaaattcaacaaatttactagccacttaaagaagcaaaagttgggaagcattcaactgacggctcagtccaaaacaaacaaagttcaacccaaaacaatcaaagttcaaccagcggcaaagaatgttatgggataaatggaaaaggaaaaggaatggaagcataattaaagttttaacgtttattttgataattatcttaaaattaaaaattagtcatcgtaaaatatgaattttaaatttttttttcttaaattggttttgaagttttaacaaaaaatattaaagaaagccatggaagcataattaattggctacgcgataggcgcagcggtagaaaaaatcggtaattctgaccatttttaacagattttcaccgaaaaatggcaatttttaggtcaaatttaaactcttagggaaattctgtggacggaacggcgccgatagatgccgccgtgaaaatttttgggatttttaataaattttgttaagaatgttttttcaaaatttcaataatttttccccttcgccagcgacccccccccaatggtcatccttaacagtgtaaaaatttctctgtttccgagactaaaaaccagagaccgagatgcgaaaaacccgataagtttctcgagtcaagaaccgagactctcgcacatccctaatagtaatgcgcgtgtagctgaatagccaattcccttttttcgaaatttaaggaatgctaatgttaattagccttttgtgtggtgtataccgatactgaaaactaataaaattaacttcataacattgctcaaaacattcttgattgcatttgataaccctaaatgttttatataaggctctcatccgtccttgggtgccaggacgtccttggattagggcctcgccgattggaaaattgaaaaagtccttgtttacagagcatcttaaattccaaaaagcgaaaaaggggattgctattccgtcgccacgacgcattgccatgttcaagtcgttgatcagggcagttttaatttttcaaatagtaaattatgaaatcactttatgcctatttttaccttttaatccctaatttaacccacaaaaagaaaaataatgagttttattagttaattagccgttttagttcgatattctccggtagtaagtaattcattaatgtctgctggttgtgattttttctaatttttattttaaattgcaatcttcaaaagatgctttcacaaatatttatctctattattcttttgccgttcttttcaattccatgcatccattgctgagataatgttaaaaatagagaatataggctaattaaaataaaagaaaataataaattccaaaaaataaaactgatactatcttaaattttagttaatagttaaaaaataataataaaattataaatttttaaaaaatcagtttcagaaatgatcacttcaaacaaaagcgaaacccaacggaagaagaaaagcatggacaaattctagcaatttatttcaaaaattggacagtaatggacagtatagaaaacactcgaaggacaaaaggaaattgtgaaaaatgcaggcgtaactatagtaacatttcttcagttaattgtttcattcactattaatgtataatgacaaataatatcttgtcgtagatgaaccaccaaaaacttgaacatgctggtcatctttatgtctttgataaacttagtgcgtatggttttaacaaattttggaggtgtgggaacaaaaataacaaggacatatgttgaaacaagtcaatgagaatgtctgtagagcaaaccctgcgcgattggaagcaaacgcgtcattataggttaggcaatagcaaatgcaaaatattttgtatgtatattcgacaattttagga

SEQ ID NO: 82206 - DNA, 106 bp, Heterodera glycines
gtggtatcattcaacttcatgatgcgtatcatattccgcaattcacaactgctagacagtttgattaccctttggtctaccgacaccgacaaacatctatgcccaa

SEQ ID NO: 82207 - DNA, 581 bp, Heterodera glycines
  unsure (1)..(581): unsure at all n locations
atgtctcttaggggattttcatcctatatttgtggtaagtttagctttcnatagagtatatattaatgcagattatgtattacctaatgtatcgttgctttaaactcattgttgtgcaacgcaatgaagaaataattttgactattggcagcattgtttcaaatataaattttaattaaatttattttattaaactagcgcctttgtgttttattagttttatattagggttaatcatttgaaaacaaaattatttactttctttattcaatttgtttttagtacaattttattaatatattttgttaattttggtattaataaattttatgaaaatcatagaatcttaagtttatttcttattatttttaggtggtatatttttgggtgcaattgattttgaatttcaaatgatcaacatagaattttataattatttcttgtcaaatatcgtttgagcgtgccactctggcttgtctgtattcagatttaatccagtttaaaaaccataacccaggctttttctcatatgtgtattaaaaagagattaaaaatttttaaattaattaatattaaataaa

SEQ ID NO: 82208 - DNA, 627 bp, Heterodera glycines
atgaaaaaatttctttttttgacaattataattctgttgctatcaaatactcatagttcgaacaaacagagacatcggaaacaaagggcagtttcggctttagctcgtttgacagtggctttatcacgtataggcacctacattaaagcccacccgtacattaccgcctcgacaattttgatggaaatgggctcagtttccctcaacatttatttgctaatacaagaaataaaaggttaaaaatctttattttttgaaaaatataattattttagcttgcgaagagaaacagatcttaaaggactttttcccatttgtgctcactctgaattcttatgaattcagtgtgaatgttgatgactacaaccctggatatatttttggaaaaataaataccgaaatagggcgaccagtggaagagatttgttttgcaggtcagccacaaaaaattaattcgttaaaaaattcatttaaagcaccgaacaaagtcacccgaaagataagaaaccgaaaagatgacctcggcattttgttgctgtacgcaattagacagcaaagtcggctggaactttttgaatgtccttgacggatttctgttcccgttggcccttgggaaaggcactttaa

SEQ ID NO: 82209 - DNA, 283 bp, Heterodera glycines
atggctacccgacttttggggatttgcaacttggggacccgacttttggggatcccgacatttggggacccgacttttggggatccgacacttagggatcccgacatttggggatcccgacatttggggacccgacttttggggatccgacatttggggatcccgacatttggggacccgacatttggggaccgaacgacatttgagcaaaagacacttaagaaaaccacggacatttggcaacccgacatttagggacccgacatttggggatttcaataaa

SEQ ID NO: 82210 - DNA, 1165 bp, Heterodera glycines
atgcgcgaaacgcaaattaatttaactgcaattagagtgaacagcaaaaatgaataccgaaatattaaagaaaatataaaaattggcgaatgttttgacatttccatccctcagcaggaaaataataaaacgaaaaaaatcacttttcaatttacaatttatgtcaaaccattagaaaatgagtaccaaccgccggcggatgaccacgacgaaaacccatccgatgaggggccgtatgaaaaccgaattttagacatcaaaatggacgacattcggacaatggtccgacgcaacaactttgtgatccatgagcctaatccgtcaatggtgtacacgttcaatttgggcaaaatcgatccgccagggtttttgtggaaacgcaaaatttttgttttgccggagaatgatttgagcaattaccatgcttttttgtatgccgttgcctacagaaatcaacggattcaggacaatttgaatagtaaaatttgcacgaaactgttgggatatgcgccatttgtgaaaattgacaaagaaattgcgcccacctttgaaacggatgacaaaagggtggaagtaaattttaaaatcccgaaaaattagtggccaataaatgggaagacactaaattaaatggatatttattgtttttaaaaaaataaaataaaaatagtcgcaaagttattaattaaaagaagagtaagtgaaacattttttcaccttcaataattttttgtgcataaatttctttgactaaaataggtatttacactaaaatattaaaggaaataaactaaacatttattcatttttataatttcagctaaataatgaataccaattaacaataccaattgatgcgagcaatctgttcaaacattacatttttggcttcaatttggttatttattcctatgaaaaggtcaatcattatttatataagcattgaaagcggccggcaaccagaaggaattagctaaacaattcgttaaatttggttcttaaggattttgcgtgaaagatttttctttacaaccaaaacacataattagtgccaagatttttagttgaaaacaaaaatccataaagtccttcaaaatcgttgcaaaaaaaactttttgaatattaaaatattgtttcaatttattacttgcttttatttcataaa

SEQ ID NO: 82211 - DNA, 815 bp, Heterodera glycines
ttattaccaccggagattgccggtgaacagcttcgcttcatcggccttgtgtttggccagctgctttttcgtgaaaatccaatctttgatgaagccaaaaatgagtttcatttttcggctaacattgagcccgaaattgatgcgtttaatccaacggagtgccaattaatatccaatcaatttgatcgccaattaaatgcccaattaacccaattaattggtcaaccgttggataaccctgaagaaagtaaaaatgaggagaatttttgcgcattttttgaatttttggtgcgacgaattgccaacgatcagatggaaccgggagacaaagaaaaatgggcagaacttgagcaaaaatcacttctgatcgccaaatatgggcctgagtttccgttaattgcgccaattatgcgcgcttttatcgtttttggcacggatgcgcccaaattaattgtgctttataaagtaattttgaaaaattattttttacatattaataaaataagaagaaataaaaaaaaaattttattaggctattttttgcaaaaaaaaaaattatttttaataaaaatgaactaataataaatctatatacatatataattaatattcaactgaccttctaaaaagccttttaaccatacaaatttttttcaattttttttaattttaaaaaattatacggaaaattatgtttgtatttgttctataattaatttttcaggctttgttgggcggatttattaatgaagcccaattggatgcatttttgggtgaatattttgattcaaaaacactgaaattggagacaaaat

SEQ ID NO: 82212 - DNA, 995 bp, Heterodera glycines
ttttaacgcaaaaacaaaaccaaaacatttccatttttcaaatcattttttaacgcaaaacaaaaacaaaacgccacatattgcgaccgatgtgggtaaaatgaagaatattttaccaaaccaaatcccataattgctggacgttaattgcgggttttaaactgtatgtgaaatcctgcaagggtaccaaatttcgtcctcaaaatttttaaagtaaaaattttttctcatttttgttatgatatcttaaatcattcaaacaacagttctgtctatattatttaatgctattatgttgggtaaccatcaacaattaactattgccagtgcaaatgcgtttttgcttcaaaatggtatgtccgttattttagtatagatatcacttaattgatcgatttaggacttaaactgagaaaacatcagattgaaggcatcaaaacacttttatcatggcacaaagagggccatggcggaattcttgcagatgaaatgggccttgggaagacatgtcaagcaattgttgtgggagctattctagcggaccaaatcggcaaaaggatgcgcatgttggtgatttgtcctctttctgtgattagccattgggagaccgaagtgagcaggtaagcatatgatgaaatgatcgagttttgtttcctgttatatattacaccgtccatttaattttctcgtgtagattttcttgtgatcgcttaacagctttccgttaccacggtgacaaccgaaagtccctcgagaaaatgagccactggaatgtgcttttgacaactttcgaaatttttttgaatgatcatcggaatctgcctttcaagagttgggacattgttgttttcgacgaggtttgtttctataactgtcatatattgagctaaactgaacatttattcattataaggcccatcggctgaagaacagtgaatctctgacgcaccaggcactgtccaactgtaaattcgactggcttttgatgatgacgg

SEQ ID NO: 82213 - DNA, 380 bp, Heterodera glycines
atggaaagaaaatgccgtcaaagtccggtgccgggagcggcggagcacggctacaaattcggcggcatggactttgtggaccacatcgagttcaacccgtgctcggacgttggcgaaccgtttgacgagcgacagtcgcgtcgcgaccttcacacgggcccaccacggcggagaggcgacttttacgggttggactacacgacgatgttgccggacggacagtggcgacagcccactgaatgggaagcggaggacgcgcagaattaccacggctaccaggcattgccgccgcggaagaacttccgcctgtgcgggcgatacaccgcggacccggacgcaccactgaacatgtgagaaaggcggaaggggaggcggaaaga

SEQ ID NO: 82214 - DNA, 598 bp, Heterodera glycines
atgaatttcccactaattttgctgctctcgttggcgttctgtgcgctgatcatcgaagcatgtaagtggaagaattaatgctttataatttaaatttataattgaatttatttagacccgaaaaacgatgggccaattgtgcgccgagaggcagacaatgaaaaagcggcaaaagcgcaacccggcaaagaggagaagcaagcggtgaaagcggaggagaaagaggaagaaaagccgaaggacaaaaaggaaaaacgcggtgcagaggcagaggagcagaaagaaggaggagaaaagaaaggagaagaaaagcccaagggaaagaaggagaagcgcgctgcagagaaagaggaaaagaagacggaaaacaaagaagcagagaaaaaagagaatgaggagcaaaagcctgctggcaagaaggagaagcgcgccgcagagaaggaggaaaagaagtcagaaagcaaggaagcagagaaaaaggagaatgaggagcagaagcctgctggtaagaaggagaagcgcgccgcagagaaggaggaaaagaagtcagaaagcaaggaagcagagaaaaaggagaatgaggagcaaaagcctgctg

SEQ ID NO: 82215 - DNA, 1426 bp, Heterodera glycines
atgcgcgagaacagagcacttcccggcttatggaattttccttacatttggatgtttgaacaaattcgacaacgtgccaatgagttcgacattgtaaataaattgagaaaattcactaaataaattctgttaattaatgccaaaattcctgttttatttcttattgactaaagagcaaaaaatgcgggaaaatttgaaaattccaaagtaaatgaaattaaaaataaataaattaatattatttaatcacgaattgacaatcattgacccaaatgatcaaagattttcagatccatttcaacaccattgaacatcttgttcatatgaagccgtacattcacaaagcattgacaacactgcatgcacagcccggtggcagtacggtagacaacgagttactgtcccaattaacggcacatcagcaactgtttgatggtgccaatgttgcggtcagcagtgatcaagcggctaagagtttgaaagcgaaaaaagcgcttcgattttgtcaattgcacattgtcaaatcgtacaacggcacatcaaatcaatggcaacaaattgctaatgaatatgtgaaaatttaccgcacaattagccgacttaatgagttgaaaaatgtcaaagcatcacttttgcctgctgttggttcgtcatcaattgctaatgggtcattagcagaagcaaaaaatcaagaacaaaaattaatgttagtgagttaatgagttgtaaaaccaaaatcacaaaagtaaaaatttaaaataaaaaatttaactcaaattctcaaacattcaacagtgttgaaaattaaaaattacaaattatcagccaacgtcccaggagaaaagtgattttgagattttaaaagcatacctttttaacaaaaaattttgttttaagaaaaatttacctttttggatttttaagcgaaaatgaatttttttatttttataaatggatgttaattttacttatgaattttttttctgcttatcagatttaactcgttaaaatcgattgataatttttatttttaatatatctttttaatttagtgcgaaaatgtttatgatattttaaacaaatcaaaacctttgcgcattgccattgtcactccgccaattttggacgcattgcccccaacaaaaggtggcggcacggaacgaatggtctactttttgaccgaacaattggcacaacgtggcaacaaggttaacactattctggtgtaaatagaaattgtccttgtattatgacgtacttgaaagattgggaaaaaagaaaatacctaggagggaatcgaaccctcggcctccgccggtgcgttgatccgcttctctctaagccagtggtgctcttaccatctgagccagggctgttttggcgacgccttcaaaaaattcggaaatcggaatttcaacggattaaa

SEQ ID NO: 82216 - DNA, 1311 bp, Heterodera glycines
atggagaatgtaacccacaaatttttaggcattttcgatctgaattggattggcacggtgcacaacggcattccgcttgaccagctgacatttcgacctaatcccggcacatccgagtgcccctatttggcatggatgggccgaatggcaccggaaaagggcgtggacattgccattgaatttgcgcttcggtccggcatcaaattgaaaattgcggcacaattggtggacgagcacaagcattcatattggcacaagcaaattgagccgttgatcaatgctaatcaacatttggttgaatatgttggcgaaattggcggtgacgaaagagagtgcgtttgccattattttcaatacattttaatttatgatttttaattaaaaaagaaataataattacataaacaaatatatttttagcagttttttgggcaatgctttggcatttttgttcacgccaaaatgggacgagccgttcggattgtccatgattgaggccatggccaccggaacgccggcgattgcaaatcggcgcggtgccgtgccggaagtcggtttttatattattcataaaataatttattctttgaaattaccgtaagattaagcaaaacccaagagatatactaatatttaaaaagttccattactaggtaattaataatgccactgtaattactggtatttagcgaccgttaaatttatcacaatcacagattgtgcaaattggccgcaacggttatacttttgactacaaagatcggcttggtgttgaacaggtggccaagtttgtgcatttgatcaaccaagcggccaaattgtaccgtgccacggtccgacaaactgtcgaagaaaaatggtcattggacaaaatggccgaaaattatgaaaaagtctatcgccgcatgttgaacaaaaatttcatagcaaactgtcatgatcattagtagtttagtaaatattatatgaattatatatattacaggatgatgaacacaattaattgacttggaatttatgaaattaattttagacagttgaaaatttcgaatattttttcaggctaatgctaaattttttgctattttctatttaaattaaatttattattaaacttattatgtaaacggtcatcatccctgttgcatataattagcataatatgtctagtgaacattcgtatatgcctaaactttgaatttgtgtatatcagatatgcaattatttaattagttaattctgtctatattgttttttgttataactaaccacctgtattgttttattttgtataaattgagattaaataaa

SEQ ID NO: 82217 - DNA, 865 bp, Heterodera glycines
atgcgtgagaacagagcacttcccggcatatggaatcacccgtacatttggatgtttgaacaaattcgacaacgtgccaatgaattcgacattgtaaacaatataaataaattcggtcaattagtgcctaattagttggaacaaatattgataggctaattaatcagaagtgctaattaatgctcgcgtcttaataatagtcctagaaatatcactaatccgttgatccaattcttatttacattcctgaaatcatcaaattaatcggtcgtgatcttttcaaccgaaaaaatcactaaattttagatccatttcaacaccattgaacaccttgaacacatgaagccgtacattcacaaagcattgacaacactgcatgcacagcccggtggcagtacggtagacaacgagttactgtcccaattaacggcacatcagcaactgtttgatggtgccaatgttgcagtcagcagtgatcaagcggctaagagtttgaaagcgaaaaaagcgcttcgattttgtcaattgcacattgtcaaatcgtacaacggcacatcaactcaatggcaacaaattgctaatgaatatgtgaaaatttaccgcacaattagccgacttaatgagttgaaaaatgtcaaagcatcacttttgcctgctgttggttcgtcatcaattgctaatgggtcattagcagaagcaaaaaatcaagaacagaaaattaaagttagtgagttaatgagttgtaaaaccaaaatcacaaaagtaaaaatttaaaataaaaaatttaactcaaattctcaaacattcaacaaagttgaaaattaaaaattacaaattatcagccaacgtcccaggagaaaagtga

SEQ ID NO: 82218 - DNA, 620 bp, Heterodera glycines
atgaatcatagaaaatataattccttatacaatattgactgcaaaaaagacgtgtaagtgaaattttcgtatgggtatgatttttttttttgatcggagatagaatactgtaagcatacctttttttttgcattttccgcccatagatgaaaaaagatatttgtgcaaaaaatttttaaacaaaaattgctaatttttatataattcttttttcaatttatatcaatcagcatcaaagatagcctcgagcaagcactaattaagtatcagctttctgtcattaatttaattttttggaaatattgaaaattttaaaatggattcatatcataacattttttgacagttcagctgcaaatgtcggtccgcatatgtcggtcgcactacggataaaaggcaagctgccgtttattaaaattgttcaaaataggaaggataaacaaaataaccaacagaaaatagaaacaattcataaattcgatgcaattaaagaaaaattgaaacagaaaggaaaatatcaatgggaaaatagttcaaaaattgagacaaaaattggaaaattattaggcgcaaattgccaaaaatatacaaatggaaaaaagaattgatgccaaattata

SEQ ID NO: 82219 - DNA, 2825 bp, Heterodera glycines
atggaagtgtacaaatcgcttggcgtcgatttggtggtgttgcacattgtgtccgcacttagtgcagtgttcaaactgatcaaagcgtacgaggcggaagggcgacttgcagtgagaatggtacgagcaattttgggggcagaaatgaaatttctgaaatttaattttttcgactgaattaacaaaaatcgatttcaaaaaacgagagatgaaccaaaaagggatagtgccagagaaaaatacgtatctcattggcgtattttttcggctttgtctcagttaatagaaaaaaatagaaatttcctttttcgaattaacgttttttctcctagattttaaatccaatacacaattttgcaacagtggtagagaaaaatgttttaaaagcttctccttttcaaggctttcgaatgattccaattttaaattgttttcaaaaaatctgaaagattttgttttaacacttttctacttggaggctccacgatgcttttctcaggcctccaaaaatttttatagcaccattcggtttaaactgatcaaaattgaaaaaattttaggaattataaaatgaaatacaagaatttattaagtaaacaataaatatgcaaacaaaagaacttaatgttcacagatatagcaagatccaaagaaatttgattccagaggttaaactagggttagacggggttcgggaacccgaccggggtccagacccggacaccagcaggctttttcagggcttttttataatttgtcaacaaatcttaaatgcatttgcaaaaaaattcttaattttttatattccgcacaaaaatcaataaaaatttgtttttaatcaattatttacctttccggtttgtagggattcaaattaccaattttgaaagcgatgaattttgatcccgaattgcaaattgaatattcggggcaattagccatggcccacgaatgcttttacgagtttcgagaaagtgccaaattcatttcattgttggacttggacgatttgcttgtcacgacacaatttacttcgtttggcgacgcattaaatgccgcccttctccaacacccgagggcaccattcttttacataaataaactcgaaagtggcattttattaccacggcacaaaaaagaatcttcaagaagtttgttttctttataaaatcaaatattgtagaaaaatggaaaaataacaaaaaccatcatactgtataccgtatttccctaaaatagagccctgagggctttatttttcattttaggggagggggctcgaatttacgaaacacggcatttataagagattcctgtaaaaggggcaatccgcattttgatgataattttgttataaacatttgtaaaaattcaataccattctgtggaataatttttggttatactttaatattaccatattttcaagttttcacattctccgtttaattctcataataccgctttaattttgacgattttatgccaataaaatttaaactttcgaaatttattgaattaaaatttctaatttattattaaatgagtttcatatttcagattttgtgaacaactttcgtgaattaattttcaccaaaaaattgtacaacagtgaaaagcttgtgctcagaccgccactaattgatgccttttgggtgcatttaacgcgtcattataaagggaaagacaaaccggtgcaattgtccactgagtatatggcaattttgcacctttcaaaggatgtaattaaaaaaaataatttaattgttttgaaattattttaaaaatgatggacttttttgtgacagatccgagcaaacgcaacaaacggttacaatgacaaattgctaacaaattttgatggacaattgggaaacggaagtgcttttctgaacgacacgaagataatgaaggtacagaaacattgagaagcacaaaattaacaaaatgaaaaacacgaaattaatttaatatttcgttaaataaaatgaaaaaatgccctttagataattggccatatgccgaaaaggcattattattttgacgccattcggcattgttcccgcttcatcaacaattacccaaatggcatcttcactatcccttcaccgtgcctctcgtacaaactttgcgatttaccgaaggcaaaagtggaatgtaccgtaaccaaaagcaaatattacagaagcaccattatgccaatccaagtatacagggtaattagtggaaataattaatttattattgcgcactttttaaacattcaggttcacgttttaaagagaaccctttttgtgaagagaaaaggcggatgctttgccagaaaattgagattttgacttttatttattgagaactatattttttacaaaattggaaatcttatgcagaattttaattgaatttgaaaaaaataatgtcgaattttcgtggaaaaattattgtcaattttttttttttgttcatttggcattaaattaaggcaaaaacgaaaaagctaaaggaatgttttgacaaaatgccaaaaatatgtcgatcaatttagaagtcatttgtgctgtagtgacgctagagactagagtagagcggtaccggtactggtactgaaaaaaacggtacaactgagtacctagtaccggttttgaccggtaccggtactagtgcctgtttttttaccggttttcccagccaaaaagtaccagtttttcaacccgaaaattaccggtaccggtttttttttacaattaccgattaccgctctaccctaatcttaaccgatagattaggtaattcctgaaaaagccagtaaattgtaattaaataaa

SEQ ID NO: 82220 - DNA, 1000 bp, Heterodera glycines
atgcttctccgtttctccctcactgttcaacttttgctgcttttcttcgcttttggtgcgtttcttcccccccccccccaaatccgtcatttttaaacaaaatttccaattttgagaagtttttggcgctgacccgccagaaggtacacaaaatgaagaagcccaacgagacaacaaaagattggaaatggccaggaaagggctgaacgttcacatggtaagtcatcagagaggggggagggcagtgagcccggggattaatttcaatgagcggtcggtaaaattatgattccatttttgctcattagcttttgactggttcgttttcagcttttttttggttcgaaatctgaaaatcaaatgtaaaatctatttaaaaaattggcttattcgacgtgaatcaaattttatattttttgttattgaaaatacttctaacaaatttataaattatgatttttaaaattcgggtattcgaagtttttgattttggaaattgaccaaagaattgtcaaaaacgtttcctaacagtgattgtccctcttttctccacagttttcctcccccaatttcgccccaatgtttggcattatcgccggcctttccgttgttcttatcattgccattgttttcattgtcgtcggattgctcagcatggaacccgcgaaggattcggtcggttggggcggccctaacataaaatttgacattttatgtgcaagacaacaattcctttgcttttttttcataaataattgttttctgttttatattatctatcggatgacaacaactcgcctaaagaaggactgattgtgagcaaagtgtgggagagagtgccgtgccgaaaagtccgtcccccattaaatgatttgtttcatttgatagtgaatggtcacccaccctttgtcggtgttgcaatccgcaacgaatcatcaaaacatttaattttatagaatgtctatttcttcccattcattgtaatcatgtagagaataaa

SEQ ID NO: 82221 - DNA, 89 bp, Heterodera glycines
agtgtacgcgtacacaaattcgaccctccaattggccattctgtccacattcaccgaacttctttaccgtttccaagacattgccattg

SEQ ID NO: 82222 - DNA, 1297 bp, Heterodera glycines
ctctccgggccaattccgtttgagttgaatgtgtttactatataaggtgcgaattgtaggttgttgtggtgatcattcgcattttctctcccaatttgccccccccccccctaagaattgtttgagtcgcgtccgtgcgtcgtcgccattttccgtcttttgcccgcctttgcccaacaatctgtgcttcagctgatgttccacaaatccaggcaaccacgtgctttgctttaaaatttatctccataattgtcgtcattttgtttaaaattgtccttttttgaatgttcctttagcgattggcgttcgtggactcggagtcgcttccatttggccatgtccagcgccgttcagctccttttccgactgcgcattttggaaggcaattcgaacggcgactttcaaattaatgtgtcatctttccacttgaatttcacttaaatttaaaaattgcctcagcttgatttccgcatgaattacgtctccagccttttggccaaccctttggaattgtccaacctcaaaatgcaccatttggacgaggaaaaagcgcgcaaagcgaccaaagacttaatgggcaaaagtgtggagcgatgggagagcattctgtgctatttggcactgccgagcgaagcggcggagaaaagcgtttcggagacgacgaaggaccttttccaattcatcggattggtgcgcggaagtgcgccgattcctccaaaaagcctttcaaaacattgtccgcttttgaggagccaaagagcccgaaatctcttcgattggcttccaatttttgcttttgggccgctccgaacaaatttgggcctatctgatccattacatgcgcttcatcgcttcaaagggcgaagaagtgtttcccgttttggactttctgctacggctcacgctttgcatcaatggcgacgatggtatttaattagaactgatccaattggccattttatttttaatattaaaaatagcgcttgcccaaccgctgaggctcgacccgaattggcccgaaattgtgcaggcattcgttgtgactctgcgcgaattgggactgattttcatacgcaaacggaaggacgggtgaggcaaaaatcagcaaaaggaatggaccgtcgaagaatgactcattgtccgatggtcactttcttcccttttcagttggtttctgctcactcctctgatgactcagctttccgttgccgcctcagctgaagccttagaggaaaatgccggccaaaatggcgtcgctttgcgcaattctccacttacaaattcacacgcaacaaat

SEQ ID NO: 82223 - DNA, 693 bp, Heterodera glycines
atgataccaacaatgtttgatttggttgacaaagaaaaaagttatagtccaaaaactgcgctggcgccgaaacgcgcggcgccgaaacgcgtgtgtcccctcaaaattgactcggtgtgtaaaattacataaacactttttatgactaaattaaaaaaaaatcgaaaatataccatgaaatcctccccctaacaaataggtgttgctatagaagtactgaaaaactttttttactagttatacaatttaccggtcagggacgttttcgtaccgccattttcgtaaaataggcgctttaggcacaaaaaccccgaaataggcaaaaataggcattataaaagtcatcgtagacaccccaaaccaagcggaaaatatgtttttcgggcttatcctatgcctatcaagtgtgcaattgcctaaaaaaggaagccctacaaatcagcattaaattcaaattcaaaaagataaatttttcaagccaaaaatttaaaactacgcgataattggcataatgttattcaattttaaatgaaagcactttcctatacagtataatacagctctccgcaaactcgtttaatctgcttaactgtctgacgatgagctgcattttgtaaagttttacaatttatcatttagaagctatcggtttgtttattcaatgcgattaaaaaataagttccaacaaataaa

SEQ ID NO: 82224 - DNA, 890 bp, Heterodera glycines
atggatcctaaatcgaaaaaagaggagaaagccggttcagtggcgggtgctcgagaggatgctcgagagtcgcttcaactgcgcgcggagcagcacattgaactccactcatacagagatgcgacggacgtcaattaccagcgaatggtaatttgatcatttttataaattggtcaaaagtgtacggtatctctgattattttttgtccattttttagtgcctggacagcgaggcatcagccggcgtgccgccgaaggaattgccaaggcggcacggtaagcaaaaaaataaataaataaaatatatttatagtgaacataattattcactagggcttgaacttttatatttaacacacctaatagctcaaaaaagcattttaccttttctttcaatcatgctcagtttttggcacctaaatttttaatgatgctcaaaaaacaaatttttgcatttttgattttttaatgattttttttatttctacggaaaattttgaaaattttgcttttttctttcaggtccctgatcaaggccttggagctgcgcagcgcgtacatgacccgcattggcacacacttcccgacgacgacgcgcaatttcgtggacggtaagaccatcacaaattaattattggcttaaaatattttgggtttttcagcaaaatacccggacgaattgcgcaagcagaagctgaagagcaaaaaacatgtaagcgatagggggggggggtttattttgccatgctttatttatttactccattaagccgacacaatgtacccactcgaaatgtcagcggaacattggggcgagcaagtgccgacttacgagcagcaattccaattgcgccgcgccaacggaattgtaagaaaaagatttggaaaaa

SEQ ID NO: 82225 - DNA, 1816 bp, Heterodera glycines
atgatgtgtcggctgggagacgctgtgggctattcggtccgatttgacgagtgcatttcggcacgcactcacattaaggtgtgtttggcatgccatggcaatttttgaacgggtccgattgtttgttcccaatctgtccatgccatttcttgcctcttcttcagtttgtcacagatggaattctgttacgtgagctgatgagcgacccgttgctgcaggcgtactccgtggtcatcgtcgacgaggcgcacgaacggtcagtgaacacagacctgatcatcggcttcctgcgcaaaatcgtcgccattcgcgacgatctccgcgtgatcatttcctcggccaccatcgaagccgaggtaaaaagcggaaaaagacaaattcggacgaaacaatcagcaatttggctttgaaagaatcaatttctcttcgtcgatgatcactttttttttgcttcagcttttccgcgactttttcgaactcaacgacaacccacagcaaaagccggacaaaaatacggccacaataatttctgtcgaaggtcggatgttcccggtcaccactttctacacaaaagtgtacgttttgctcacaattagttttggaattgatttatgacttactgcacagttgttttaaactttaaaatgactccgttttattttcctcttttgccattgttttttttcttttgcttaactctctccacgactttttcagtggtgttcccgactatgtgcagacgacagtcgagactgtgctgcgtttgcatgacgaggagcccccaggcgacattttggcttttcttacgggccaagacgaagtggagaaggcgtgcgatttgttgcgccacgcggccaaaacgatgagcaaagacaaggacaaattgttggtggtgccgctttacggaggtgcgaaagtgtccgaccgatcagaggggcaatcagtgaaatgaaaaaaacaaacgatcaataattgactgatcagagagaaaccaaaagctgatcagtataagaatagatgaattgaattgagttgtgagttttggatgtccgtccgactgatcggtgggatgggcagtcaaattggcactgattgactgaacttggcctcttcccctcctcctttccgcctttgttaggtttgcctgcccgtgaacagttccgcgcgttcgattccgccccctatcagagcagaaaggcgataatcacgacaaacattgcggaaacgtcggtgacaatcgcaggcgtttgctacggtatttttgtggggaatctgtacggtttttgcggacaaaacattgtgaaatagatttttgccactatttaagtcattccgatttttatggcacagtgatcgactgcggtttcgtcaaaatgcgcgtgttcagccccaaactcggcatggaaacactgatgatcgtcccctgctcaaagtcttccggtcagtcaaatcgtcttttatttgaattttccattttcgatcatttttctaaccgtttttgccattcactcccatcccttgccaacacccgacattcttttagctgaacagcgtgccggtcgtgctggacgcgtacggcccggcaaatgttaccgcctttacgctgaaagcgaatttcgacgcttgcgcagcgcgacaccgcccgaaattcagcgctgcgatctctcctcggtggtgcttcggatgaaggcgcttggagttcagaatgtgctcaggtgggcggacgaaagtacaaatttaaatgcaaaatcgagaaattaaagaaattacgctcggatattcattcattcactagacgaagcgggactgtaataaa

SEQ ID NO: 82226 - DNA, 2414 bp, Heterodera glycines
cctttcctctacacggcgcgcgattgctgaccaacagcaggtgttggacattctggacgtttgtgaaatcgaggcaatgccgaccaaggttttcccggatgggccaaagaaaggaaggaagacccagacttctcaaagtggaaatgccaacccgaaagatgacacaatcatttctccgcaataaaaaccgacttaaaaactccaaatttcaagctgtctctgtccgtccgtctctctctcctgaacaactcaaggagcggcataatttgatcaattgtttgcagacagcccgcgcccaatttcctaatcacaatttcattgtttatgctggacacatcattccccgaaacgatgtctctgtttttcgtgatgaccctggtaattattcttgtttttgccataaatccaattcataaaatcttgcgggaaccacccatactgaaatttcaaaaaattttacaaacgtaaattccggtaccgcaagatttttcaaaagtcctcataaggttaataaatgtatacaaggtgctttagttaatataaggtctatctataacaaatgtgaacaaatagaaacaatttttgaatccttaaatttagactttatctgttttactgaaacctggggtaagaatgaaaaccaatttccttttcattcaaattttcttcaaaatcataccatttcttacactaatagattgaataagcgtggaggcggcatagcttttgtcgctaaaaaatatttgggtgtgaaatactaatattgcaatttcaaaattacaattcactaaatttgattcttatttatcgacctccttctactatttaaaaaataccaaaaatctttttaaattccttgacctttacatttcagaaaactgttgtatacttggggattttaaccttggaactaaagatttaactataaaaaataaaaaacctttccctttaagtaattttggtaatttattttgtgatttctttaataaatataatttgacatcctgcattaatgaacccactagggagcaatccttcctagatttaatcctttcaacaaaaactgacttaataaatgcggtagaagtaaaaggtggacttttagatacagatcatctaacaattctttttgatttttgtgttttaaagcaaaatgcaaccaagaaacaaattgttcttaggaaacacactaaataatattcctgaaacttttttatctattaagtccgccaaaaacttttacccaccgcatttattggcttcaattagggaaaaagcacggctatataagctaatgaaagaaaatagaggaaaatatgaacctttatataaaagtatctccttacatattaagactcaaataagaaatattcaatcccgtaaagaaaataaaatactatccggtgataagaatagattattttcgtatcttagaaaatactttaagccagtagaggatccaccagttattcagtataatactttgtttgtttcagactcaacttctaaagcggaaatttttgcaaaaattttttccgaaaactttactgtaaataattattctcttgattttgatacttctttttcttctccaacaataaacgacgttgaatttaatattatttctgttggtaaagttcttaaaactttacctaacagaaataacacatcaccggacggtattacctttagactgttaaaaaattgttctctttcgtttactccttttgttactgaaattttcagactctcccttgatacagggaagcttcccactatatggaaacaatcgattattatccccttgcataaacaaggggaaaaaagtaaccccatgaactataggccaattgccttaacttgttctttatgcaaaattatggaaaaatttattgtttgggctatttccgattttcttttaaagaacaatttattctccgaacatcaatttggatttataaagggcagatcaaccacaacacaactaatttcaacccttgaaaattggtatgatggtatttataataataaaaatatcgattgtgtctatatagattttaggaaagcatttgacgtaatcccccataatttacttttatataaggttcataaaattggtattaggggtaaaatcctaaattggatatctgactttctttcgaaccgtacctttagggttcgggttgataatactctctcttctgagtataaaatgagctctggcgttccccggggttctgttcttgggcctcttttgtttctgatatatattaatgatttacctgaattaattcctaaacaaatttctataaaattatatgcggatgatgtcaaattatattccgtgcgtaaaacaaaaaatgatagaattgctatgcaccgtgctttaaatattcttcttctgattggtctaa

SEQ ID NO: 82227 - DNA, 365 bp, Heterodera glycines
atggcgagacgcttcaataagcgatttggaaccaaattaagggaatttccgatcggaaacaaagtgtttgcccgccaccgaatttcccaaaattggcaacagggccaagtttcaaagcgaactggtgtgatttacgacgtggcattcgccgatagaagatcagggcgctaccacgccaaccagcttcgtccccgaaagacgtccgactccgatgatcagctctcggtgatgttcgaaaccttcgacatcccaagaccgattgctgttgaggatcagagggaaatcccagtggaaatgccattggagtacccgcatggcgaacaggaaaattttggaggtcaaattgaccatggacagcaacgacg

SEQ ID NO: 82228 - DNA, 2533 bp, Heterodera glycines
ttcaaaaccgacgtggcggtagatggcaaagacatcaaattcgtactcgacagcggggctgaaataattgtgatcgatgaactatcacatgaagtcatcggcagcccccgactccgcaaatgcaccgaaagtggatgcatgttcgatggaacacaagtcaaattcatcggaaagggagtcgccaatttcaaattccgcgatatttgcatcaaaagcgaatattatgtggcaaaaaggggatcgctaaatttgctaagtgtgcaaatgatggacgcttttggactcctgaacgaactcaaggccaaaattaatgcgccagtaaatctgtgccgagttggagacgagacaagaggttttacaaaagctcaaaaaccgtcacaaaatttgacagtcaaagcgcacatcgaccatctcaaagcgtcattccccgaaattttcaaaaacgaattgggccgttgtatgaaatttaaggcgcatctgactttgaaagcggacgccgcaccggtctacagaaaggttcgcccagtcccatacaacgctcaagaagcgattgatggagaattggagcgatgggagaaaatgggtgtgattgggaaagttgaatacaccgaatgggcagctccgattttggcggtgaaaaaggccgacggaagcgcacgcctatgcatagactattcaaccggtctgaacaatgcccttcaagaccaccaacacccacttccgctacttgaggatattttcgcaaccttaaatggaggaaaatatttttcgcaaatcgacctcagggatgcatatctccaaatcgaattggataatgaatcgaggaaaatctgctcgatttcaacacaccgtggcaattatgaagttaagagacttcattttggcgtaaaatgagcgccagccatcttccaatcggtaatggaccaaattttggcagaatttgaattcgccacagcttacttggatgatgtgatcatcgtaagcaaaagcgccaaagagcacgctgatcacttgaagaaagttttggaaaaattccaagaatggggattccggatcaaattggaaaagtgttcgtttttccgagaagagatcaaatatctcggacaaatcatcgacagaaacggacggagaccggacccggagaaaatctcagcaattagcgaaatgcccgcacccacagatgtgccatcgctgcgttcctacctcggaatggtgaaccactaccagcaattcgtcaaaaacatgcgttttgtacgaaaaccgctagacgatctgctgaagcaggacagcgaatggaagtggagtgagaaatgcaaacaggcattcgacaaaattaaggaaattttgtcatccgatcttctgctgacgcattacgatccaacaaaagaaatcgtggttgcagcagatgcatccgaactcgggattggagcggtaatctcccacaaatttcccgacggaacaataaaggcaattgcacatgcttcatcagctctaacaccggctgagaaaaactattctcaaatcgagaaagaaggattggcactgattttcgccgtgcaaaaattccataaaatgatctatggacgaaaattcacgttgctaaccgaccataagccacttcttgccattttcggaagcaaaaagggagtgcgccagtgcagtgccaaccgacttctccgctggtcgctgatcctcctcgcatacgatttcagcattgagtacatcagcaccaatgattttggtcaagccgatgtgctttcaaggctgatcgcaaagggaaaaagcgacgaagatcgagtgattgcatctctccgatcagattcggaaattgacgacattttgatcggatcaattgaagcactgccaattaaatttaaggaaattgtcgcagctgctgaagccgacaaaaccattcaaaaagtcaagaaattttgacgaatggttggccaaggaacgtcggagacgaaagtgccgaaataaagctttttcatcggatcaaagaacagctttgcatcacgagaaattgcctgatgtacgccaaccgagttgtcatccccgaaaaacttcggcagaaaactcttcattcattccacaagggacacccgggaatcaaaagaatgaagcagttggcgagaaattatgcctattggccaaatatggacgccgacatccaacagatggtagaaaactgccaaccgtgtcaaatggaagcaaaggcaccagttaaaacaaacttcaaccgtggccaagaccatctgctccatggcaaagagtccacatcgactatgccggaccatttttcggcaaggaatatttaatcatcgtcgatgccttttcgaaatacccggaggtattcgaaatggccacaaaatcgacagcggcaacaatagaaaagcttcgatatttgttcagccgacacggcatcccggaaattttggtggtccgacatggcacccaatttacgaacaacgaatttgctaaatttatggcccatcacgggtgtcaccacctgttttcagcgccgtataatcca

SEQ ID NO: 82229 - DNA, 1523 bp, Heterodera glycines
tcattttttgctgttttcgatggacacgctggcaacaacgttgcctttcactccgcacagaatctgctccaaacactgctaaacacagcagaatttcaagcagtaataaataaaatgtgtcgaaggaccaattgttttttttgccgtttaggtgaaggaagaacttaagaccaatggccctaaaatcacggaaaaggccaagtcgcttatccaagacggaattcgcatgggcttcttggagttggactcctcacttggcgagttgcagggaggcggagagagggagagaagcggcacaacggcaatatgtgccattctgaccccggattacatcttctttgctaatttgggttcgtttcctttttgagtgtggagattcacaataagatttaaccagagcaaaaaaaagtgtggtagtaacgatggtattcaaccccattttttggaaatactaaagttatttgggtgataatccttggctttactggtcccataataaaatgcaaatgcataataatcatcatcaaaattttcatatatttgaatcgcttttttgcttaaatgtcaattttttgtaaattgagttttcgatttattgtttcaattctggttcggggttcgaaatgagtctaaacgggtttcagaatcggtttagccactcgttttggcgttataattttgggtgaaaaaatgaatctccatttttaaggcgattcgcgtggattgttaagccgaagaagcaacaccatctttagcacggaagaccacaagccttaccttgaaaaggaacgcgaaagaatcattaaggtaattgccagccaattcaaaggaattttccagttttacttggccataggccggcggttcggtgatgattcagcgagtgaatggcagcctcgccgtttcgagggcattgggcgacttcgagtacaaatcagtccctggcctttgtgtcactgaacaacttgtttctcctgagcccgatatttacatcgttccgcgagacaaagtcggcaaaaaaaaggcgaagggagggcaccatttatgttggcttccctttaggaagatgatgagtttttggtcctcgcctgtgatggcatttacgacgttcttgccaacgaagacctttgtgcgcttgtgcgttctcgactttccgttacggatgaccacaaaatggcttctaaccaagtgttggacgtgtgtttgtcgaagggatccagagacaacatgaccatgatcgtcgttatattcgatgctgcgccgaagattgaccattctcttgtagaatttgaacaaaagtggctgatgaaaatcgaaaaacgagtcagaggtgggacgagggcgtttaatttcccgctttaattcaaatttagaaattttcactgagtcagcgcatgaaattaacgacgccgacacactgacgctgctgctcaaagaggaagggttcgacgactgcaactccatccccagcggcattcacttggcacgacctctgctcgaccgacttctcgcggaaagggagc

SEQ ID NO: 82230 - DNA, 904 bp, Heterodera glycines
atgaactgctccttcttcctctgtctcttcactgttcagctgattctgctcaatttcgcagtcgaaggaagagaagacgatgaactgaagagaaaggtgaaaagcgtgggggggcgagagaggagagggatggatgaatcaggggaggattaggggacgaattagggaagcaattagggaagtaattggggaagtagggaaagacaggagaccattacgagagaattgggacgcatgatgggccatggatgccaacctcaaaatgaaaggcccaaaaaactctttggcattttgcagaaacgcaacacggacgtggacgtgctcggcctggtaaatattcacgcgccgtcgcgaaagaatgtgaacgtcgacgttggcggagaagaaagagaccgaaatgacaaattggtcaatgtgaatgtgcaggggcacaggaaaaatgtgaacgtcgacgtgggaggagggcattataatgagggaaaagtcgtaaaatacgaaagggacggagagaggggaagggaagtgaatgtggacgtacgagtgccgaaagtgaaggtggatgtggaccgagaagacggatatccgaagaagaagcgggtccatctgaaggtgctggacaaactgaggaaatacgacagcgaagagagcggcgaacggagacggcaccgcgtggtcaaaatcgaacgggacgggggacgacggcacaaaacggtgtacatcgagagggaaaactgagggagggaggacggcggacggactgatcagcggaaaaaggacggacggaaagagtgatcagcggaaaaaggacggacggaaagagtgatcagcggaaaaagggcaaaacgaaaatgatcgaagccccgggtgatcaaaactgatcagagtgataccggtgcgcaataaa

SEQ ID NO: 82231 - DNA, 234 bp, Heterodera glycines
atgaaagatgaagaggaatatcaaaacaatcgtgttcggcttttcgaaattgatcagacaaggggcattgccgatcgaccacgtcttaaaaaatacatcgaaaatgactcagctattaggcaattggtaattgcttatgacgcgaaagaagaaaaaaatgacgatgatttgatccgacatattcatgcattgcaataccgtgtggggatgaagggattcgaaggatgggattag

SEQ ID NO: 82232 - DNA, 258 bp, Heterodera glycines
atgatcgatcagccgacgacgccgcgggcggagaaaattggcgaaggtcgtcgcgcgacaattacaacacacacagattttgtggagctgagaatgagaatggtaagcatgaatgacgacgacagagcacaaaatataaattaaaattatttaaaaatgggaaaattattacagtcgataaataaaaataataaaaataaataaataaatatttagcaaaaataaaattttatgaaaattggaataagtagtcgataa

SEQ ID NO: 82233 - DNA, 629 bp, Heterodera glycines
tttcaactactcgaccaaatttttgaaattttattggcttccggcattgccggactcagaaattttactaaaccaaatttaccaaaatgtaaaactgatcccctccctgccctccaaaaattattttttgaataatgagctaaaaaatttagtgacaccgaaaggcagaaaaaaaaaattcgttccctcatttaggagaaatgtttatgaaaatcttattttttgagtcaaaataattagattttaagacttttaaaagaaaaataatccatttttgccaatttcggggtttttgttccgcacattttggcattttcttttccatacaaacaaacagttgcccttttaaaagaaaaccgtagaatcaattctaaatttaaaaacctaaatttttttttgcactttttgacattttttggtgaaatttgattcatttttttgtgcgtgcccttcggcgggagaccgaccgcggcaccttttgtgtgccatggtgagaaaaaatagggcgtatggcccggcaccgccgccggcgccgccaaaattggatttgaatttgcttttggcgcctatttgtggcgatgtgtcgtcaatatttgccatcaaattctaccaccatcattcgcacaacc

SEQ ID NO: 82234 - DNA, 381 bp, Heterodera glycines
atgcgtcaatggacaatccgtaagtgaacaatccattagcaaattttattttaaaacccaaaattttatataaaattagaataggaatttaaattgaaaaaaacttaataaataataatttgattttattttataaaaggaatgaataagcatttcaaaaaaacgataattactaattactatagaatgatggattaaattgattaatactggaaatgttgtaaactcatccgatttttcaaaattaaattgaataatctcaatcgaaaaattttagccattaaaatgtaccgaaaagagtgccaacggggacgagaactgcagattattggtcaatcattgattgggtggcaggcattaaatggcactaatttggcttaa

SEQ ID NO: 82235 - DNA, 1495 bp, Heterodera glycines
atggtccatttattggctgttcttttatttactatcatccaatttgaatcaggagattctatcgatcagaaaacatcagacaaaaatggtgtatttcatagaaaaataaataaaattacaaattattataaaatattatttttatttagcatttaatgccgaggaattgtgccgtccgatcgatggcactccctttcacgaacagtgccttctctcgacagtggtcaagcagaagggcttcatcccacggcatctgcgtccgccatggctcggctcgtcgctgtttgaggacaacgaactgagcgaagaaaatgcaaaaaatgacggatgttatgggtgttataaggggacaaaagcgagcaatggcatggcaccgcgggaagagtactgtgcatgtacggtaggtcaagttaaaataattaatgaacaatgtacggactaaataagcataaaagctgtataaattaacatcggaaataagatatggcacgaggcgccaaaatgatcagaaaaatacagtttttcgagcttttttggccataattattttttgtcacagcgaaatttttggaaactttgtaagctaaaggaactattaaaccatttaaaatcataaaagattatttaattgggggacaaataaaaatatgatagaacattttacgtcaaaatggcttgcgtcaaagtgagcgggagaaaatcacaatttttctttttaattatgaacaaaattaatttcaaattttcttaaaaatataaaaaatcaaaaaattttggtgaagataaaatgaggcgataaagaaatacttaaaatgtatttattaaagtcttttaattttatatggcattttttgttaaaacatttttcaaaaaacgcaaaattacgcacaaaaagcagcaaatgtcaaattaagcataaaaagcatattcgaatacatttactaattgtttgattcagtacaaaggaaaaatgccaaatgaaaaatttggcgtcgtttttggcacaatcaatcgaaagcgcctaatttgtctaaaggatttgcaagaaatggcattcgtaaatttaatttgttttttttatttgaaaattaactttttacagaggccaacctgtggaaacaaatattttgacaatttaaaacattgtgccatggtaattgatacaaagcttttattaaattcaaatttatttgttcatttaaaggtccatttctatgacaatgagccagaaaaagagccgaaaaagccaccaaacaaagagcgtaaaaaatttaaaatgaatttttaattttaaaaattaaaaaaacggttaaggaattctcgcacttttggacggttgcattattggagcaaacaaaaattgtcgtactgtaactgtgaaagttgaataccgtgaatggaaaaactttggcaatttaagccacaattgtaaaggcgaagtgaaaaaagtgttcgtagacgggaaatgaaaatggaataattaaagaaaaataaa

SEQ ID NO: 82236 - DNA, 377 bp, Heterodera glycines
atggatttggttgattatgaggctaaattggtggcaacaggacgacgttatgacagccgaccgttaagtcgaaatttggacggtaaatacacacaaatttaattcagttaattgtgattttgttttcaatctattttaattacaaattaaatttaatcaatttaattatatttaatcatttttaggctatttgagcgccggcggggacagtctcggctccagcggtccgcgcgggcggcctcggccacctgcgcaattggcgtacgacagtgacgagcacaaatatgcggcaccatttgaagggtaaaatacttacaaatagatttaattattattttaaatttaaattatttttatttaaaaaaatcaaaaataaa

SEQ ID NO: 82237 - DNA, 1341 bp, Heterodera glycines
  unsure (1)..(1341): unsure at all n locations
atgccggaacaacaacagcagccgagcaccagcaacattattgtgccaagtgattccttacagcagatggacacaagcagttcgttttccgtgacagcatcgccacgaaaaaggacatcattggtgagtagctggtggaggacttttgggactgatccgggaatctgtgacatttggactgatcgatcgattgactgatcgtttaatatattgaattcactgatcagaatatagcgattgctcagccagccaaccgatctgaattatgtgtgtttgaattttggctaatcgatcgacagattgatcgatttttaggtaccggaattcggtttgatcgggcttttttgctcatttggctttctgaactttcgctgtcggattgcgactgatttgattttattggccgcaaaattcgattgattctttggccattagaattattattcatatccgactgatctgaatatgtgcgcttgaattttggctaatcgattgatagaccggttttcagctaccagaattcgattggccggggttttttgttttttttttggctgatttggctttctgcatttccactgaatttcgattgatcaggggtttcatcggccgccattcgatggtctaaatttctgctattaaaattacgattcaattcacgtccgactggtctggattatgtggtctggtcgtatttcgacctttttgatccaagcaaattccccgaaaaatacgaaatttttaaatgatttatttgtttttcaaatttcgattttttaattttgaatttgttaacattcttatcctcccaattagcatgactccactnctnccaaccnaaatnnnttcacnnacanccnnancancaactccacaattntnttccacanncatcatctccantcntcacaattccacaacnactccnantcnnacnnnttcacctcnacnnnaacnnttgnccaaattaaaaaaaataatttttaaaaattttttaaattttttcannccattccnattnnnanncatcaaaanntnncacaacaacanattncacntnccnaaaacancaaaancnacantttnncagantnccaccaaggtttncttnacncactgtttagaaatttttgtataaatttgaaacaaattttaaggtgtacggcagcaacggtggccggatacggtagaatttgaaattttaaaatttaaatgtatttattatttttatttttattaaaggaaagtgaatttgaacgtgaaaaaagtggcggagaaggaagtgcccgattaacacaagaagtcagatatttgttttatgatggcatatttggaaataaa

SEQ ID NO: 82238 - DNA, 176 bp, Heterodera glycines
atgacgaaatttaaaaaattccccccacaaaatctgataaaacagaaaaaacaatttcaaatttgtcatttcctccgcggcaatgaaaaaattgccgccactgacggcacaaaatttgcggtgaaattgaagcggccagcaaataaatatttggtggccccgggtgcagcaggaaa

SEQ ID NO: 82239 - DNA, 155 bp, Heterodera glycines
atgattgcacgtaattgccgaaaaaattcgagaccaatttccgaatgttgaccgactaattgcaaaacgaaagccgtctttgtcaaagcgtcttaccgagtcaaaaaatttggaaatgtatctcatatgcaatttcaaccaataaatttgaagaa

SEQ ID NO: 82240 - DNA, 301 bp, Heterodera glycines
  unsure (1)..(301): unsure at all n locations
atggtatttattttcaatttagacacatttgacattcgaatcgcaattattgggaagttggaccaattaatagacaaggaaaaaaccgaaaacaacaagttgcttaagaagtaaaaaatttcaaaaaaagtttttttttagatctttgatctttgcaactgtccttgacccccgttttaaattgaagttgtttgaacaaatgaaggaacaaattcgggaatggatgagagcggatttacaaaaaatgttttccgggtttttaaacacgacgttggttcgccaatcaagtacatncgagtag

SEQ ID NO: 82241 - DNA, 1037 bp, Heterodera glycines
cagaatgggatccatcagctcacagggcaaaggacatggaaaaaacaataatggaatacatttgtgttgacggtttaccatttcttacagtcgaaaaggcgggattcaaaagacttatgcagaaggcacaatctcaatttcaaattaagtaataaaattatacaaaaaattttagttgaaaaattaaatttaaggagtcgcaggtattattgcagtaatgtgctgcctgaaatttttgatcgaatgttttcgagaataaaaaatgatttaaaagcagtcgaatttatttcgctgacgaccgatttatggagttcaaaagaaaattcgcattcattattgggtattttttattttaaaacatttcgcaattattttcttcagcactaaccgctcatttcattactgttgaaaaacaacccgcttttgtcgttttgggagccatcccaatcaaggaaaagcataaaactggcacagttatttcagaatatgtgcaaaaaaggcttgaacaattttaaataccgcaagcaaaaatacatttggttcttcgggatgctggctcaaatatgatttttgcatgtgatcattttggagtttccagttattcgtgttttcttcacaaaataaatttagcggtgaaggtgccttttctttttttcgatcattaactgtaatattaaggccgggctaaatgctattggattcgatgaatcagtaacactcgaaaaagttaagacaattgttcgaaaaattaggaaatcgtcggtccaaagaactttgtttgtggaacttcaggagaaacttgacatgccggtcttaatcctacaaagggtctgcatcaatgtttaaagcgtaatttttcagtattttaggacacagaagtacgatggaattcgatgtttcaaatgcttaatcgtttcttacaatgcaaagctgccgttcaagtatttatgacatcggatgaagcaaagagaaacaacaaaggaaaaggcattccaatcattagcaatatcgaatgggaccaaattgagcaaatataa

SEQ ID NO: 82242 - DNA, 1057 bp, Heterodera glycines
gccttcgtctcgtccactcccatccctcttctctctaccgcaattttcttcttcgggtcactcccaacgcccaacgcgtcgattcctccaatttgaatcctcaagagttttggaacttcggcttttccctcgtcgcgcttaattaccaaacgccaggtctgatgatggatcttcaggaggtgcgccgagtcgaattaatggcattcaaaaaatgccaaaaaatgaaaattaagggcaaatttcttgcaaacggaggctgtggttatgtgctgaagccggccattatgtgtagtgatcagaacgaattgatcagtgacaaaacgaacggcgatgaaaatgcggaagaacagacggcggaggggcggcggagagtgccggcgcagccacaaattctgcacctgaaagtgttgtcggcgcagcaattgccgcgaccgagggcatccaccgccaaaggggacacggggctggtcagttgcagaagcgaagcattcctttggttcatctccacctttcccccttaggaccctttcgtcgttttggaagtgttcggtgtgccggccgattgtgcggaagagcgaagcaaaaccgtacgcaacgacagcttcaacccgagctttgacgagagcttccaattcgccatttctgtgcccgaacttgcgcttgtccgctttttggttttggacgacgattttattggcgacgatgtgagtaattggagaggggcagaggcaatcagaagcaacaaaacgcattaattaatgtgtaattaattgactgcagttcatcggccaatacacaattccgttcgactgtctgcagagcgggtatcggcacattccgttgctgaacaacgagggcgacccgctggagggcagcacccttttcgtgcacattgccatcaccaacagaaggggcggcggagtgcgtaaaaaaactcgaaattggacggcggaatttgagaatgaatgtgccatcccattcagaagccgaagaagcggggcctttcggtgaagcgcaaaatgagccgagttcagacgggcatgaaaagtgtggcatc

SEQ ID NO: 82243 - DNA, 93 bp, Heterodera glycines
atggaatgggaagaccgtgtggaaaatgtaaaaatggaaataaatggattaacggtgaaaataaatgaggaaaaggaaaaaggaaaactctta

SEQ ID NO: 82244 - DNA, 1315 bp, Heterodera glycines
atgtcatcgccaatccaacagaaattaggagccgctctaaaaatcatcaatcgcatcagaaccgcagctgaactcacgattttggccgatgctacagcaagcaacctcgaaaacgcactgaacttcgaagcgcaattggagaaagtgcaaaaagaagccaaatcattggaaatctttatcgacgacgtccgagaatcgctctcagcatggacggaccttttacgcaaactctcagcagtcgaacgcgaagctggagaaaccgagttcagcaactacagcaaaaaagagaaaatcaacgagaaagtggatgacgcagcactcaaattgcgcgatttacgggacctcatcggcacactcacaatcaaagcaaggctcttccgcaacaaatttgaattggaagaaagaacagcacaagcaaaccacgccaaagcaatgcaacaaaccgcaaccatgccacaacaaacgcaaccgtcaaccatgccgttttatcaatttcaaccaattcaattggacaagttttctggcaataaacgacaatggccggaattctatgaatcgttcaaatctgcaactggcactcacgcactcagcaaagcagaaaagtttaacatcttgcgcaacttacttaccggagaagcaaaacaacttgtggctggctttcgtcttgaagaccaaaactacgatgtggcattgcaacttctcaaggacacctacggagctcccgaggaacacattcgagcacttcactttgaactggccaacttgaacacatgcaaaaatctgcgcgacactaaagaatttctgctgcatctcgaacgacttacgcgggaactcgacaacgcaggcgaggacatcgaaggcccgccaacttatcttatgttggaaaagaaacttacgccgcctttcctccgaacaattctcaacaaaaaaggagaggatcccgagcattggaacacaacaaaattccgcggcgtgctcagcgaagcagtcaggaaagaatcacaaattcaagaggttatgagcgaatacgggcatcatcagcaacggccaacaaaaccattcaacaccggaccgagattccgggatcgcgcacccttcaatcagacgagggaaaggtcattcattgccgcaacaatcgacgacaaaaacaaacgttttgggaaacaaccgatgccactaaaacccgcaacaagtggtcaacgaacaacaacgcaaccgcagtcacaattcaaacccaagttcaatcaaatggatcgcacagcacaagcgcgtcctcagcagaaggacagcaaacaacaatcgccaccaagtccat

SEQ ID NO: 82245 - DNA, 103 bp, Heterodera glycines
atgacaaaagcaattgagttggaaatgacaatgggtaatgatgctgacgaagcattttatggctcccggaaaattttgtcagtgacagatatgtcagtgatca

SEQ ID NO: 82246 - DNA, 289 bp, Heterodera glycines
atgaattcaaaaactgctgaaaacccaaaggtttcttttgatttttacacgaattttactaagaccatttagacttcgtcgctggtaatgcgtttacatccgtgtgcaaaatccggcggctacaaaattgttcaatcggtaattttatttacagttaattgcttaaaaacattttaggtaaatgggtggccgaatggcaagagcaagataataaataggcggaaaaagagtgcaattggaaccgaaaacatcgagccaaatggaggcgcaaatcggtaaaataaaatga

SEQ ID NO: 82247 - DNA, 579 bp, Heterodera glycines
atggcaatggaaaggcaaaaccaaagtttccccgaaagtattattgccgaagagacggaaatggacgaagtgccggcaaaccaaacgaatcaagggacaaaaaagcgcaaattgaatgagtgtcagccaacgacaagcggggcacaaaataatctatcgatggaatcaggaattgagggcttggtacaggcaaatccgttgttagtttcgcaactcgccacagttgctgggcaactgcttggaacagcattgaaggaagagcagcgtggcacgggcccaatgtttgccatgcaaggacgaggtggctactatgggcgcagaggaacccgacccaacttcgggtttgcgtcggcaaaatggcaagaaggacgacaacaatgccatgcagcatcaattccatcaacctcagcatctgcctccgcatcatcatccgccgccaatgcttcagacaccgttcaccaacttgcgacacaactgcgaaattctaaccctgaattggcaatgcttctctttggcatcgcgtccggattggcagaaatcgcctactattgcaaaactggaaattggtgcaaacgatga

SEQ ID NO: 82248 - DNA, 247 bp, Heterodera glycines
atggccgaacgagaaattgaattggttgttttcgccgcagaattgttcaattcgaagcccgacaacgtgccaagaatgatgagagacaactttcgttgtctcaaaagaatcagggacgaagtggcacgaatttccgaacgaggagggcgaatgtggagcaaactgtgtgcgaaaaatatgggcaatttgattaaaaatcgttgggaatgggaaattgtgatggaaacgcctatgggaatggctttcg

SEQ ID NO: 82249 - DNA, 363 bp, Heterodera glycines
atgcgttgttttgcatgtactgcatttgtgagcgtgaacaaggaagtgaaaaatgaaggcattggatggatcaaaaatcaattaaggagttactgccggcttgacccattttttagtgcagattgctaccatttgcttgtggacacagtgctatataatattgtaagaaaagcatttatttatttatgattttgctacaagttggagaagctttctttgaatgagctgaaaccgacggcgatctgtaagcaatatggtttgtgtagtgaagatcaaggaaattcaacggtcaaattgttgcatgcaagtctgggaccattggaggcaccacgttccaagactcaccattctgtaaccaaatga

SEQ ID NO: 82250 - DNA, 1368 bp, Heterodera glycines
atgccattaaaatacgagcaaagcaacgcattgtcagcaaaaattgccaaagaaattggcgagttatctgaacagagaaaacatttcggaggaggagaagttggagagaaaaacattgatgagaagctgaagaagaagctcagatcactttcaagtgggcgacattttttaattaaaggaaaataagaaaattttattaaattaatattcttactaaatggtatataacagctatgcatttttcgacttacagttcgggtggtttccttgtataagacccaacctcctgagattttcatattcgctgttgacaataagctatatagagtttaatttttttctttttttaggtttcgaattcagctcaataattttaaagcgaattttggccactgaaaatacagaaaatggaaacggaaacattttacaaatctatcgcacttttttactgatgatcaaattttgggcaagaggtaataatttaattttcacagaaagtaataataaattaacaattcttttgccattggcactttcagagcatcacatttatgacaacaaattgggcttcttcaatggcattagtctctcccttttggtggctaaagtgatgcttctttacccaatggcatcacttccttttttcattgaaaagttcttcttcaccttctccacatggtcattttgttttaataatttatttttttaaaaatttttaataaaattaattgccaattattttttgaaattttaaatgtataaattattctatgcatttttttaggccttggccaaccccggtaaagctgacagatttgccaagcttgtccattcttcgctggaacgcatccgatgagagtgacaaacggggggtaatttactcgagacggggcctaatgcccggactgacaatgccaattgtcacgccgggacatattgaacaaaatgccactttcaatgtgaaccgatccaccgcaacaatcattcgcgggaattgcaaaacggtgaatggaaagtcgggacggaattagccgcgggagagaaatttgttatcggaaatccgggatatatgtaaaagccgagaccgggagcagcagtcaaacccatatccctcacaaatcagttttgtataaacaatgaaaaacaattatttatttttagctattaaaatcattcgaaattggccgatggatttgcaaaattttgccaaattcttctttattcggtacgccttctcaatggtcgcgtcaaattgatgaaaaagcattgagtttaatctctgaatccactcatctcccactgttgcgattttatcgtccaattcaagcccaattagccaaattttttgataatgttcactttaattaa

SEQ ID NO: 82251 - DNA, 212 bp, Heterodera glycines
attctctcccaaaatttgtcccttttcaacgatttgcttcgcatggcccaatcgaatgcgatcaaatcgttcgacatcgatcagcaattggagacgaattcgcgtctccacgtagcctcaaaagtcgtaaaagtcggccaaagcgaaggctttgcaattaatgcgaatgaaatgggaaaactgcgaaaaatatttgaaattttaatttgtag

SEQ ID NO: 82252 - DNA, 1457 bp, Heterodera glycines
atgccattaaaatacgagcaaagcaacgcattgtcagcaaaaattgccaaagaaattggcgagttatctgaacagagaaaacatttcggaggaggagaagttggagagaaaaacattgatgagaagctgaagaagaagctcagatcactttcaagtgggcgacattttttaattaaaggaaaataagaaaattttattaaattaatattcttactaaatggtatataacagctatgcacttttcgacttacagttcgggtggtttccttgtataagacccaacctcctgagattttcatattcgctgttgacaataagctatatagagtttaatttttttctttttttaggtttcgaagtcagctcaataattttaaagcgaattttggccactgaaaatacagaaaatggaaacggaaacattttacaaatctatcgcacttttttactgatgatcaaattttgggcaagaggtaataatttaattttcacagaaagtaataataaattaacaattcttttgccattggcactttcagagcatcacatttatgacaacaaattgggcttcttcaatggcattagtctctcccttttggtggctaaagtgatgcttctttacccaatggcatcacttccttttttcattgaaaagttcttcttcaccttctccacatggtcattttgttttaataatttattttttaaaaattttaataaaattaattgccaattattttttgaattttaaatgtataaattattctatgcatttttttaggccttggccaaccccggtaaagctgacagatttgccaagcttgtccattcttcgctggaacgcatccgatgagagtgacaaacggggggtactaggtcgttgcataaaaaagggcgcttttttataatggcttataaaaaattttgttgttaacataataaaatgttttatataccgttttgttaagctaattgttgtctacaaaatagtatattgattttgttcatatctcaatttgcaaattttttatagctaaaaaaatgaacgctaataaggagcacgcacataagctattacaccagcaatttaaaaaaggcgaaaaagcggcgcctgcggcgcgaaaagtgaatgaatttctcggcgcggatattcggcgggaattgcaaaacggtgaatggaaagtcgggacggaattagccgcgggagagaaatttgttatcggaaatccgggatatatgtaaaagccgagaccgggagcagcagtcaaacccatatccctcacaaatcagttttgtataaacaataaaaaacaattatttatttttagctattaaaatcattcgaaattggccgatggatttgcaaaatttgcaagaagaaaaatgggaaaatctgttaaaagataaaaagttcgaagaaaaagtaatttaaaaaaataatatttctacaaattaaa

SEQ ID NO: 82253 - DNA, 1265 bp, Heterodera glycines
atggcattggcacttttatcggagagagagaaaataggcaaaatggtgaaaaatttgcaatttaggaggaccagtttgagacaattagagcttttgtgcgacaaagcatggcttattaaattgaatgacgaagagcgagaaaaactgctgatgacggcattttttagaaacgaatttgaattggagaaatttaatgagtttttcggccactttttgctaatgaccaaacaaattgagcagggtaaatgccaaaataaaaatgaattgaacttcctatttagatcaaaaattgtacaacgaaatgtcaaagtttacaaaaacagaagaccaaattttaggaaattttggaatatctttgcatttgcaagaaattaaattatttactgggcgaacaaatttggttgaaaatgatagcgcaacaataaaaatggttgatgataaatagttttttgtttctaaatttaattaaatttaaatttagttgacagaatttttgtcaaaaaatggttttggaatggttgaaaatgaaagaaaattgaaaattgacctggcaattgaaagaattgaacgagtggtgaaagaatgggtaaattaattaaaaaataataatttatcaaatatggcaaaactattaaaaataataatttatcaaatatagcaaaactattaaaaaataataatttatcaaatatggcaaaactattaaaaataataatttatcaaatatggcaaaactattaaaaataataatttggtaaattatgccaaaattattaaaaataataattttgtaaattatgccataaaaataataatttagcaaattatgccaaagacatcgatgccatttgtgtgggacccgcttttttggaatttcacttttttgggagtgaaaagtgtgaaattcaccggagcagaaggagttgcccggactggtcactttattgccggctttgtctggtcggcacttttaataatggcgacattaattatcattcttcgaagcaaaaattaaaatttagcatttatcaaaaatatttatttatttttggtaattcttagagctcgacattttgaaaaaagcctagacctagactccatgttggacctggatttcctggacgaaaacccaggaaaacccaagtccaggaaaaatccaggctcctcgagacctggatccaggtctggacctgtattttttgaaactcattttaaaaatcaaaaaatatttcaaaaaaatcaataattgcttgggaacaaataaa

SEQ ID NO: 82254 - DNA, 612 bp, Heterodera glycines
atgcgcagcggtgccccgcttctcctcctcccctcccccgccgttgtgcttttcctcctcctccgcttcttccggtgccgtgttgcagtggtggctgtcgcaaaggttgcacccgccgtgtccgttcagcgactggcactgcgcattaaagcgctcgcaagtcgtactcgccgttgaacacgcagtggtgataggccaaataggcatggcgactgtctgtggacgaaaagcattgccaagcgccgcagaaatcgccggccgattttgttggactgaccgacacggcacgtcgcattcagacacatggaccacgcataggaaatgcagctgatgttccgcttctcctccgtggcccgcagagttccgctcacgtcgttgatcaaatcgtacagctcaatttcccatggacccgcgtggatgaacgaggaggagcacttgaggaaatggttgaagaacccttggaaaatgggggaaattgagcaaaaaacggggaaagacccaaaagtggtgggaaaagcgagaaggaaagggcgaaaagcattggaaaaagcattttactaaattattggaattttggaatgattaaaaatgggggaaaatgaagcaaatgaa

SEQ ID NO: 82255 - DNA, 96 bp, Heterodera glycines
aaattcacttttatgttcgtagctgtacagaatgaccattctttgatattccaatggtttgtgaccaaatttagcatgttttaatcaatttaggaa

SEQ ID NO: 82256 - DNA, 193 bp, Heterodera glycines
aaattcatttcccattttagccggcaaaattcacattttttctagttccaatcgcttcttgaccagcgtaatcggaggatatgtgacggagccaaggggcgaagtgattataaaggtaattagggggggggggaatttttgttaataaattgcctgattaattcattagggcaaaggtgtgatggagacattt

SEQ ID NO: 82257 - DNA, 468 bp, Heterodera glycines
atggaaagcggcggcacagtaaacgacgaattgtactacggtagtgcagcgatgccattgttcacgcgatgttatgatgtcatcgatttgggcacggccgagcgaatgatggcgcggatggatcactgggacaacaaggagcacgacaacacacggatcagcaccagcaatcaaccgtttggtgtgccagcgaggtgctttttttgtcggcattatgtcaaatttaaaaaaatcagaaaaatttttccaaaaaaagctgagcattgagcaaaacgaaaaatattttttctaaatattaaatattaaaaaaaactttgaacaaatttttagccaataatgggaaatggaaaaatttagaagaaaatgaaatcgatggaaattaaattgtgctcaaaatggtctaattatttaattttggaagatgataaatttacaaaaataatatttgaatgagaattaaaaaacaaa

SEQ ID NO: 82258 - DNA, 170 bp, Heterodera glycines
atgataaatgactcatcacatcaatgggattttccaaatgtttttccggtagaatttttatttttatttttctaagcaccaaaaaaactgaaaaacttttcagcccttacaaatgatggttatcgagggtctgcgccgatctggcgttaaaaagtgagttatttattcaa

SEQ ID NO: 82259 - DNA, 566 bp, Heterodera glycines
atgatttttggtcttataattttggaacagattgtaagtctaaaaatgttgttccagggcctcaaaactcgaaattgaatgtctgaggggaatttgttggctctgttggagttaaccgaccataaaaaacattagaaattctcaatcagattggaggaatataggggaatgaagagaaaataaaccgtattccccattaaaaaaagttggctaaatgagttcagaaatttcagcgtaaattttggaattttcattaaatcgcaaaaaatgatcggcactttttgaatcaaaatatacaaaaagcataaaaatgcattttaatgcattaacaaaaacatttttataaatttccgagagtttgcttaaattttatataaaagaattttttcagaaaactgctcaaaattcaacacaaaaccaggccaaatttgatcgttaaacccctccacaaaatttggaaaaattacacgtgggccaatttaatttttaaaatttttcaattattttcgtaatacaattaatttaaatttgttttctacatttctacatagggggaatatagggga

SEQ ID NO: 82260 - DNA, 735 bp, Heterodera glycines
atgaatattcgatgtgagttttgcgatgctttgcattttgttgaagagaaaatacatggtcgtggcaatacctttaaggattgttgtcactatggtaaagtttttgttcgcgagattactgaacaggattttcctgaggaattgagggatttgttcatgaaatttgatgcgagacacgtgaatttctttgacaatattagacatttgaatagcagcgtttcatttgcttcaatgaatccgctgagatatagatacccgaataaccgaggtccgtattgctttcgcatttacggtcagatttatcatagaatgaatttggctctgaatccagaaaatggcgatgatcctgcttatgggcagattttcatcgtagatactgagcatgcaatgagagcactgaggcatgccaatgtcggtattgaccctcaattgctgacaactgcgtatgaagtgattagaaatgtgaatccgtttgctgaagcatatatgatgatgaaagaagaagaagatgaagaagttgatagagcaagaaatgagaacagagagccagccgagatcaagcttttgtttgagaccggaaggcaattggacagacgtttggggtacaatgtacctcgagcgaatgaagttgctgcagtttatgtacctggagctgacggtgaagtacctaatgccaagattgttgtgagagaacgtggaaaggaattgaagattttgaattgtactaattcaatg

SEQ ID NO: 82261 - DNA, 970 bp, Heterodera glycines
atgccgtcgtcgtcgccggtggcgttgctgccgctgttggcgccgctgccgccgctgccgttgctgccgctgaagcggtgccgctgggcactgttgggtaagtaaggggggaatggtaggggtggagaagccatttggtggctaatcgccaaattggcactaaaaagacgctcgtctgtcggcattatgcaaatgtaaatatgatggagggaaaggaggggtgggggggatgaaattggacaccaaaattggaccgaaaattgtaagcaaacaaaattttatggaaaaatctctctttttccgcgctataaatgccccgcctcggccccgcttacgcggtccgaatgccgaaaattgttgttcaaattgtctgttttttgaatgggcaccgaattacattacccgaaaaatccgttttttgacgattcgtactgtcccggttgtattagtaacccgattcgaatcccaattagtaatgggtccgatttgtaagccacccgattcatacttaattaagaatgattcatgccaaataaatacacttatgcttcagctaattgttttagaagtgtgaaaatgtcgatttcgatagtggttaactttgacagtaaaatttaataaattatatgaaagttttaattgttttttggttctcgtatgactaaatggcgcgaggttttgttttaagtcttgccaagcctaaaatgttttattgtttattcttttgtgttttacagtatgaatcagggccagtgcgaattgaaatttataaaatctgaaattgaaattttgaaaattccaactaaaaattagtgccatactttcaacacaaaaatgtgtaaaatttaattttccatcatttttttcatttacaaaattcagcactcggaatacaaatattaattttttttttctcacataaaatgactcaataatcccccaattgtcccacaattccctagggaataaa

SEQ ID NO: 82262 - DNA, 136 bp, Heterodera glycines
atccccatcgttatctcagagcattatcatttaagtcaacagtcaaattcatgatcagagcgattttaaaaaccttataacttattttttggctttttaaaatctcaaaacattttcgaaaaagtggcttccaccg

SEQ ID NO: 82263 - DNA, 99 bp, Heterodera glycines
attaattttttcaaatttgggaaacacctcgtagactgggggataattggagactgcgggattaatagagactgggctataattagagcatatacggta

SEQ ID NO: 82264 - DNA, 488 bp, Heterodera glycines
atgaaatcaatgtttgcattagattgcatggtttttgtgttaaaagtgattttaacagaaatgacaaaaatgtaagaactcagaaacaaacaaaaaattttgttcctttctattgcctattaattttttttccaaattaaaataatctttcgttttattaatctgctgatgatcataaataaaccattacacattggcggtgtaatttgacgaaaaaaaatcgcaaatcaaattattattattataatttttgcactttatattaaagatttttttcggcattcgattgaacggtaaattccgcccggggataggaaaataataataatataaactcatacatatatacatatcattgcttaatatatgatcatacttttttttaattttgcagatttcgaattattcaatatggtttacaattagaatcttttacattgaaattgttcaggaaaacagagaacttttgagctatatgtagtattata

SEQ ID NO: 82265 - DNA, 62 bp, Heterodera glycines
atgtcgaccgccagtcaaaaggtccgaactcgcgaggacgtcatttacggaggtcggcacca

SEQ ID NO: 82266 - DNA, 1547 bp, Heterodera glycines
atggacaatcgaatcgcctctataggaacagaggacgccaaattctccagcgattcacgtcaaaaaactgctcattcgatggctaacaatttggtcagaatttcaaaaatattgaattagcgtatccagaattttcgtcaatgtaaaatcgagttttttttaataatcctagaggtcataagcagtgtgattgtaatgataaatgaaaaatttttttttaaattattaattattaaaacaacagaattattattccgaataaactagaagagtgtgattttcttaactttaataattttaaactatctgagatgtaaaaagttaagagatttggacttacaatacaattacgcacaatgtcctggcgtaaatatattacatgtacaaggagtactttccaaaatacccaccacttcgccgttcttttttgccatatacgataaagaaaagttaatcgcttgaggggatggggagttcaactactcgaaaccagggttaccatcttaatcccgagtcgcgaaatccggcatttctttttacgagtcacaacccgacattttactcgactcagtccgacaattttctcgaaccgcggcaaccctgctataaaccagcaccagtctggccttgtcagtaccgagtttttgttcgagaaagagtaactgtttttcgaattttcactgacgaaaacccatctgaaatgagatatgttttctttgaaataatcttttacaggtttctgccggttcacagcgtaaggaaggcattacggaattagaagggtcagctgcaccgccgaagccgctgcgacgagcgccaacaaattcgaacagttcaccaacaatggccagctcattattgctgggcgtccaattttttgaacgtctctcttttcatacgcttaaaggtaatttaataaatacatttaatagtgatacaaattgcaggcataaaaatcgcaaaataggcacataaaaagcacccaatagacaagaagtaggcaaaaatgccacaatcggcagaaaagtaggcatttggaattataaaggactgactgaaccccctaatcattaggaaggaatttaatgtttcagaaaagctcgaaatatacaatttatcgcatgatttggtacctccccaaactgagtctcaaaatttacctcctatatcatgcaaacccacgaaaacttggtcggcaattttttatttctgatcaggaacggacaaaatttcattcttgacgagtagcaactttctattaatagtactcattttgacccttgttcttcaaattttatctaatttttgcatatttacaattaaattaataactatcccattttaggcactctgttccctctgatggtcggtactttgcatgtggacgagggctccgccaacgcattcattttgctttgtatcggagtcacagttttctcgccaattgtcggtgctgcaatggccgatgcgaaaaatggcaattacgggtgaagcatttttaaaagtaacaatattatttgaaatcaaaattttaggtaattattaaa

SEQ ID NO: 82267 - DNA, 131 bp, Heterodera glycines
caaaattttaaatttgcaaagaaaaaattgaatttccttcacctgtcacttttggtgacaggtggatgattgatgaccttcccgcggcgctgcgcggcgcgggtgaaaaaaaacacccgcaacaatttggg

SEQ ID NO: 82268 - DNA, 1504 bp, Heterodera glycines
atgacgaagatcatttttcactgcactccaagttgcctcaatgtcctgtgagtgatcaatgacggattacgtttttaatatttaaattattatttctttttgcaatggttggtaccttatgtcaaaaggatgttcgaattaggaaaattttgattggacacataaatttttgattggacgcgcaaactgtgattggacgcgtaaacttttgattggacgcgtaaactgtgattggacgcgtaaaagtcgattggacgcgcaaactgtgattggacgcgtaaaagtcgattggacgcgtaaaatgcagtagagccctgattatattagagcaaattgcgaaggcataattaagtgtccggatttttcaaatagctgtacgcgtccaatcaatgtttaggcgtccaatcagagaccaccctcataagtttttttagatcataacttttttatttcgtggtcaatccaaacatttttagtatcattcgaaagcttgaagtctacagaagttttctattgcaaaattctgggataaatgcaacagacaaaaaatattcttgattatacgcgaaaaatggtgaacttacgagttttctcattgcaatttttttcttaatgcaattatttgctcttttcttgtatttataaattccctaatcttaaagctttcgaatgatacgaaaaaggtttggattgaattgaccaagtaagaaaaaagttatgatttaacaaagtgagaatggtcactgattggacgctaaactggaatagagcaaaaaaaaaaaacttggtcaccctgaatatgtaaaacaattttattttttagggaatttactgaagaaagagtgattattgtacataacacttcaaaattataatgtcatttaaaagacgcttttttgaactgcggcgtatcttaagacgacagtaaatatcttttctacctaaattaaaatcaacacaaaattttcaaggtcagttctcattctgatattcttatcttccgtggcggcttttgtgttcttctttaacagtgaaatattggtaattttccacaaaactaacaaataggccaattggtcactggtgaaatctctctcatttttcccattttattttgtttaattatatttattttcattttcaaggctgttaaaacgaacgaagaaattcaacggcacccaaaaagattgagtttctctgacgatgagctgcccggcgctcgagactcgaacacagttttacgcgaaggacaaattggcaatttcgaacagattccggcggtgctgccccccgaagacccaaatggcgaaggttgtgatcctttattcttactttgtttacgtatttacgaaaactcatttattgcaggtgaggatggacgtgccattgtcacagatcttaactcgcccgaggttcgtcgtgccatgtccgaatacgccttcaacacattggccagcgacagagcttcattgaatcggtccatcccagacgtgcgaatggaaga

SEQ ID NO: 82269 - DNA, 838 bp, Heterodera glycines
  unsure (1)..(838): unsure at all n locations
atgtcttcattttggaatgtgtctgctgttctcatgctgatcacactgatctctttgcttgtcaacagcagtgaagcggtgccgttgccttcaaaaaagtcgtcgtcattgtggtcgaaacttttttcaaagtaaaatttcaaaattttgccgccttggcattttttttaatttggcgtttcattttagcgatcgtgaaagtgctaaaaaattggggagcccttcctcgacatcggctgctggtggtgaattttcagtgcagtcccaaatgtttataccgtatgccaacaacggcaacggtgacttctttctaccgtacccgagtgaaatggacacagtcaaacgcagcaacacggaagaccatttccttgacccatatgatggtggctcatcgtggttgagcctcagcgatccgagccgacttgaatggaacttcaacagactgcgctaatgaggagggcaaagatcaacattagaaatttggactcatcgaattcattttataatttttaatgaaatgttttgaaattttattaaatttgtaaattgtcttgccagaaaaatgtttttttttaatgtattcaatagggatgtcaaaaatatgaaaaaaaaaatcccaaggaaatattaagaaaaactcaaaaatatgntagcaaatatgtaaatttttagtattttaaaaagtaattttgttttcaaaaaaatatttgttattttttcaaaagaaatttctaaaaattttcagaaattctcaaaatattaaaaaaaatatatgaaaatatgtaagaaaaaagttcaaaatatgtaacaaatatgtaaaaaaagcccgtatatgtaa

SEQ ID NO: 82270 - DNA, 1821 bp, Heterodera glycines
atgacgatgaacatcacaggggcatccacatttctggcagaacaattagagggcgagacaggtcatgttattgggtttacatataatgtgagttcttcagaagaaaagctgctggttctgaagaatgtgctcgactcggccatccttttgtgggtcatcatccatcccgacatgttaggcactaaatatgccactgaaaatgctgcgcttactaagattatggccagcattctgcgggaactcgacaaattttcggtggttttctttgtggtttcacctttgactttttttaaggaaactttgctaatggattccgcattgacaattgccagcaatttgcccaaggacaaaatcggtcgtatgtttggtcgaattcgtgccaaattggagacggaaccgacggacaatgtctactttgcccacttcgttgaagctttggccgcttgggacatgagtaaactaatcaacattatcgaactggcattgcaacgattgcggaatgcggttgtggcggtgtgcgacccgaactgctcgaccccgcggcgtaggcgagggacgatgaataacaaaagtgtgtttcttgtacaaaggctgggtaaaccgaaattttgtgaaagggcgctgcatttcctgatgcttttttgcctggcatttttctatatcatattcctgtaagtttttccaaaaatttttatttctgtggagtttataacaaatatgatcggcctacagtatgtcggtaaatatggatgattaaagtcgatacaaattattctaattaaattaactgttttttcacacataaatgcattttggtttatatttcagctttgccttcgtccttcctcagtacgtcctctatcgactcaccacgagcaaagcgcgctcgttttggagaaggacttgtggatttttttcgtccattagaactcatccaaattctgttggcctgcccacaatcatgcacatgtctcaagaataattttggcatacatttggaaggattttttgagtctctgtgcgtcatccgatgcaaatttggcgaactgttaatgaacaatgggtgggaaacaaaatttgatccccgaacactgatttgtgcctatgaaacgttcaacatcgtggcactgatcactaagagaattgaagtgagtgagcattaaacacggctttcttaatttatttaatttggcgttttgttttttgtgcttaaaatatctgtttttttcattatttatcattcagcaacctcgtcgcaacagtcaaggcgaagaaattggtgtaaatgaagcagagcgggggttatccctgacagatcgaattttgtacaatgaaatgaaatggttcgcaactgtcctcaacgagcgcactccttccttctccatcattcaggtgaccacccaaactcatcaagtcgcttttccccttcacttttcagatgtttcttcgctgcctcagtctccacctgtgcgcttctcagctgagtgccgtggtccttaacgaaacggcctctttgctgaacgaacttcgatatcggctggaaaatgtgtacgacgcgcgtccagtgatgtcggcactcaaaaaatgtgtgaatcatttgaacgaggcattggaggtgacccccaaattatgatattatgtatggtaacaaaatgttatccttttaaggggtgcgaagagcgcgaccaagcagaaagaataattgagcacaaagtcagactgatggaggaatattttgaggcggaggaacggggcgacacgacgcaaatggcagcggaagggaacgacgcttaccacgagattgatgacggagaattataa

SEQ ID NO: 82271 - DNA, 996 bp, Heterodera glycines
atggaaggatcgcccggtccaatcggaaacattggcccagtggggccgcaaggtaattccgacattgtgtaatgtcagaatttcattctttaaggtccacctggaattcctggtcgtcagttcatcacggaagggccacgaggctcaccgggaaagccgggccccaaagggcccaagggattgcccggctgccaaggggtgccgggcattaccgtccagggagtcaaaggaccgccgggggacgcggggaggtgggaaaaggaaaactcagcgaattcccaagaaaaacatttgctttgtttagaccggggaaagacggacgacgagggcaacaggtgaaacaagcaagaaatttaattatcagagaagaaatggcatttttaaaagggaacgaatggcacgccgggcttaaagggcacttccggcgattgtttccattgtccaccgccgcggacgccacccggctattgaaaaaaaatgaaataaatttaacaatttatcgaaaaagaattatgaatctgttttttgctgttttgatcgatcagtttatttttatttactataaacattttgccattctttcgcgtaattaataaaaatgattcaaatgttttcttgttcacacggcttttatcagtgaatcagtgttgttctgttgttaattaattaattaagcatgactttttttggcagtttcgaaaacgcggaatccatttttatttctttagattgacagttttcgaattaccaaaatggaaaaaaatagtccatgaagcaaaggcttgttagttgattgaactcattaattttatgtggattcatagaatgaattgaactcaaaaagctctggaaccctattaccggcagttcgatctaaattaatttaatttcagtcgtttgtcttttattaattcacttgaaatcaaatttatatattatcaaaaaagtaaccgatgcgtctcaaaaaaggacttcaccaacaaaaagcaagcatag

SEQ ID NO: 82272 - DNA, 2201 bp, Heterodera glycines
atggactgcattgacggctttgacattcgtctggagaaagtcaacacaattaaaatggtaaataatgcaaaaaatttgaattttaggacgttttttacccaagtgagacgataaatggcgtggtaatactcgaaacaaatgcaccacttcggctgagaggtgaggccaaactcagaagcaaaaaaggagtcaatttaaggcatcagagtgtttctgcgggggcgggcgcgtgtccaatggaaagtgctgaaatcgggcgaatcgaagtgagcgcacagagagagagagagagaagagggaaaaagattgattagctaacaaaaggcttaaaatgggaaagtgccaaaaagcaatttttttttggcatcgtttggctttttccaccccttttcatatgctcgagagtctcggttttttcgagtcggaaattaatctcggccatcagttgcggaaaattttgactctcgagcactcgttagcctttaaggacattgaaggacgaccaatatttgttggatgaaaagttgcttttgtggggccgcgaccgacgcgacggcggcgacgacgaagaaacggcgcagattctgccgcgggggacgcacgagttcagcttcggtttccgcttgcccgccacacaaatgccgagttcgctggaaacgaaggcaaatttagggattaattgggcaaaaatttgttaatttaggccggcacagttcgctattatgtgaaggtaaacaaaagaaaagttgttttgacttccgattgcattttcaaaggttatagtcgacgttccttacgccagttcgcctcagggcattaagtgaaaattaataatttaaaacgattatttcgaattgtttagatattttacactgatcggcccacacattgactgtatggaggagaaatatttggtaaaaatactcaaaaaataaaatatacgaattaaataaaattaataattttttggacccatctctgtgcccaggaccaccaaattcgttgttttggctgttgcaagagaggagtgattgccctcagagcggtgagtcattctccccatttcccaaatggtcattttctaccctcattgtctgccattttctcttttctccacttttgaggttcttgaacggagtgcctattgctgtggcgaggtccttcgccttcgtttgcaaatggaaaatcgccaacatttccccgccattgtttgcgtgcgtctaatccaggcaaaaatcacttattaatagagaccggatttttatgtttttacatattttttttgcggcttagttatggcgagagaagcccaaaaatagcattatctccgaacaatttttgatttagagcgacttataaaaacataaaaacacatattttggcgttttggcacataaaatatgttagcacatattttggggtttggcacatattttgcacatattttggcatttttgagaaaaattgcaataaaaatacaagaaaattgaaaaatacacccctaaaaatcgacttttttcctaattattaacataattttcaaattaaaaaattttttcttcgattgtagaaactaatgaaatctcgaattcattaattcgtcattggatttcgaagttctctgctggaactttcaatttatagaaatgatttatcaaaaaaagacaattttaccccaaacacttcgaaatgtatttgatttgcgttgtatgggctaaaaatgataaagaatgagatttttgggaatttttatgcaaaaacacacttattttttcaatttttaacacatattttagcacatattttggcattttttggggtttttagcacatatttcagcattttttagcacatattttattacatatttcaggatttttagcacataaaaatccggtctctacttattaaattcaaatttgttaaattacttaagcacctcgagtaccgtatcgaccgtggggtcattggtacggtagcggacgcaaaaaacagtgatttttcgtataatattttatttttcaaacatttctcaatttagttcaatcaacagcctttgaatggaggtagcatttcttagaattaaatttgaaaattttaaaagtaaaattaggtcatttccgatcggcgaacattcgcaatttcgactcgacgccggccaagaactttccctgaaaatccccgtccttcctccgacaatg

SEQ ID NO: 82273 - DNA, 595 bp, Heterodera glycines
tccgcttttgggtcggttaaagtgaacattttcgggaattctgagcgttatccaattgttacctttcacgacattgggctgaatgcgatcgccaattttgagaatttctttcaattccaaactttttctaaactgacggaacagttttgtgtctacaatataaatgcaccaggacaagaattagacgcaaggaagttgccagaaaagtatggcaatttgggtcgcttattttaatttgttgtcttgtcgcgtttagtttccattatccgacaatggatggtcttgctaacattgttggcgatgtcgtctcacattttgggtaatgtttttataaatgcaattgccctcttttatgatcatattccacgaagtttcaagtcgtttattggcattggagttggtgcaggtgccaatgtattgcttcgtttctgctgtgcgttttccacattagcaactaattacaatttaaatcccctgcattttctccattccagatgagtcatcagaatctgttggatgccctccttctgatcaacgccacctcccaaaaggcggagggatagaatgggcctaccgaaagagtgcgtttcggttg

SEQ ID NO: 82274 - DNA, 2352 bp, Heterodera glycines
atggataagagtctccaaaaattgcaaaatgaattatgtgactcatcgaaaaatgaaaattttcaaaatacgatggaaatatttcaaacgacaaaaattgaaaagaaaacatttgacaaaagccaaatggacacagccttggcaaaagatcaaactctcaattacaacaataagggaatgttttcagaacttgtcaatttttcaagcaaacttcttaaaattaatgaaaaattaattgaaggtaaaatttaatatttttgaaaaaaaacaattaatcgtttcataattagtgccaacttggtcagttccgacaaaattccttctaagtttggcacaaatgtccttcataagacttaaaaaattcattgctacaattaaagtgacaaaacaattcaaaattttattttttaaataatactaataaaaaaacacatgcagcaccgaaagatgctaaactctgaccagggcttgacgcaattacggattacggatttgtgatatttttttgctccttttggattttttagagatgatttctttgcaagctttttttaaaaccaacaattttttctatgtttaaagtattacccatagtcttttctttgtatttgtagtattatttaggatagataccccataatttgggttttccaaaataggggacgtcctttttcgtcgcctcgtctaattttttccccattttcgttttttgaaaattcttatcgatattgaaatgaaatcccgggcatgaggatatttctaaatatggtctcgattgcttatttttggtcgaattttattaaatttttttgctcggttcaactcccacatacagcaggaatatttttttgagttttaaaaatgtcttatccaatataattttttcgaaattatttaacaaattctccaaaattgatgatttttttgacaaaatctgttaataagtcgcatcacaatcttcggaaaaatttcacgccggcaaaattattattttcttatataaaattacaaatttgttatccccgtttccccggcttacgaagcaccgttgtcgggaatcgccgattaaatttgcaaataaaataaaattgttgatttattatctaatcagttgcgtttttcagctaaaaagcttgccgtgttccatcaaaaaccaaaggatttactcggcagaagaacaaagcgtgccgacgacaatgcaattaagggctgcatctcgtcagtgcttttaacattaatctctgctccatattttggttattattcatttcaatatgcccacgagggcaatgtccaaattgaatacactgaatgttataagcatttgttctcctatcgctgttacccagcccattcttcggttgtcacggagattgttgaatggacaattatatttgccattggactgatacttgcactgctgttttgttcttgtgcccgtggatgatcgtcatactgtatgattacgtttatgattatggatgcaaattatatggaaatccattttttcaggactatgggaggcctgaaacgtatgaaaaacatgtttttgggctttgaggcttctaggatggattcctttattccatatttttccatatttcgcgattcatgtccatatttccacatttgtccatgttttggcattatgtccatatttcgcgattttatatccatttttttgcatcccttttcatgaccatgtgctacagttttttattctaccaatgttttatttgattcaagtttgtgatttttgctacattgtaaaatttttgagggaatttcggtccatcggtgctaatagcgcctccggagaaaaatttgggggggtttaacaaatttacaaagaaaatttactttatagaaattctttatgtatttttcataacgaaaaatcaaaagcttaaaattacccaatttgtatttgaaattgaacccttctgtttaaggctttctctgttctatgcttctttctttatcaatttgcaagcatggctgtctttattatggacaaaaaaaactcacaaaaattgtcattttttagaaattttgtaaatttataaaaaatatgaatattttttggagtaaggggacctgaacaatttctaagcaattttgactgaatataatttttgacaccatttctattgttattttcacatctcgcagatcttttccgcaaaaagcaagtgatggttgtcccacattgtaagctgcataagcatcgagtaaattatccaaagtttctggaaatactcaccaaatgatgggctcaagaattgaatttacttttttataaatttttccaaaaatttttatgattttcgtaataatacttgtttacctcca

SEQ ID NO: 82275 - DNA, 546 bp, Heterodera glycines
atgggtgggcctgtcggcatgacgagagggaaatataaaagaaatagaaggtattgtgaacttttcatcttactttttaaaaattattttaccaattttgtcgccttggtgtgctttttattttattttttttatatttttagacaaaaacttttacaatcattagattttcagtgaggttgagccaagaatttattaaaaatgtttttaattgatatatttcctagactgatttattttttattttttctcatttcctcgcattcatactcattttttatcggtttaaagctcttccttcgttgtaatatattaataattcttgggtgcatattttgtttattttttttttattcattttaacaaaatttgtagaattatgtttcaattttttcggtaaatatttttaaatttttctcattttttattactcatttaagttttcaaattcaaatttttgaaggtggtgaccatattggttggattgattttatttataatgggtaaagctagattcttctgaagtatttacatttttgtaataaa

SEQ ID NO: 82276 - DNA, 65 bp, Heterodera glycines
gccaagtttcaaagctcgaagaagcactaaggaagctggacaaagagaaggcaaaggcaaaatga

SEQ ID NO: 82277 - DNA, 2044 bp, Heterodera glycines
aaaatgctgccaactcccaaaatgttagtcatcgtggcgttggtcagcttctgctccaattggcaatttggctatcaggcaaattcaaaatttaaataaaataattaaaacaattattaaatgctatttgaaatagccttgcaattattgaccaattaattaattggtcaataattgacccattccttctttgcctgtccacagatcacttacattaacactgcccattggtccttttacgctttggcggacgaagtttatcaaaatgaatcggtgacaataattaaacactttcaaattttaattgcctttttccttttttgcctttctctgcgcatttgccacaaagcgaatggaatttgctgtggagtttcattttggcctcattttacggcggcactttgctcggttttgttgttgttagtgggcatttgttcaatttccattcaattagtgtttataatagccatttccttttttgatttgatcaattcctttttatgtgccccgtttgattcgttttgccggcggtgttcgcaatgctttgcttctctcttcgctacccgcaattttcggctgtgccgttcaattggcggtgcgtttgtccgcgagtaaattttgccaaaattcgaattggttttaacccgtccccaatttgagctttgcccactctttgctttctgctctccgtcggccgtcttctcgtcggtgttcaggcgggctgttcgctgtgtctgctgcccctttttatcattgaaacggcgccatttaatcaccggccctttctctcatctcttcaggcacggacggaagaacacttctgatcattctcactcagttgctgatcagtctgagttgatcacagcaatcactcactgatcactcacatttgatcattttcagctgatcctctgatactttcacattgatcaaaaaccctcaaactttttaaggtcgttttccaatcattggccactttgatcggactttcggttggctctgatcatttgttgtcgttgggcgagcacaaaattgaatggcttcaggtccgactttttcaataaatttttttatttgttcaattattttatcatttttaattcatttgattccaattttgagatcataggccttgctcccacaatgtttttcgccatttttctgctgtggttgcccgacacgccctttcgcctgttggaaatgtgccaaaaacttttggactttgacgacggggcggacgaagacgtcgaattgagtgtgccttttgttacatatgtattatctcaaagattttgacagaattcgtactgtcctccctgttttacttcggcacaatcgtcgtcttcggcgccattcgttccgaagcatttgagcggtggtccctctcgccggaagggcgcaaaggacggcaaaaatgggcggacaattggaagggtggtgaatctccgcgcttttccctcaacccccccccccccccgtaggacttttggtcggcatttttgccgcagtttcctttgcttttactgccgatgatctgatcgattcgtattctgccgactttttctacgtaattccaaaattaaatccaaaaaagtttttattttaattttcgaatttcagcgcttttccttctcgcccaaggcgaacgcggaatttttaaccgccgggctcggcctcttgctatttttcaccagcattttgggcgctttccttgtcattagcaaattcgtttgctcagcttccctaatttgttgcaattaggccgatcgcttcgggcgccgtcgtctgctaatttccggccttttgggcacagccgtttcaaatgccatcgctgcgtttggcgcgtcgaccaattcgacttcgaccgttaaattagacaaagattgatcattttatgcatttcatcaggattatttctgtgtcaggtcgccattggcttcgccctcaccaaaactttcattggcttcggcgccggtgcccccgcgtggtttctcacctccgagttggtctccccactttttgtggcccaggggcaggccattag

SEQ ID NO: 82278 - DNA, 812 bp, Heterodera glycines
atgagtcaaattcattcaaaaataattcacacaggttgccattttgctgcttttgtgccaatggttggtgccgttgatgtggctatggcgccaggtcagtgtgtcatcttttcccgccataaatggcattattcattgatgccatttttgattggatttcccctcccacccccacttttcagaaccctgacaatgccgcaattccctatctgacagcggtgggcgacctgctcggcaccaccttccttttcgcggcattttccgtgttggcattgttgaagcccgaagaattggtgtccattgtgtccagcagcactgcctcgccacccacgggaatgccgccgtcgccgggctaattaatcaatcaattaattaattaattaattttatcatcactgtgattatgagtctaatcaattttaatgatttgatttgccaaatctcattgtgtgtgtgttctcccggcttttgtttttgttattaaaaaagaagcaaattgttttccttcaattttttctcgtcagcttttgtttgttcttctgcgtcaaaatactcaaaagatattattattattattattattattataattatcatattattatttcatttttatgaattctctctttttcaaaattaattccttaaacatttgaaattcaattcaaatcgccttcttcttcagtcaatcattgttcaattcaaatgtgaatttcgcagctgcattttggctatttaattatgcatttattgttttttgtttattttttgccctgaaagaggtgtcaaaatggttttctctttggaataaa

SEQ ID NO: 82279 - DNA, 406 bp, Heterodera glycines
atggttaatttcctctcccgaaatgaaaaaaaaacaaaaaaaacattgggcatttttaggcacaaatttacgacaaaatccaaccaaatttaaaaaaaaaaccaatccgtccatttatataaaacagtattaaattttattattattttttaattataaattattacgcctttttcctcaactcatccaccattaaggcgttggtggcaatttggccgcagtggccgcctccaaactgtccacattttatcaccgcactgcacagcttggcatattgccaaatgagtggaccatgggccgtttctgctccatttcgagggcatttttttcgcccgattcggtacttaaaagagcggaagggagagcaaatccttcctcctcgaaacttcagaaaattttaattaaa

SEQ ID NO: 82280 - DNA, 555 bp, Heterodera glycines
atgccatgggtatgggaaaacgctgcgcaggatcgccgtcgtcaacaacaacattatgcaatggtgaaaatacttttaaatatttaaattatgcgggatttttttattcactaagttttgtcataaatccaatttcatcatttttttaatagtatttgccctcctttttagccacaaaattaaaatgtgattaaaatcgataaaaaatttccgattttttttaaatttgttaatttgaaataaataaataaatatttatgggtccaaaaattgaggtgaggcgaaaccgtccactctcttcctcttcctcggccttgcccccagacccatggctcgaacaccgccgccgggactaagccatgcccaaattgcagaaattttttccaccattgaagtgtaagaaaacatttcacaaaaaatatgttccatctgtcaggaacaatttgaggtgggttctttgggggcgacaatgacaccgtgccatcattttttttcattttggatgtgccagggaaaatgggcggagccaaaaaatcaataatggtgccaaataaa

SEQ ID NO: 82281 - DNA, 796 bp, Heterodera glycines
atggacgaggagggcgacgaaagggacgacttttgggccaacatcggctcggacgatgtcaaaaacgtcggctattggtaagtttaggcattgttctttatgttccatttttttaaatgtcgctcgaggcaatttttattccaatataaaaattgccaaaaaaaaattagtcgaagagcggcgacttttttttgttcacagaaattatctttaccatttggagaatgcatgcattttccgggaattttagagtctaaatttattttgaccaattttgacaataaactctaggcctgaattcgaacaaaattcgataattcaaaaagtatgaattcagacgaaaaacttaataaaaccaacgcttgataaaaatcatagataaatctaaaattttcaaaacccaaaaacataatcgtgtttagcacgtgtatttttttttacccaaaactcaataaaaaaaaattttttagctaaattttcctgattgtgagggtattaccatgtttttaaaccgtctcgagacttgaccaaatactgcccgtttgtttgaccttgtcattccctttttgcatttggcagttccaaacacgacaattgcgagctgttgccgccgcggaaaatcgctggccgcaagacggactggcgcgaatacattgtgaccaaactgaatgactgcaaaactttgactggcaaatgggtgcgcgagcggcaactgtcgctggtcgaaggacggtttaaggtgggcaaaaaatgggcaacccaaaaaaaaaactatgggattattttttggatttga

SEQ ID NO: 82282 - DNA, 1017 bp, Heterodera glycines
  unsure (1)..(1017): unsure at all n locations
atgacgagctcncaacccattatttatgagaaaattgtgcaacaaaatggtagcaaaaacagcgctgaatggtgtctggcctcggaacggcgactgctccaaaaactgatccatcataagccggtggggatcaatcggcacttcaacctcaacttgttggtcatttacatgaacaacattttcgactttgaggaggacattaactttgatgttggtttttgggtttctccctctttttttgtaaacttttatcgacattcttttggattcggagtcgacaaaaatataaggacagaggccgaaaaccaaagggggcggggcggcactttttcggtttgcaaaaaaagaatcaatttagctttttatagctggaccgagacctggatcccggtccaagccatttttcagcaacctgggtttttcctggacattgtccaggaagcccatgtttccatgtccatgcatgaaaaagctggatttcctggactttgttatctttatgtagcgaaaatgttaagcttttttaaaatgctcaaagacaatatttgttcgtctaatggacgcggctgggcaaaacttgaaaatttcaattaatttttctctaaaagttgatgcttttcaaaatttctttggttttcgaccccctttggtttttaaacccaactaattttgccaatccctaaaaatttattatttgccctctaggactatctgagcgaaaaggatgttgaacagttgaagaggcggcgtatggagggcaagcaggacgagcgaaggccaatggcattttcaccgtcctacgcaattcgaccgaccacgaaacaggcaaaaaaaagaccaaaataatagccgaacttatgctaatttgtctgttttaaggttgaagaaaagttgaacgaatacttcgacatggagctgatcggggagaacgagtccccctctgaagaattggaaaagaaagctgtttttgaactgccccaagagtaccaattcaaggaggaaatggtcccacgataa

SEQ ID NO: 82283 - DNA, 457 bp, Heterodera glycines
atgactattgtcgggaaagggggatctgctgtcaatgccattagtaggtctccttttggcgacgacaaagactcgcgccgttcggtgtcgccgccgggcacaaagcgtgtacggaacggcggtggcggtggagacgatgacagcgcacgacgcaatgacagggacagcaagcggagcggtggacgaagggaacgtaagttggaagctgggtgcaattttcaccggaaacttattcaaaccaaaaaaaaatgtttgaatttttttttttgggtagggggaggggaacagcggcttcattaaatttttcatttttttaatcaaaaagaaaatccaggcaccgctcgtcatgacgaggaggagcgagaccggagtgacagggaccgggagcgggaccaccaagagcgggaacggcgacgcattggactgccgggcaagccgaagtcggaccatgtgctga

SEQ ID NO: 82284 - DNA, 1928 bp, Heterodera glycines
  unsure (1)..(1928): unsure at all n locations
caaagatttttagcgccacctccgtcgccgaatggcattcgcccgccggcgtagaaggcaccaccgncccccgcgtccaccgccaccaccacgaccaccaccgcgtccgcctctgccgcccatcggactgccaccaccgccaccattgtcccaaccgcgtccacggccaccaccgcgaaagccaccgccacgccctcgctcaccaccagtgaacggctgaaaaccgccaccagcgccgggacgaaaagcgccgccgcctctaccgccgcctccaggcgaatctttgaaattgggtcgcatgcatccggttaacatggtgataaacatggtttatgaaacgcctactgaatcgttgctggaagccgccgccaccaccacgtggaccgccacgacttcgccaattgcctctgctggggtcgccaaatccgccagttgggtagccgccgcctgctgccaccgcattggagaagccgacattggcaaaaccgccaactaaaaagtcatttacaattagtgccaacaacatatgacatttttgctccccttttttatccatgtcgaaattggccaatggatgttgacccataatcccgaattaatagcgaaaactattttgaaaattcttaacgattttttggaaaattgtgaaaaatctaattttttttttaatttctcgagggaaaacgttgtgcacccaaaggcaaaagctacgtaaagagatggctaatcgaacggcgaagaaaagggaaaaaggtgtccgcaaagggatccaagggaatgaaagcaagaagcaaggccgcaaggaaatcaaaagccttttgtggccagtcggcgggcgggaacggaagggtgtaaaatgaagagaaaaaaggaggggggggggataatttttcattggaaaataaagggattttatttgtagggggaaaggagggagaagaaaacacaaattatttcgcaaatcgcgacatccacatcttcccaggaatgtacccccacacccacacagaatgggccgggggtatgaaatttttatgaaaaaaatgaataaagcagaaaaaaggacccaaaaatccacaataattgagtccgtcacaaaaaaaatttgaaggagagattgccggcagtgccgatggcatcgccggagaaaattttttaacttcttggggttcgtaccccacgtacgccttccacaccccgcccaaccgcgagaccatccctgtccccgtcatttgccctccccgcattcatacgcgatgttggtggcgcggacgctggtgttgacatcagcgcggcaattgcgctgctcaccggagtcgtcaattgctgttgttgatgctgctgcgctattgctgtgtctgtttggtgctgttgttgttgttgttgctgctgggactgacgtgttacgcttggcggtgggatgttcggcggtgggaaactgaacggcaacaaattgccagcaaatgccatttgagcggccgctgcagcggcagcagcttgcgtgaacattgctgcgggctaaacggggggaaaatattacaaattgggagagagaaaggtggaccccgacaggattttttaaaatttttaaacagaaaatttttcaagaaaaaatcttagaaaattttccatataagaaaattacaaaaaaaaaaatttagaaaattttttttatcaaaaaactcgaaaaaaatttaaacgagtcaaaattctgagaaaccctaaagaaagtgcaatcacaaacacataaaatgttcataccatgagtccagcggcagcggtggccaccgatggcatcgccgcctgcggcaacgtgacggttgttggcattggcgttgttgtgcccagcgcggcttgttgttgctggtgttgttgttgcactaaatgagtgacggcagccgaagtggaaagcaacaaattgtgctgat

SEQ ID NO: 82285 - DNA, 1179 bp, Heterodera glycines
atgttcacgcaagctgctgccgctgcagcggccgctcaaatggcatttgctggcaatttgttgccgttcagtttcccaccgccgaacatcccaccgccaagcgtaacacgtcagtcccagcagcaacaacaacaacaacagcaccaaacagacacagcaatagcgcagcagcatcaacaacagcaattgacgactccggtgagcagcgcaattgccgcgctgatgtcaacaccagcgtccgcgccaccaacatcgcgtatgaatgcggggagggcaaatgacggggacagggatggtctcgcggttgggcggggtgtggaaggcgtacgtggggtacgaaccccaagaagttaaaaaattttctccggcgatgccatcggcactgccggcaatctctccttcaaattttttttgtgacggactcaattattgtggatttttgggtccttttttctgctttattcatttttttcataaaaatttcatacccccggcccattctgtgtgggtgtgggggtacattcctgggaagatgtggatgtcgcgatttgcgaaataatttgtgttttcttctccctcctttccccctacaaataaaatccctttattttccaatgaaaaattatcccccccccctccttttttctcttcattttacacccttccgttcccgcccgccgactggccacaaaaggcttttgatttccttgcggccttgcttcttgctttcattcccttggatccctttgcggacacctttttcccttttcttcgccgttcgattagccatctctttacgtagcttttgcctttgggtgcacaacgttttccctcgagaaattaaaaaaaaaattagatttttcacaattttccaaaaaatcgttaagaattttcaaaatagttttcgctattaattcgggattatgggtcaacatccattggccaatttcgacatggataaaaaaggggagcaaaaatgtcatatgttgttggcactaattgtaaatgactttttagttggcggttttgccaatgtcggcttctccaatgcggtggcagcaggcggcggctacccaactggcggatttggcgaccccagcagaggcaattggcgaagtcgtggcggtccacgtggtggtggcggcggcttccagcaacgattcagtaggcgtttcataa

SEQ ID NO: 82286 - DNA, 741 bp, Heterodera glycines
atgatgaaaatccagtggataactctgtttgtggtgcgttaagtcttaattgggcttttgttaatacatttaaaaatgctttttaattataaaaaaaagtattaaattaaatttttccaataatttaaatattaaattttatttatttaattaaaatatataaaattttgtttaaaataatcaaattaaaaaaatgaataaacaattaatttatttatttaataaacaaatatgtatattattttagttgtccaccaccatttcggcaattttttgtgcttcttccgtcaaattgccaagggcaattgccgggccaccgaattcgtacgtaaaaaagccgaactatgcgcaacagcaagcagttcaaaagcagcagcagaacggtatgccaagctcggcaggacgtgttcaaacatcggttggcattttttaaatgaatttattaattattttaaatttgaaaatattatttaaatttacttcaaaaataacaatggcattttgatcaaatttgtttaatttatctttttagtttggccctaaaatcacatttgctaatggaactgtgttcacatcagtttccgaccaaggggtccaattaaaatggaaaatttttttaattttatgaaatttttatttttacaggttgaagcttcagtccaaactagtgaaaggtgactaaacaaattattaatttgatttaaataacagtcataggttgattgatttaaaataacaaaa

SEQ ID NO: 82287 - DNA, 374 bp, Heterodera glycines
atgtttaatgcgagttttaggaaggatttcaaccctaaattgaatggcggtgatccgaatcagcctgggatcaaagcgcgcttaaatgccgaggcatttcgctatttgtcaggcgaacttgtcggcatattgagtataacattgcattttaatgaatgaattggtttttaattaaatttcctaattaattgaaataaattttaattataattttagcagttttaatttaatctaattaattaatcaaatttcagactatcaagtgaaacgcgccaaattgcctgacattgatcagtgcattccgaaggcaattttttagaaattatttatttatttaaatgttaattaatttttaggccggcggatgtttgaga

SEQ ID NO: 82288 - DNA, 1191 bp, Heterodera glycines
atgtcaagtcccctggtcaaaaaagaaattaagtgttaattaatttttttttaggtaaaattttaattaattttttaaatttaaaaccattaaaaggtaaaagtggggattggaagttttgttgaagaacagtgcaacaaatgaggcaaaactttgggtggttttcttgggaccaatttttgttttaatttgaaatttgaaattttcaaaagcaaaaacaaaattcaaaaattttagattcaatttcttttattgtttttctttactctaattaatttaattaaaaaaaacaaattaatttataataattaaggatcatttttcataataatttcaattaatttattgttgtgttgtttttcttagaaatgatttttgattgctaattatacaaattaatttttaataaataaaaccaaaagaaaacattaatatgaaattgttttaaataatgcgtaatcttaacacatttattatattttatttttaatttattattaatccaataatttcaggctcaagtcgttttggccgaattgacacttccatccaatatggcggcttattaggcgacattgccaaccaacagcttaaagtgagtaaaattataattgcaaaatttaaattttgagtttaattttagtatgaaaatattttaaataaatttaaaagacaaaagttaattagcaattttatttatgatctaattaattaaatgaaatttatttaaaaaataattaataatgttattttgaattagttcatctataaattaaacatttctttggacattaaataattagtttaatttttttaaataaaatttcatttgaaaatgcccttggcaatatttccctaatttaaatttgttaacatttttcaattttgaattcagcaaaaaatcaacaaggttgttcgtcgccaaatcacttcacaagtaccacatttgcatgatcattttttaaaatattttttaaaataaataattaagcaattttcaatttttttagctttgtaaacgcgtcccacaaatggtcgatgagcaagtgaatccccaaattgctggcgttgtgccaaagaaaattgcgttcaaatccatctcatcggttgcactgaattcgtcatgtcttgcagctttgacgggcgacggcggcgcagtaatttaaataaaattcagaaaaaataatcaaa

SEQ ID NO: 82289 - DNA, 902 bp, Heterodera glycines
atgctggatcagctgaaaactttgctaaagcagcctcaggaggggcaaaggctgatcagaccgaaactgttgaccaatgtgaatattttgccaaacgaatggagcatttacccggcgccgcggaacattggggccaaaagtggaagtgatcgtgatcagaaattggaccaaggacaacaacaacaccaagaaacggcagatgaagaccgatcaacagatcagaaagtgtcggtgcaaaccatcgaaattggagcagacaatcaacggggagaaggtgagcacgaaaacggggagaaggtgaaattcgtggactgaagcaatcagtcaatgtctgaatttcgaaaagacgctttcattattactttggtctttgctcgttaaactctgtccatttctgcattgaagtgccatcctctgcaagtagaagcactccaacgcaattcccgaccacatcggcagactcaattctgacacaaccgcagttcgaactgaaggcgaccattcgaccgccaattgtccaatcagtcgtattggtaattatcatttcatttattagggcccaattgaaaataccttcaaattatgtaatttattgcgttcacaaaattggccaggtgcccgatcaaaaaacaacagaaaaaacagcaaaagaagaaaaaaaagagacgaaaaaggagacggaacagcatcatcagcagaacaaagaggaggaggaggaggagaaaagggcggtcaaaatggaggcgaattggcagacggaggagcagaagctgatggccgaaatgcgcatggcggtgcaaaaggcggactcagccatggaaaaattggaaagccaacggcgcaaagagtcggcacaggcaaacaataaagcaatttggaaaatgataattgacactaattag

SEQ ID NO: 82290 - DNA, 759 bp, Heterodera glycines
atgcaacgaatggaacagatgaaaatggcgagtaccaaaatttttaaattaaatccgagtgaccccttcccaaataattcatgttttttcttctagacagaaaacaggctaaggaaattgccaaggcatttgggatgtatctgaagcaaatggtgccaaatcggaaataatttttaatattgtaaggaagaagctggctgggcggttaaaacgcggaaagcgggggttgataagatccataaaagaaagggcggatgtgcctcggtagcttaatggtagagctgcccacggaaagggtgcatgagtgtgttcgattcccacccgaggtttaacattttgcccatttcttattggtagcaccggatggttgccccaccgcgccagcagcaattaactaatggaccgagggaccggtcccgatgaggatggtactgtaaggaagaagctggctgggcggttaaaacgcggaaagcgggggttgataagatccataaaagaaagggcggatgtgcctcggtagcttaatggtagagctgcccacggaaagggtgcatgagtgggttcgattcccacccgaggtttaacattttgcccatttcttattgtacggaccccggcccagtccctagcaactcaatttactgtaaagttatcgaaagggccggagaatgttaaatttggctgagtttagacaattttatttttatttttcatcggtaatagctcataggttgcggaatataggaaaagcatcagtaa

SEQ ID NO: 82291 - DNA, 1338 bp, Heterodera glycines
ttttaaagaggccaaaaagattgaccgggaaattacgaccgatgacgttaataaattcctagaaaagcagagaccatacacgattcataagcccatcaggaaaagattcccgagactaaagacgataccaagtggcttccataccgattggcagtgcgatttgtgcatatttgaccagttgaaaaagcataacgacggttataaatatttattggtctgcatcgacgtgctgagtcgaatgatcttcagttcaccggccaagtcaaagaagagtgaggacatgatcgaggctttttatcgggtgttcgaaaagtctaaaattatcccgatgaaaatatatagtgacagcggtttagagtttcaggcgggaaaatgaaaaaatattttgaggaaaaattcatcatcaaaaacgtaatgtatagtcctgatctgcacgccggagtcgttgaaagggcaaatcggacaataaaggagcgcttgtacagatattttacaaagaaagacactcttcgatgggtcgacgtaatagataaaatagtctcaaacattaagaacagtgtgaataggacactggggatcaagccgtcttcaattaattttgaaaatgcccgcgctctctgggaaaaattatataaggctagggaatttaaaatttcgaaaaagaacaaatttaaaattggcgatatcgttcgaattaccaaggaaaagggaaaatttgcaaaggggtatctcccaaactttaccgaagaattatttaaaatcgttattgttaattcgacgacacctgattcatacaggattaaagatttggaaggaaatttaataaaaggcatattttataaccaggaattagtgaaaatagatggatgatttttacattgtactaccctcgaacacaccgggaccagggaacagtacatcaaaattcacagtacgactccccgagactttggaattgggcaaaaattggtcagtagctctctcatcaattatttacccctactcattcaccgctctcggtataaatggtcaagagtttattaaagtatgggaaaatgacagcagtgtccccattcaagtttattaccggacatgaattttaaaaccgccgggggattgggaaataaaattaacgaagcattcacacatcattacaaaatcaaaaaacaacgtggaaagagagaagccaaggctgaagaaaccaacgactcaaaaattgatgtcgcaaagagggccgcagaacgcgccgggagagatgtagaaagacaactcaatcatatcaacaatgtctcgagttccatccaaaccaaactaagcacactaagagaagtaaatcct

SEQ ID NO: 82292 - DNA, 108 bp, Heterodera glycines
ggttcgatgaaacttttattaaatataagcctaaacttttttgtcctgtttaaaagggaattaaaaatttttaaaaattttattcatctcccccttttgatagaaaaa

SEQ ID NO: 82293 - DNA, 154 bp, Heterodera glycines
taagcctaaactttttggcctgtttaaaaaggaattaaaatttttaaaaattttattcatctcccttttgatagaaaaagcatcagagagccttatttaacttttaattaacatttggtgcgattcagagcacgttctaaaaaatatttatgaa

SEQ ID NO: 82294 - DNA, 436 bp, Heterodera glycines
agttcgatgaaactttttaaaatataagcctaaactttttggcctgtttaaaaaggaattaaaaatttttaaaaattttattcatctcccttttgatagaaaaagcatcagagagccttatttaacttttaattaacatttggtgcgtttcagagcacgttctaaaaaatatttatgaattaattttgcaaaataataaataattaatgaaaaagtcagaatttcgaaaaattttaaaaacaacaagcgttggcattttttcaggttaagttagtcctttacaatggagaaggcctgcaaaatttggagagattatatcgattttagtgcgctaagttcgatgaaactttttaaaatataagcctaaactttttggcctgtttaaaaaggaattaaacatttttaaaatatttattcatctcccttttgatagaaa

SEQ ID NO: 82295 - DNA, 444 bp, Heterodera glycines
atgagccacctcaaaaatgagcacaaaaacgagacgaaatgccaaaatgatccaccatttgtcttggaattcgtaattgtcgtcgcagacagtctcaaacgcatcgccccacacttggcgactgatcggctgactgatcagtgagcatggtgggcgccggtagtcttggtaacgacagtaggtcgtgttcggaaattccgtatttgccacagtcaaagttgacgagtcaaaataggcaaatgtatcgtcggcatagctaaatgatcaaaatgtgacaatttgtatatggggttttgtcattaaaattggtaaaaaaaattttttttttttttttttactaaatttcaatatttttataattaatttcagagtaccatgggttgagactcccaaaaacagggtttggcgatcccaaaagtaccaaaaataattgtaaggattaaa

SEQ ID NO: 82296 - DNA, 1450 bp, Heterodera glycines
  unsure (1)..(1450): unsure at all n locations
ctatgccgacgatacatttgcctattttgactcgtcaactttgactgtggcaaatacggaatttccgaacacgacctactgtcgttaccaagactaccggcgcccaccatgctcactgatcagtcagccgatcagtcgccaagtgtggggcgatgcgtttgagactgtctgcgacgacaattacgaattccaagacaaatggtggatcattttggcatttcgtctcgtttttgtgctcatttttgaggtggctcattttttttataaattttaataaattcattttaatttaatgatttaaatttttcaaaagaaaatatttttgttaacagtgtcacttcaattttgaataaatttttaaaataatttttaatgaaaaaatcccctaattatttttttaaatgcatttttcctctttttnagttggtggtcctctcgattaaagcattatttgcttatgtaagtttttgatatttaatctaaaataaattaattgtttgaaaattatttcagttgatccctgacatgccgactaaggtaaaattatctaaaaatttataataaaaaatgacaattattttttgttttactatatttgtatttatttcagattgtcattcaacttcaacggggtagcctaaattaataattttatatttaaataaaaattttaaaaaattctaaatttaagagcgttttttgatgcgccaagcaattctccaacgccgagattcacccgaagaactaaaagcggcagatttggaggaaaaggaattgtcacaattgacaactgataggtgatgaaaaaaaattggcaattttaaaattttgcgaatttgcttaacaaaattcattaaaattccaaaaaaaaaactccctggcggcatttaaaaaatgtaatattggagtgaaatcaattcctgtcactattagtgccgattatctattttggattacaaatacttaatttaaaaccgattttgggcataggcgcaaatgtcgggaacagtgatcatttctatgagaccaaagtttaataatattttagtgaaattttgggtaaataatgggaaacgggaaatcattgtggtgtttttcgttccccacccccctcgccgagaatttttaaaatttttgtcacaaatttttaagtaaataaaagttttcgaacttggctgttgaaaaatttttaaaactaataaagtaatttttgctttttttcccaaggccaaagcttggcggcagttggcacgacattgactcgctggcttatcaagcggatgtttgcgactcacaaaagagccaaccagcggaacaacaacggcggctatcaaatgccggatatgaaggactgttttccagacgtgacgcgcccgcactgtccccccgagcatcatttgttaatgagctgccattaagcatggaggaagctgacaccaatgaaaagatg

SEQ ID NO: 82297 - DNA, 839 bp, Heterodera glycines
atgagccacccaatttggcaaatcggtctttttaaacgcattaaagaagattcagtcgattgcttggagtgtaagcaaaaaaacgttattaatttttcatcttcatcattttttggtttaaaaatatatttgaatacttttttatactttgaaagacttttttattaatacagaattttttgaaatttcctaaaatccgcaatcctgcgcaggatcctgcagattttaaatgcaggatttgcaggattaatcctgccggatcctgtcctgtaaaaaattttgaattccaatcctgcaacaggatccgcaaatttgaaatttccggtctctagttcatacatattcagcagatggaaaatttcactgcctggtggaatttttttggtagattttatctaaaaaatttaaaatttatttttggacagccttgaattttgaaaattttaaccatatgattatggtatgacatttaagaaattatggaaatgtatgaaaaggtataacagacattgtttttttctttattccattctttgtcacctttcttccacaaatggacttgcctttttttaattgcttgtcaactttctgtccatattttttgtattcaggtactctgtcaatttaatttttcaggttttctaattttctctttattctatcattattgcattttttgagaattctcggtgtaaaaattcaatttaatttaaaattttttttataaaaatagcttttttgaaatatgtgatttacttttttcaatagttaaaagttaacaaaaatatgtccttatattttttgaccttacaaaaatttttaaaattctttagaattta

SEQ ID NO: 82298 - DNA, 282 bp, Heterodera glycines
atggacccaaccctcgtggaaattgaacaaactccggaactgaaaagcttcattaaatggctttaccaacgtcgtgagtttcttcagaatcatcaaaacagaaattgtgagaaaaatgacaccgacgataaaaaagtaaaattaattaattaatttctgtttaaaatcatccaattattatttaaggaatcagcaattaatcacgaagcaaaatgtgaatcatttgacaaaggcatctcttcttctaaaagtcagttttgtttttgtttttcattttctata

SEQ ID NO: 82299 - DNA, 1178 bp, Heterodera glycines
atgagcgacttcgagattggaatgctgaaagcgatgcgtcatgtcttcccgtcatgcgaacgctcgggctgcagcttccacatggcgcaagcggtgttccgaaaagccagaagcatgggcatttttaatttgttgaacgaagatgacaacgaagcaccggttcaaaggaaatccgttcacaaaacattcaggtgtctttcattagcttatgtgtatttatttgttttttcaatcagatctgttctctctttggcactcattccgccactttacgttcggcgcgctttttgaactattgtcagcgcggcaccgcttggagttcaaggatggctggcgtattttgccaaaacctacattggcactactcaattcgagattgatcgcggggcggaggcatttgaaccgcatgctgatgtcggacactttcttctgcgtcgcactcgaagcacaactcgtaaatgcacctattctgtcatgaaatttatgaaatttttcaattttagcgttcagtatttcccaggcatccataatgacaggcagtggaccaatacaattcggactgcattcgccacaaccttcaactccaaccattccattgtcagaagaaagcagcttgcagcttattccacgctgggaacaagacatcgtctgtcctccacgtttcccgatctcgttttggaatgtatacaccagggctcaaatggcaattgagcgaacgaacaacggcatggaagccgcgcatggacaatttgcaataaaaaatttcatcggaaaacattattttttggtattttcagcgtgagctcaaccatcatccatcattgagtgacttcattgctgcattcacgaaggacatcaacaaacagttggacatcggacgcgcagaacagctccagaaaagcactaaacgacgacaacggtacgtcatcaaagaacaaaatgtggtgcggatccttgacgaggccgactttgaatcggaagaaggattgacaaacgccttgcacctgctcgggatcgtgatgcaaggctttgcggagggacttcacgtccgtggaaattcagagtggtgaagaaactgaggccgatgaaaattgattttaaacattttcatattattgttttttttattgatattttatatattttatgaagatttctttgcttgaagcacttttata

SEQ ID NO: 82300 - DNA, 266 bp, Heterodera glycines
gaagcaaatactgatgaaaacactcgtgcagacctacagcgctggggccgacttcacgcggtgcgcactgtccttggcttaattgccactggcgtttatttatacgcagtaagcaaagaataaaaggagaaaggaactttaaatccgacaacataacataaaatgacatatttttaatgtcaattttgcatattcacaaatttgtgtgcgtacactttcaatcacatttttatatttacactttattacataaaaacattagcgtt

SEQ ID NO: 82301 - DNA, 652 bp, Heterodera glycines
atgtcacctcaatatggtaagtgatagcttatcaaaaagtattttgtaaatgactgtagaagtacagtatccttatacacagtattccgaaaaaaagaacaaatgcataagccaaagctcggaccttttcatttttaatttctgtaaaggctccatcgacttgaaaattgtactttacagtacccattaaaggaaaatcccaattacagccattcatttccaattaccgatttcttatggattgcaaactcattcaaatacaaattttaatatatttgcataatcagatttggtccgtaccgtgtacagcagttgcgccactttatgcttctcacttggcatgctgttcaacgcattcttagtttggctgatcctcaccaaaacgccggcaccgatgttggtctacagcaaattgttgttgaccccatgcatgatggtaaaaacaaagttttcaaattttagtgctctttggtgctttgaacacggtgtatattatgagtaaaaaactgactgattttaagtaggactgcttccgaacttcgggaagagaataatcggagagcgaaattccgcgaaaaaaaaatttgtcggaatggttttcggggagcaataccctcgtcgggggcgaaattttcataaaacgttggaaaaa

SEQ ID NO: 82302 - DNA, 4497 bp, Heterodera glycines
atggactcgctgaaggagcacaacgatggataccggtatattcttgtctgtattgatgttcttagtagacagatttatgtcgccgaagctgagtcgaagaagagtgagcatatgattgaagcgtttgaaaaagttttcaaaaaggcacaagtgctgcctaataaaatgtacagcgacagtggcctagaattccaagccaaacgaatgaatgagtactggctttcaaaagatatcattaaacatgtaatgtacagccctcatctacatgcaggtgttgtggagagagcaaatcgcacaattaaggaaagactttaccgttattttagcgaaaaaaacacacacagatgggtagacattattgataaaatagttaaaaacctgaacaattcagtgaaccgtacaacaggaatgcgtcctgttgatgtgaattttcgcaatgcaacagagctgagaaatcgtctatataaagacatggaacaacaaaagcgaatacaaaaattcaaaattggtgatatcgtaagaattaccaaagagaagggagacttctccaaaggatattttccaaattttactgacgaattattcaaaattgttcgggtaaacccgaccaatcctccgtcataccgaatcagtgatttagaaggtgaaaatataaaaggtattttttacgatcaggaactggtaaagactgttgctgctgaacagacaactcatcgagcagaaattttgaaatccagggtgcgaaacggtgttaagcaacattttgttcgttggataggttattcagaaaatcacaataagtggattaaggattcagatctcgttcgttaggcatggacgatttttatattgtactgccatcaaatgttccctttccgggaaatacggcatcccattttaccgtaagacttccacataccttagagctagactcaaactggtccgttgcgctttcctccatcatctatccacactcgttcccttccgtaggggtggatgaggacgactttgtcaacataaaacttctcaatcctgactataaaccagacggtacaggtccgactactgtaactctgaaggtaaaaattccaagcatacagtttcacagcgtagagcatatgcaaaaatcattgaacagcattattcaatcggcctatgatgtaaagtttccaaaagaaaaaagggtaaaaagagcggcggctgcttctgcagacaaagaattggaaccagaaacgcgaccagaaccggataaggaactgacacgtgaagtgccttcatctaaaacattggataaggaactgatacgtgaagcgcctttaccagcaacacatgacattgaactacaacgtggagatgagccaaaaccatcggagaaggaactaggacgggaaacagaaccagcgcaactttctgacaaacaattgggtgaattagaaggtgaaaaactgcaaaaggaacaactgccacccactcccattgttgatcatggtgaaatatctacgatagaccaagagcgcatggacttagccaaacgagtaacggaacaatcgtggaaagagaccgttaaattggctgctaatgcagccgatatcgcggaaaaggctaaaacagccctcaaccgagctgaacaagcccgcaaacgggcacctaatgctccacatgtaaagaaatggttcgacaggctatcaaatatggagaataatttgcgtgaacttgtggaaaagatttcacaagagtcgaaaaaggcggccgaagcaaaacggaaattagatgtacattatgattccaagaacttgaatgaatgccgtaaacatgcagatatgtcaaaacaagctcttaaaaactcgaaaaactacattgctcagcttacacccatgtattttagcacagtacctgaggatcagcttggcgtgaatgagcttgcaaatcgtgtagtgacggcagtgaacaattttttaaatgcagaattaacggttccaaggccggtcaaagaccctcagctctctgccgggcaaccgaaacagcagcaagaaaaacaaatggaaaagctgaagccaaccgtagaaaaggaagttggaagcataatcaagccaccagttccaaaactgtctgatgaaaaagaaacgaaacgcgaacctacaaagccaaccgtagaaaaagaaatggaacgagaaccagtaaaaccaccggaaaaggaattggagcgtgaaagcccaaaaaaagcggacaaagagctggaacatatggtaaaacaacagtccacgcaagaagacaatttgttagaaaaagcaaaaaaggaaatagaccaaacagcacagaatgcagccctaaaagctgaatatattcgcacactagttgccaactcaaaacataatagaggcgttgcagaaggtaggcttaacacatattcaggtgtccctcaattcaacgaatggcttgaccaaattgttgaattagataagaagatagacgaattggcaaaaaaggtaggaaatgaaccgtcaaaggtaataaacgctaagcaacaatttgataaaccttatcgaatgaaaaatttgacagaagcgcgaaagctaatcgaagctgcaaaaaatgcgtttgaagttatactaaactattcactggaaataaaacagttgaataataaaatgcatgaattaaatgacaaattcactgttgcagtcaaagagaaggaggaagaagaagccaaagaaggtgcggcgattaatatacaacaagaaaagaagctagaaaaggaaattcctcaagtcttaaaggaactggagcgggaaaaaagtcagcatgatattaacaccactgctgagaacacggaaaccgaatttccctcctccgaatatgaaattgacgacagctctgagaagcagccggaacgagcggaacaacaggcagaggtatcgtatgtattgaagaaaaaggaaggaaaattggaagaagaaaaaattgaaaccaaggatgataccgccattaatgaatttccatctacagaatatggaatagaagagagtgaaacggaggagacagagaaatggtcaccggatcaagccaaacaaaaaatattgaaaggaaaagaggagccgtttgagcagcccgatggccaaaaagatgaagagacaattttagttatcggtaccgataaaaaaggggaagaatttccatctaaccaatatgagattgaagataattattcatcgtcgtcatcatcatttattgcccaaaacgaaccatcggtaacgaccaaagatgaagaaggattgttaacggtccaaattaaaaaactaccaatgacaggggataatgagcaaaaaacaatacaaatggtaccatcagattttccttcatataatgacgatgatagcagagatactactgtcaatgaattgtcagaagaacagcatgcttctactgttcccgaagattcgaaatcggagccttatgatgtagatgagctcccagatctgcctgatcctcaagcgctttctgccaaggggagaggaggtgataaaaaaggagtaacttctgtgtctgacagggtgaaaatgctcatgggtcatcagaaacagcaaaggaaagcagtagaatttcttttcaatgagataactcaaagattttacattaacataggtagtggagtacaacatgttgatgcgagtagccatcttgcatatgtacttggatttgagaacactcgactgtactataatcatccggccaaatacttaccagatctgtcgggtggtgtaaggcaattgtatgtttatgcaccaaagttggtggaagatacaattattggagaccgtatggctccattgttgcgcgttgtcaacgtgtcaggcacagttcctctggacgtgccagaggttatatataccaatgagttttttaaaccgatacagaacaaacgaatttccgaaatcaaaatcgaaattcaaacagcgtttggacgttacattaaatttaactggggtaattgtgttctaacacttcattttaaacgaaaactattttaaaatgactcatgtctttttcaaccctgactccatcgaatggtcaacatttctagcctcgcagcaagaaggaagaggcgaacagcagtattttgttggtacacgttaccaacgcggaggcggtcttctgcaaaatgtagcccgatttttgatgccagtggcatcaaatctactctccagtgcatcgaaggagggaattgctgcaggaacacgtgttcttggcgatttgtcccaaggtaaagcattgaaagaatctcttgaaacgcatgctaagcaaggtttcgaaaacctggcaggaaaattacaacaatgtgggaaaggtggaaattatggtgccgatggtagaagaggacaacgagtgtcaaaggttaaaaaagctagtggcatcagctccagtgattctattattggcagaattgggactgttaaacgccgacggaacaaaatcatggatcagttaagcttcccttga

SEQ ID NO: 82303 - DNA, 482 bp, Heterodera glycines
atgcaacgagcaatcaaatattttattgactattacgccataaacgacattactcaactgtatgctctgttaaaattggaaatcgactcacacccgtccaactatttcccaaaccctctgctatcagtctcctgtgttcatattgtgaacaccgagttcgaaaatcaaccggtgatagtggaaggaacgcttgatttgatagacgagctgctcttttcgacatgctaccccaagacgaggcagggagtcggctggtaagtgagggattaatgtcaattatttaatattttttattcaggagcgaacctctgtatgtggaactgacggatctaatggtttgtccgggcgatttgccaatatgtctgtcacacttcggacaacggaaggaacgacgacccagcttgatggtcgacgaactggattggcacgacagcgacgacgacgccgcagacgaagcctggtgaaagtgttatgcgaattca

SEQ ID NO: 82304 - DNA, 3014 bp, Heterodera glycines
atgaacagacacgatttttgcaaagactacgaggcattcaatcgtctggtatcaaacattggtcgaatgcaaactgcagttgaagagctgatgaatgcgtcgggcattcaaaaggaccagacttcttatggaattgaacatattcagcaggttcaacaatactgggtatgatgtataacaaaattttaatcattaagtgttagaaatatatttcagaatcgtgtttttcccgggacataccgcttagttttgtttgaagacagaccagaagagttacctcggccaatatggaaaggcccaggagggcatcgttttaacgtcacactttttctatccagcgatcattatgacgtaatcaaaaaaattcattgtttcttcaaacttggtcggaaatattgcattgagtgtgagtgcacgtacactgttgacgctaaacatacaatgcattgtaagagcagatgtcctcaatgtgctaaaggttagaaaaataatgttaatattttctataaccaaaatgtttagtcggacctcaacatccatgcccgaaacaagacggtgtccaaattttatgcacagaatgcaaccgttattttttttcgcgattctgttacgatggtcaccgggggacaacatgtagactctataaacggtgttcatcatgcaatagagtttatcgatcggataccggccagaagcacaaatgtaacacacgctattgtaaacgatgcaaagtgagactaagctgtttggaaaatatataaaaaaagaacaacactgtcttcaggtttatcatgcggaaaagaggagctgtttcatcaaaaaaattcgagtatcaccggaagaacaacgctatcgtatcattgtctgggatactgaaacacgccttgaacaacttgaggacgaaggccagcgtatacatagggtcaattttctttcggcccgtgttacttgtaccgattgctgtgaatcaacggaaacggacgacgacaattgtgagatttgctgtcaaaacgatggagcgttggaacgagcaaaagaatggtgggatatgattattatttaaattaaaggtaaatttcaaataacaggagtgaagcagatggcgaggatcaacctgttgccgcttttgttgagtgggttctgagggcgtggaataatgaatacaccacatacatatgggtaagtgatttatgagcaatttgtcttacaaaaaaatcctaggctcacaatgcatcgagatttgatggccatttcgcccttaatcatctttgcaaaactgcaagacgtccggatgttgtgatgaacgggctcaaaatcttcgaattccgcgtccagcatagcagaaagcattcaatgcttatttggcgtgactcctgtctgattatgccaattgcactcgctgaattaaagaagactttcaaccttgactgcgacgacaaaccattcttcccatacgcattcaacagaaaagagaactattcgctcagaatggaaaaccttccggacgaaagcgagtacgagccgggcactatgaaggctgacaagtatgaaaagttcaaaaaatggtacaacgacaacaaaaggacaccgtttttcttgcccgatgaacttagggcatactgtctgaacgacaccgaaattctactcaaagctttggtaaaattccgccagattttgatgaatgagatcacggacggatttgatgtggtgccgattagctgtaccatagctaggtttaaaaaaataaattgctccgttaacatttgtttattttacagtgcatgcatgaacatcttcaaggcgcaattcatggaacctgaacagttggcaatggtccctgaactgggatatgaaagaaacgatagagcaagcgtcctcgccatcaaatatttggactggcgcgcaaaaagtgaaggtattgaaatccaacatgcaggcaacggtcgggaaaaacgatggaagcagttcaagctcgacggatggattgagagccagcaacggtgcatagaagtgctcggctgctactggcacggttgcgagcgatgcttcaaacctgatgagcagctcattgatggaaaaacatgtcgtgagctgaatgatactacacaagaccgtcttcgtcaacttcgtgagtatgatgaccatggacgttgtctgcaagtcgaagagatctgggaatgtgaaataaacgaccagctgaagaaaaatgaaagaatgaaagcattttttgacgacatatccaatgagcgcggccctcttgaccctagacttgcatattgcggcggaagaactggcccgttacgactttttgctgaaccggcagaggatgaaaagatatccgtattcgacattgtctcactgtacccatgggtcaactacgacactgattacccgattggaattcctaccattattcatccaaacgcagacgagatgaatgtcaactggacaaaacctgaacatctacagtaccggggcctttaccgtgttcgtgtcatccctccgcgtggactgcgagtacctgtactgccgatgaaaattgacgagagactgctgttcagctgctgtcaccgatgcgcagcattgttccgtaaatgtgtgacgcgctgttctcacaaatgcacccattcggatcagcagagggccttcactggcaacttcacccacattgaactcgaaaaagcgttggaactgggctatgttgtcgatcgattttggagggcctggcattacgcagaatggagtgatcagattttcaaaggatatgtccgtcaattcataaggctcaaggttagcgaattatccaaaaaaaatttttatcaaagttaattgcacaggtggaatcaagtggatttccggaaggtgtggaaacgtcagaacaaaaacagcagtatatcgatgagtatcggcgcatttacggggttgatttggattttggtcgcatcaaaaagaatccgggactgcgattcattgcaaaattgatgctcaacagcttatggtttgctccaaaataa

SEQ ID NO: 82305 - DNA, 216 bp, Heterodera glycines
atggcggaggtgccgccaacggtaccgtcgacgaggccgaccgaagcggatggacaatccgtggaggaggaggaggaattgtccatggcggcgagcagtttggccgaattgacggaagacgacggagcggagacagtgctgaagaagcaaggcattgaactgctaattgaagcaatgcatttgcattttcgaaacattttcaatggcagaccataa

SEQ ID NO: 82306 - DNA, 822 bp, Heterodera glycines
tgcaaaaatgtgatgagtttgcgtgccaatgccatcattcgtcgctaccgcacgcgcaccaacgaatgcggcctcgtgctgaagccggtgcacttcaaaaacggaaacacgcgactccgcgtgttccccaaattcatcagcggttcgtttggcactttcaaacgaagtgaggcgcaacagaatgccaattcagaggaagaatgtctgccaatccctccggcgcagatgggcgaattgcggacgaaaaattgcagtggcggagacggcgagacggagcagcggacggtcggcgagctcggcggaattccgctgggacagaaaacgctgagtctgcgcaatttaacaagcgccgggggcagcaaacgatttagtgccattgaggtactataaaggaaatgagtacgctaaaaagaggaagagagagagagagagaaggtaatatgtagtgagagggtgagagtgagagagagagagacagcatggtagagagagagagagagagagaaagtgtgtgaggagtgggagtgagaaggggacatggtagttggttgagagagaaagagagggagagagagatgagggaatatggtagagagagagggaaggcgattacggtagagagagagtaatgcgtaagagtgcagagaaaaatttattgcttatttcaggacgatgaaatgcgtcccgtctcctccccaaaacgggccacctcccatgatggcaattttgtcgagctgttcacttcagccactagcgccggcggcgatgagccatccctcgtgccggccgggctccacctgctgcccttcgccctgccgacga

SEQ ID NO: 82307 - DNA, 708 bp, Heterodera glycines
atgcgtcccgtctcctccccaaaacgggccacctcccatgatggcaattttgtcgagctgttcacttcagccactagcgccggcggcgatgagccatccctcgtgccggccgggctccacctgctgcccttcgccctgccgacgagttcgacttcttccgatgcattggcacaatgccaaacacaatcggcgtgtctttttgccaagacaccgaatcgaagtgaaaatgccgccaatttggagtttcaccagcaaaacattctgtcgctgaacagcgcgagaacggcgacggagggagggcaaacgatgcaattttatgggaacaattcgacggcgaatgtgccgataaatttcgcaattggggcgacaaataatggacaaccgcagcagcatcaacagcagaacatcgttagtctgctgggaccatttagcggagcatcgacggcaaacgacggacaattgggacaaaatgcgacgatgggaaacgtactgacaatgacgacaaattcaatgggcggactgttcatgtgcgatcagcagaaacagcaaaacctatgggtgcagcagcagcagcagcagcagcagaaacagcagcacattcaggtgatcaacagcagagaggacatgttgatcactgatcagtggggacggacggagcgaaatccccgggattatcccgggaatttccatgcaaacagttttctatga

SEQ ID NO: 82308 - DNA, 891 bp, Heterodera glycines
atggctaacccaattgcaaccaaaaaacaaaaagtaaaattgtcttacaaagaccacctttgcaccttcgctaaaatgagttctgatgggatgacaaaattttggagatgcgagttcaaaaaatcaatttcacatagtgagttggcgaaacgtccgaatttggcttagttggcgaaatgtccacttggcgaaatgtcgtcgtgccaatcacggcccctctaactgcgaaagaggcgaacagagtttctttaattttttggagtttgattaaacactaagtaatgcccaatggttgttgagcaaatacgccatatgttaatttaaattccatctgtccaacagcatctcttcccaacattgccttgtcccatttgcctccgtccgtcgccgtgccgcgtttgtccgccgttggtgacaacgaaacgacgcggcccatccgtctgacggaaacattggcattggcaccggacgcgtcccattggctggcggacccgcattttagccaattcgtggccatcgtcggacagttggaacggcatatgctcggcattggcccgcgcgagcagacgacgcccgcgacgcaaaacaaaagcggacaaaacccaccctcatttgtgttctgaagacaacaattaactgagttaatcgaatgctactgactgattatggacatttatcagcgattgatccccaacattccgatcggagaaaacaatgagaaccaaatcagaacaatcggacaaatacgagttcctatgttttcccttttcctgctgctgctattctcgtccttttttagtgatattacatttttaattggcttttgtgtcataattaggccatattcacattttatgatttgcaattggagggctaaattttctttaaaca

SEQ ID NO: 82309 - DNA, 713 bp, Heterodera glycines
cattctgatcaatgaaccgttgggcactgaccgtcccgaaattgtgcactgctgtgacgaactgttggctcgtcagccgccgtgcaactcgtcccatctgttccaatttctcatcgacaaaattgcggacaaaatgcgcgaaaatgcggttgcaaatgagcaacaattgacagaaatggcacaaaaaagtggcgaagttggaattttattaataaattattattttgttatttttcgtgccaaaagggcgttaatcgcaaaaaaaaaaatttttttttaattaattttaagtacacataaaatctactcattttggagtggagaattgagtagatagtagagatattcattcattgaaataccaacaatacgaatgcatataaaaacaatttctagaacatggatttttgcggacctatcaaaaatttttgaattcaaaaaattcctcccctaaaaatatccgattttcacttacatccctagttttttttcaaattaaaccggaattaagtttggctccccgttttcctgctgcttatcattttttttttgttcatgtattaccattgttttagtatttggatgtgttggagcggattgacccgattcggcacaatttctggaagtacaggcgggcacagctgcaaacattggccgactcggtgaagttcaacagcagtaacagtgccagtgctgctgcagcttcggcatga

SEQ ID NO: 82310 - DNA, 287 bp, Heterodera glycines
aacggtgcccagtgacaattaccaggcacgggcgatgattgacatcgccgtgcatttcagctggacttacctttcgctggtcagtgtcactccgagttttatcttctaaattgcttctattttttgcctttttgaaggtttattcggcggatgaatacggcgaattgggggcggatgcgttcaaaaaggaggcgcgaagggcgaacatttgcatagccattgaggagagagtgtcgatgaagcccgaatcattgcgcgactcaatcgccaatttggtgaagaagtga

SEQ ID NO: 82311 - DNA, 1482 bp, Heterodera glycines
  unsure (1)..(1482): unsure at all n locations
agcaaatataaccaattagcactgggccaattatttcacttatttgtttttgggtttattaacttaatgagttttaattgaattttttattctaaaaagtgctttgacttttgtcggccaccccatcattagttgctcaaaatgttctctttgataacgatgacacttcgcactttgacccatgttcatatgttggcaaaagcagtggacggtgccgggggcgttttcgggggacaaccgacggagaacatgcgccagctgagaatccccggggatttgataatcggcggagtattccccgttcacgcgaagggcggtggcacttcgccctgcggagaaatattcgagacgaggtcagtcgagaatgttgtcgacttggaggagcgggaccggacagagaggggtggccaagaattggcaaagtgatgcccagttttcaggggcgtccatcgagtggaggccttcctctacgctttggacatgatcaacgcacagaccgacttcctacgcggctataaattggtgagtgatcggacttgttttctgatccgaattgcccacttgacttggtcagggtgctttgatcctcgattcatgttcaaaccccgcctatgcgcttaaccaatcgctcgacttcgtccgtgaaatgatcggctcatccgaactaactgattacagctgcgcagacggtagacagccgacgctgcggcacccgagcccaaaaaagagtgtggtggcggtggtgggcgcgagttactcatccgttactgtacaggtccgactgaccctcgaacggttcttactgtaactgtttcttccttttaaagattgccaatttgcttcgactgtttcgaattgtccaagtcagtccaggtaatcagaacaacttttggnttcgcttnngcctctcnnnttcnntttgctgnnnnnntcctttgnngccngcncnnntgcggnccttngcgncnnnnntcggtttgngtnttttgcgnggtnnntttggcnnnttntgctcgnngcgnnngtcttntcgcggctctnnnttgcnnnnnnnnngcgnnnctcttttcgnctcgncgccgncgctctcgngcntnncgcnnttnnttngcgnnctgtgccnnngggnntttcngnncggtgcccngtgncnnttncccggcncgggcgntgnttgncntcgccgtgcctttcngctggncttccctttcgctggtcggtgtccctccgngttttttcttctnnnttgcttctnttttttgcctttttgnnggtttnttcggcggntgnnttcggcgnnttgggggcggntgcgttcnnnnnggnggcgcgnngggcgnncctttgcntngcccttgnggngngngtgtcgntgnngcccgnntccttgcgcgnctcnntcgccaaattggtgncgnagtgngcgntggntgctcnnntcgccagcaaaaatgggaccaaacaaagcaattcgaaattggg

SEQ ID NO: 82312 - DNA, 864 bp, Heterodera glycines
atgccaattgcacacagttctgcagctgatcaagcccatccaccattgtcagaaggtacaaccaataccaatttgacaagcgataaaagtgatcagacaggcccagaaacaccaaacagtcaacggaaacggtcaagacagcgaaagcaaagctcaagcaatatccagcggactgaatttttaggatttgcatcaacagaaacggaaatagcagttatcaaacaaaaagatcaaagaaatgatcaaccaaggaatcaaagaaatgatcaaccgagtgatcaaagaaatgatcaaccgagtgatcaaagaaatgatcaatcgagtgatcaaagaaatgatcaatcgagtgatcaaagaaattatgaattcaatgagcaacaaagttatcagatgcttggactttatgatcatgatgatcaaaatattgaaccaatgtttgttgacacaaatgcaccacaaatgatcgatacaagcgacttcgatcaaattgctcaactggctggtgacgatttgatgttcccccatccgatggaggtgtatgacgagccgaacaatgccgaagaacaatttgtgatgatcccggtcggaaacagcacacaacaaattgcagcagaaagtgttggcaaaacaaaaagcaattcaaaaagtgggcacggaaaaagccgtcaaagtgctgatcagagcatgcgcgactatgcttctccatcaattcaacagaagcaaaaagcgggtcggccaaaaaagccgaaaattgacgagaaaatggaaaaggccaaatcaaaaatgggagtggaagaagcgctgatcaaaccggcaaagcacaaatcaaaaatgacaatgggaaagaccactgatgagaaataa

SEQ ID NO: 82313 - DNA, 454 bp, Heterodera glycines
atgctttattggagtagttcatttattaaaatactcgttttatattttcatccattattaccattttttggtttatatattcattaaaagatattttgaatttcttcatttttaaattattttattcttaattttttttataaaatttaattttcaagcgataacatttaaaagtagaaatcgacattttgaaaaatgcctggacctggacctggatttcctggacaaaaatccaggaaaatccaggtccaggaaaaatccaggctcctcgagacctggatccaggcctggacctggatttttttaaactcattttaaaaatcaaaaaaatgtttgaaaaattcaattaattgcttgggaacatctaaaaatatctaatttacaataataatttgcttttaaatatatttaatcattttttgaaaactttaaaaaatatcggtcacttgaaata

SEQ ID NO: 82314 - DNA, 332 bp, Heterodera glycines
agaaggcaaagcaagcgtaccaagaagcgttcgacctcgccaagaacaaactccggccaatgcatccgattcgtctcaccgtggcgctgaactttgccattctccaattcgaagtgcagaaatcaccagccgatgcttgccaaactgcccaactggtgatgaacagaaaatttgtatttcaagtttaaccgctcgaattttttttaggcttatgacgacgcgacttccgatgcgcagacaacgggcgagagtatttgcgcggagtccgtcacgatcatgggactgttgcaggacaacatctcgtactggagtggcaacacctctaagacgga

SEQ ID NO: 82315 - DNA, 1124 bp, Heterodera glycines
ttggatttgcaacgacgtttggatggacattttgcccagttttgaccgtcctcaactcggcctcaaattggcaattctttcgccacgtttcaatgcgttggtggacaaacatttcgatgccaaaagcgaattgacaatttggagaacgatcataatagacaaggacaaaggacatgaaccgaagctgtctgtacaaatggatgacaaatctttgtcatttccattgcccgacgatcgtccgttgcccagcaaaatccgttttaagcgccttcagattgagtaattcggaatcagagatttatggcaataaaagcattcattccatttttaggtacatggatcactccgtcatcgcttttcttcgttcaaatcaccaaattttcgacaaaagaggcaccaatttatatttgtggattccatcaccagacaccacggatggccagcggatttgggacattttaattcgtgaaatttggccaattttttcgacaaacattcgccacttgcgctttaccggtggtgatgatttggactatttgcttcgtcgcacttcgccgacaattttcactgatctcaatcagttggtttcaatcaattcctatgatttgttgcctgattcgattggtgatgattttgatgggccaaatgcaacaatttctgctggccaagcattgtccaaatggttgcactctccgagaaaagatggccaacccaagcgattgcgttgcgcaaattacaacgaacaaaggaacactactgattgggtcaacaatttcaatgaggtgtggtcccgaggggcgggggagcagaacaaaatgtcgccgtttcaaatcaattgtttagcattttctccgtgccaatgccatttcttccgtcagttaccaaattcatttttctgttcgtgtgcagtcaatgcaaatagtgccatttgaatttcttaacgaatggacaaaggaaaagctgacattgaccaaagaaaaggaaaatgaatgggacaacagttggataatgaagcgttgtaaaattattggggagtccgcggcggttcattggaaagacggaaattgggacaacaattgtaacaatgtgtacttttggctttttgctggcactaattgcattgg

SEQ ID NO: 82316 - DNA, 308 bp, Heterodera glycines
atggaggtagaggatgctgtgccgccgctagccgattgttggcccatcaaactgttcagcaacatattctggcccgaaaacaggtggccaaatgtgccgtcgttgttggtgccagccgctgccgcagcagcggctgccatgaggccggcgggcgacggctggagaaacggagatggttgttgctgctgctgttgtgccgcggatggagaggaaaagccattggaagtgggtgtggaggaagaagcggctgtcgccaattggccaaaagaatggaacggaaaagctggaacaggaaatgcatttgatag

SEQ ID NO: 82317 - DNA, 1037 bp, Heterodera glycines
atgcatgccaatctggcagccggcggcggcattgccgggcccaccgatctgccagccgatgatcagcaacagcttcagcagcatggtggcaccaacttcaacccgttcaacaatgccaacaacaacagtagcgtgcagcagcagcaacaacagcaacgctttgtgcgtacgccgtccgccaatttccaatgtgttcgttgcaaattggtgcggcgtttaattatggctaattaactaattaattaccgattggagaagttttaaaaaagcataaaggaaggcattagtagttttctatcaaaaatgataccgaaaaactatttgcgcttgtccattatttgtatatattcatggttttggctgcaaattgatgtaacatttaattagggtcattaattaattaaatgttggaaaaaatcaattaaaaattctgggcggactcacaatttgaatattttgaaaattatcatttttaaggtttttaattaaattaaaatattttttgattttaaattttcttttcaattaaattacgtatttaaaaacaacaacaaccacaacaggtgttccaacgttatttggagcttgtccagcaccagcaacgcgtttgctttgccggcgatgaacaccaacaacagcaaaatgacaacagtaccaatggttacagtaacaacgagccattggtgtcttcatcggcccttttggtggacgaacaaaagcagcagcagtacaacagcaacaacaacatgacgacgacgtcgagcagtaacagtaactacaactgcaacacaaccaccacaaccacaaccagtgcagcaacaacagacgcaacttcttctgcagcaactgccgcaacaatgtatgcaatggagcagagcacgcaggagttactgcgccagctggtggccgcgcattgtcaccagaatttggggccaacgccgggccatggccatggccatggcgatgatgatgaacatgaacatggtgctggagatgaatatcatcatggtgatgaggatgatcaacaccacgaggag

SEQ ID NO: 82318 - DNA, 279 bp, Heterodera glycines
atgacatcatttttttatttattgcttgttttattgagttttacacaaaaagtaaacggtaagtgccacaattacaaatgcacctaattgcgtttaattaattatttaattgactcaagcaaataattaatattcattgaaataaattaattgtagcgcttcagtgttggtcgggcattgtttttaacatttttgacacaattaatgtgaacgccaccagaaaagatgaatgtccgcgaggaagaaatttctgctcaaaaactgactgcaccgcaacag

SEQ ID NO: 82319 - DNA, 421 bp, Heterodera glycines
atgaccactccagcaaacgcggcgagggcccggagtgccaaggcgaagctgcgcgatgccaagctgaggagggcggcagctggacgcgcaggaaatgtaagtttaataaaaatcaaaaaaaaaatgagttcttccaaattttagctgctgaaaaatatgcggggcgagcgatgcgcgcatgagaaacgtgagcgccatcacgcggacgatgctcggctgcacccatccgttccatcatcgctgcttgtaccgctggctccacgaccacaccaattgccccgtgtgccgctacaacttcgcgcgcaccataccgcgcagtgagcgtcgtcaaccgctgtgagatgccggaaatagggctaatatttttagggttttccttttttcataaagacataaaataggaatatgtgataagaataaa

SEQ ID NO: 82320 - DNA, 909 bp, Heterodera glycines
atggtaatcgaaaagattgagcccgtgtttggtgccgtgtcttttttcactctgatcattatttcatttgttctctgtggtggctttttcttccgtttctttcattatttcggtcccttttctcgcctcatttcgctcctccccttttctgcttcatcttctgatacttctcgcccgacccgagcatcatgtgagtgttgcagaaccaaagcgggccgacgtaacgacaaagcgaatggtccaaagcgcaggcgccgacagtcagcggaacgtcgcaaatggcacatttaaagcactctctgtgcacttcaaaagaacaaaacaaattaagcgggaattagaaaaggaattttatttatttattcaagtaataaaagtccaaaagaagggacaaaggccgcttatactttcggaagagaatgatagtccgggaaacatgatggtgacagatctccaacttgaaattaatcttgtaaaatactttttacttttttcttgaaggtgggcaatgaatttgatattgaaatatctgaatttttgcagatttcttgtagatgttttgtggttctgttagtaaaggagtgctctgttttggtaatttttcgtttagttaccaaaataggaaaaggtgatcttcctatttgaaaaattataaaggttttttgggttaaggtgagtagtatttttgataattttaaaggctgttatgatatcaagatattttctcctggtttcaagcttggaaagttttagaaattttagcctttcgctgtatgagatgtaggggagacagcattttctgaaaacattttttgtaaagtttttctgaaaattttccaggcgatttatttcttttttggttcgaggattccaaatttcggttgcgtattctaaaaggggtcgaataaa

SEQ ID NO: 82321 - DNA, 86 bp, Heterodera glycines
atgagactagagcgaagcgaaaaaggccgagggcccgagtacctggtgtgcgaaacctgggaacccgaaggaaaaagaggcgactg

SEQ ID NO: 82322 - DNA, 2702 bp, Heterodera glycines
  unsure (1)..(2702): unsure at all n locations
atcgcacctcctgacttaccaagattaaatgccgtagaattgaaccaacaaagcagcgggaataaaaatgggaaaacaacaaatggaaaaggccaagccggggacttatcgcatagagaattgtcgaaagtggtggtcccgagttgttataatgttattggcgatggtgattgcttctacaggtaaaaacaacaagacagccagctgatttattttcttcttacagatccgtttgctattcaatgtttcgagttgacaaaacatcaaactctgacgaattacgaattgctgtaggcaatacccttcaagcaattgtaaataacaaagaatatttcccgaaaaatcgcctcaaaaatcacgaagaatttgtaagagagttagagtatgcattgttggagaagccatcaacagaatggtttaataaaaatctagaagcatatgccaaattcgtggcaataccggcacgaaatggaaaaggccgatgggctcagcttgaagatgcgcgtcttatttctctttttctaatgcgacccgttgtaattcttcatccaattgcggaaaagaaggtgcttgtagaactacagccaaaatatgacgattcgtcgataatgagacgcattgaagtttatttcccagacggggaaacaatggtatgtttttgttcaattattctggatagagtgaagcggggcctgggaacttttggaaaatcgggaccggaacttgccgggacccaaaaatcttggctctcggaaccgggaattgcaatttcaacgacaaacagtagcgaaaagtctgaattttcaacccaaagtttcaaaacttgaaagtctccgaatgaaacttttagagttccaaaaactctcggaaaattaaggaattataaattaaattttcttttttaatttaaccataaaaaggtaaattttattcaaagcaaaaatgatttatatttatttcttaaattcttccttttttgccatttccatcatacatattcttcactcagacccccattcctaccagtgcctattttcctcgggttcccggtttgcacaccggtactgggccctggccttttcgctcgctctagtctcattctaaagaacaattttaggcaaatagtgactttattggagttgagaaactgcacaattttgtaataaaatgccagtattgtgacactaaaacaatatgccaaaaatgtaaggataagcgtttggaaagactagttgaaaatcctgtgataatttggtataatggaataaaccattaccaatccatcgtatttgatcagaaaacaaaaaatgaattaccggttggagaaagcagatatgtcatttatccgagtggccagtataaaattatttttgcagttggcccttatggtgaggattatatttgatttaaaatgtttattataatgtagcattaaaattgaaagatcatataatagagcaattttataaaaatgaattgtgcatttgttgtttaagacggcccaaaacagtataatcttttgactgacaaagaaggcaatctcgaatggaatttctacaaaaacatacacaacaataattttttaaaggaaaattacataagcactaaatcggcagaaaaaataacgattttggcggagaagggacccgataaacgtattataagcgaatttgttaattacgctgaaatgaagaaaacgatggatgaaactaacggacaattatgcaattcaactttcatcaattttgacgcacttacggtatgcttgaatcacaagcaaaagtgacttctttgtgaaagtagggatctgtgtgagtctttcttagttaatgcattttggtggcaaaaaatgctataatattgccaaaaataatgctaaaatgttgccaaaatatggagcacttattaaaatcttactgcttagaatttttcaccgtaaacaaaattctgataaatagttaaaaaatagaataactcgtacctattaataacgtgtcaatcaaaaattcctgtctgtaatttactgcttatttacattcttccgtcatcattcagatcgcacctcctgacttaccaagattaaatgccgtagaattgaaccaacaaagcagcgggaataaaaatgggaaaacaacaaatggaaaaggccaagccggggacttatcgcatagagaattgtcgaaagtggtggtcccgagttgttataatgttattggcgatggtgattgcttctacaggtaaaaacaacaagacaggcagctgatttattttcttcttacagatccgtttgctattcaatgtttcgagttgacaaaacatcaaactctgacgaattacgaattgctgtaggcaatacccttcaagcaattgtaaataacaaagatttcccgaaaaatcgcctcaaaaatcacgaagaatttgtaagagagttagagcatgcattgttggagaagccatcaacagaatggtttaataaaaatcttgaagcatatgccaaattcgtggcaataccggcacgaaatggaaaaggccgatgggctcagcttgaagatgcgcgtcttatttctctttttctaaagcgacccgttgtaattcttcatccaattgcggaanagaaggtgcttgtagaactacagccanaatatgacgattcgtcgataatgagacgcattgaagttnatttcccagacggggaaacaatg

SEQ ID NO: 82323 - DNA, 294 bp, Heterodera glycines
atgaaagcaatggcagcccatgcattcatagaaagtttggaatgtaaggaaaagtgcaaaatacaaagataagttcaccaaacaattttaacatgcatttgaagtaatgttcggcttttattgtaagtcgacaaatgcctatattgatggcatgatgaagaaaatggagaacggcgacgagttgaagcagttgttagtgcagaacccatgtgaggaggccaaaatgaaagtgaagaagacaaaaatgagttaccaacgcgttttttgaatgattggaatgatacggtcaataaa

SEQ ID NO: 82324 - DNA, 352 bp, Heterodera glycines
atggcatgtcaaaaagtgaccttggatgaatgggaatgtgctccaccgatgatgatttatgcacttatgcagttccaagttcgtctgaaacgtacgatcaatcaaaatagtggaaaattaaaaaaaaattcaatttggaaaataaatttgaaattataattattaattaaatttcaagtttttgaaaaaaataattaaaaaaatataaaaattatttctataaagtacaatcaaaaacaatgaaaattaaaaaaattcactttgaaaacaaatttactttatttatttaaattttagggaaaaaattttaaaagtattttttataaatttaaaaaaaaattaaaatttgaaa

SEQ ID NO: 82325 - DNA, 1298 bp, Heterodera glycines
atggcacgccgacgaagaaagaaggagacgcgaaaggtgtcgtacaaggtgcggtttacaacgaaagcaaaatgccaaggaaattgtgtcaatgattccccgtttttccccctcatttcagttgtacgttcgacgggtgctgaaggaagttcatccgggcaaggaaatctcaatgcgtgcgttgaacatcatgaactcgtgagttgcggctgctgctgaaagctcaacaacaaataacattcgttttccccatttttttccagcttcgtcatcgacgccttggatcgcattgcaacggaggcgacgcgcatggcccactacgaccggcgcaagaccgtcacgcttcgcgacatggagttttcgtgccgactgtgcctgcccgacatcatggccaaacatgcgaaccaaaaggcttcggtggggacaaatttatgattagcccgatttgtaaagcacactcataattattttttgaacatgaatcttaacacccgcaattgaattcgaacaaaaaatcgtaaattctcagagcccatggggattgggactcccgcgggattcacggttcagattgcattttttgctcactgggagttttacgtgattcccggtcgcgctcccgtcaatttttcaaatcccaaatgacccaatcgccggagaacggactttcgccttaaaaactcagattcggacacccagttttttttcaaaagtccacaaagaccccctaaaagctcgaattaaaatttcaaacacctttttggcttttactttttattcgatttaatacatacagtaagacagaggcatacaatatgagatatgacatttgtaagcagtcacagcgttgaaaatggaaatcacatatacaatacgaataatatacacacaattacaaagtggcaaaatgcagattttatcggtgaatcaatttctgcctaagtgatcatgccctcggagcggctcgtcatcagttcacacacttgatattgcgaagattggcagcctcggcgtagtcctctccagccaaaacaaaccgcatcgatcatgacgagtgcattcttcggcaacttgaccacttggaagaagctgcgcgcagggtacgtgtccggattgaagtcgaaacgaggacatccatggttacgacctgtagccctccgcagcaggcgctttggacgtggtgatgggacgcatggagggagcagacatttggagaatggtggtttcagaaattaggacgttggttgtttgttcgctgaaaatttgttaattgaaaaaaaattatttgagacgaagaa

SEQ ID NO: 82326 - DNA, 1871 bp, Heterodera glycines
atgttattcggcaggaaattcaccttatttactgatcacaagcctttgcttgccattttcggttccaaaaagggaattccgatttattccgccagccgattacaacggtgggcgttgatcatggcaaattatgatttcgacatcaaatacacgaatacagcatcatttggacaagcagatgtcctctcaaggctaatagccaattatccaaagcctgaggaagatgtgttgattgccaacatttgcgtcgaaacagactgttatattaacaccattttacagtcgcaaaccgatcatcttccagtcacggcacaagaaattgcggaatcaacaaccaaagatgagacactccagaaaattgttaattttgttatttctggttggccaacgaagtgcagggaacccgaaattgcaccatttcatccgaaaagaaatgaaattttggaaattgggggctgccttctctacaaaagtcgtgttatcgttccaagccaactgcgtggccgaattttaaaggcattgcattttgcacatccgggaattgtgcgaatgaagcccttggcacgccagtatgtatattggccaggaatcgattcggaaattgagagagttgtacggcaatgtgatgaatgccaaggtgcacagaaatgtccgattaaggcaccattggccccatggacagtcaccgacaaagcatttcaacgcgtacacatcgactttgctggaccctgccaagatggatatgtttattttattctggtggacgccttttccaaatggccggaagtctatcaaatgtcttcaattacggccaagtccacagttttcacacttcgttccataatccatcgccttggcattcctgaggaaatagtgtcagataatggcacacaattcaagtctgctgaatttgccgctttttgtaaagaatttggcatcaagcacaccttttcaccgccatttcacccgcagtcaaatggccaagtcgaacgatttgttgacacctttaaaagagcaatgaaaaagtgttcaaaagacgataaaaattggaccgaaaaggtgctgctcgcttacaggacaacgccaaacaatgccattgatggctattctcccgatcaattattcttcggacggaaactccgaacgaaattggcattagtcctcccgcaagagcacaaaaacaattcagagaacattgacaaaattcagcttaacaaaagaaggaaggactactcgaacaacatggcaaaacaattcgatggacggcatggtgtcaaagaaaaagtgtttgtccccgccgattctgtcctccttttgaactataggaaccaaaagacatattggctccacggtacaattgtagagcgagtcaggaactcgcctacataccgagtccatgtaccggttcttggtcgaattgtccatcgacattcgaaccaacttcgtcggaattgtgttttcgaagagaattcgaaacataatcctggtgccggtcaacagccaattccaccagccaacggacaaactcaaaatttggcgcatcaaattgctgatccggtcgatcaacggactgatcaacaagccgcaaatgacccgccgacattggctcttcgacgatcgcagcgtaagccgaagccggtgattcgcttctcgccttccggccgctgaaggagttagaagcttgagaagggaggtgttggagatgttaaattggcgttttgacctttttaattattttcatatctgtactttgttctccacgccccaaccctcctctttgtgtttataaggagaccattcccctcctttttttgactcttccctcattcattcgtttttattattatttgcatttgtccaccgaccgatca

SEQ ID NO: 82327 - DNA, 773 bp, Heterodera glycines
atgtgcccgacttttggcggagtgttcgcagtcgcttcttccaatggctctggtaattccccccccccccgtctctctttcttttctttctaattgtatcctttttcggctttcagtgggcctttactccacccttacgaattcgtgcgattgccttttgaatggctcttccgatggttctgctgtcacacatttgcaatattcttccgatgggaatttgctttttgctggcctccgaaaggtatttttccttttgttttatgaaattgttttgtatagaaaccctcgattcaatgcttcgatttgcgaatgcctgggcatttgttggcgaattatcagagaacagttgaaaccaaccagcgctttttcttccaattggacccattcgaccgttacctttacagtggcagcagcacaggcgaattgctcattttcaattgcaaaataaacgttcaattagccgaggatgggaaggaggttgagccgacattcacagcaaaatgcagcaaaagcgcagttgccggactgaggttggatttgagtgggaataggagagaaaaacttgactaatcaatctaaagactttttcctgcatttttctcgttgccattcacttacaaataacgggttatgggtttttgcaattttttcacttagtttgaattcataatttgaatttagaaaattttcttaaaatacaccatcaaaattaaaaaaggtttttctgtctcaaaaaaaaaaaaattctttcgaatgaaacaaaaatgaataaa

SEQ ID NO: 82328 - DNA, 1934 bp, Heterodera glycines
gcgtccatgtcggttaaaattcaaattttgcctcaaaaattcaaaaaaattacgaaaaaagtcgcaaaaactcgaaaaagtcataaaaatcccaaaaagtgtaaaaaagtcacaaaaaagcatgttagaggcttcagacaaagtttagaacactttaagtcattttaaggccatttagagtcagcaaaaaaaagtcatttgacttaaattcccagccctagtcatcatgaaaatttgtccccggtgtgttttttgggtcactgatcagtgatcacgaatccgacatcaattttgacaaaaaagacaacttttaaatagcacctaaaagattagtgacgaaataaacaccttctatttttgtaattcattagtttttcacttattgtcttttagctattaatttattgcatatttaatggaacccatggaaacagagaatacaatgacaagcgaaaaaattaaaatgccaccgaaaattggcgatgcatctccaaaattaaataaatcatccaacgagccaaaagagtgcggaaaggaattcacaacggagcgcgtggccattctcgactttggggcgcagtacggaaaggtttttctctggagaattcggacaatttcgacttgctttttcccgattcgtttagctcatcgaccgtcgtgtccgcgagtgcaatgtgtgcagtgatttgctcccattcagcacaacaatgaatgaactggtccacaacggatacaggtaatataagaacactttcatggcgcatttaaatgtcaagaaaaataaatttagtgccgtaattctcagcggaggaccaaattcagtttatgtggacaatgcgcccgtgtacgacccggaactgctcggtggtcgtcttccgctgctcggcatttgctacgggttccaagtccggtccaaatgattcatatttattgccagaatttgagtgcattttttcatatttgcaatccttcccattttagctaatcaacaaacacttcggtggctccgtcagtttgcagccgcggcgggaggatgggcgaactcagatccaagtcagcccaaagtcggaccttttccactcgttgaagccggaccaatttgtgctgctcacccacggggacggagtgacaccggaaacgtcagccaaaaatgggtttcaaccaattggcttcagcggggaatttgtggcgggtaattaattaattggggttaatgaacaacaaaaacttgagaattcagccatcgaaaatactgaacggcgcatttatggtcttcaatttcatccgggtaagagaacaaatatttaaatgggaattggcaagggatttacgtattttgcaaatagttcgaacccgcactttttcagaagccgacctcaccgaccagggtattcaaatcatcgacaatttccttcgtcggatttgctcactgaagtgccattacacactgcgcaatcgcgaacaaatgtgcgaggaacgcattcgaagtgcggtgggagagaagggtgaagtgctcgttttggtgtcgggcggcgtcgactccaccgtttgtgccgcgttgtgcaccaaagcattgggcgcagagagagtggtaagggttgaaggcacggatttgaaacctccgacaaatttttccattccaaacgattattttttgttttctggcggcgattctttagcgttaagacctcccaattgactttccggctttagcatgccattcacattgacaatgggttcatgcggttgaacgagtccgaccgagtgatgaattctttgcatgacattggactgagtaagcaaattccaaaaaaatctttcaaattcacttccatattaccgcctcttacaatcagaggttcaccgcttcaactgcgtttctgattttttgtcgggttcgattgtgcagaacggaatgactctagaggtccccg

SEQ ID NO: 82329 - DNA, 318 bp, Heterodera glycines
tgaaagccgtggtggaagagacgacgacaaatgaacagggcaaaactgagacaaacgtcgaacagagcgaaaaggaggggccgatgaactgaccgaaagggtccgactgatcggcaggaacgtcatccctgacggggatttgtcacggagaatagaaacaaaaaaagccacttgcatttgcgttgttttattttgttgctacagtaatcacatagttcacctttgtagatgctttactgtactcttttcatttttctctctttctctgtccctctctttcttttctttccgcttttggcttataaattcctttttctc

SEQ ID NO: 82330 - DNA, 613 bp, Heterodera glycines
tggaaaataagttttataatacagaaatttatcaaaatttttgtttctcgaattgtgacgtctatgttttgaaaaggattttgcaggatcaaataaggctcatgaccttcaacattaaaaaagtaaaaacaaattaggcacaaatggcaaagtaccgacactaattacacaactgcaaaattttaatctcgtcttgcaatgagaaatggccaaagggtttggcctctggtgctttcttactgtacattatatcgtatactctattctcaggacgactgtcgttgctcagctccactcccaaataccgtgtcacagttggcgaaatccaccggtttattttaccgagaatttatgataacaatttttccatgccaacttctcacagacggatcaatccgcccgagtgtttgaatgcatctgttcttggcggcattctgcgccggtatggaaacagaatgccaacaaatgtatatttttaaaatttaaattttcagtgcaaagtccaaagatggtggcaaatcgttgcgcgaccaattgaagacgtacggtttggtgttgccggcgggcaggcggaaaacggcaaacgtgtcaacactgactgcattagttgaat

SEQ ID NO: 82331 - DNA, 1234 bp, Heterodera glycines
atgccggaatcggatttcctttacatccctggtatgtatattgtacattcatgcattcaccatcagcagcagtctccgcttgactacatggtggcactgaatccggtgcacacattgcaacaacaacaacaacaacagaacgcaacatcatcccaacaacaacaacatgccaacaacaacggcaccaccgtgtttatacaccagcaacaacagcagggcacttccgctagcggtggtgatgtcgtcggtgccggcaacggtggcggtgccgtcggcggaacattgctgcgcgtgttgccaccctttctccaccactcgccgcgcgaggcggtggaaatgaagatggacaacagtgatggggtaataattaaatcatttatatatatatatatatatatatatataatatatatatatatatatatatatattaaatacaatttaaaatttgcaatatggtgggcgcgagcagggggcggcacaattagagtgcccccggaaaatgcgtcagtattacggtagttctcaaataaagtactttacattaagtatttgtagtacaaaaggtctaaattgtacttgagaacctcgttcttaaatcgtcaattcattttgctaaaagcttcaaaaattcttgaataatttttgagaaattaccaaagtccgtaaaaacgaatatactgtattggattattgtatgtttgttcccatatcatttacgcctaaaattttcaaatcattatactctaccgtatcttgttttcaagaaattctaaattctgattttctgcccttgttaaggcgctttatgctattttaggagcaaagttcggactcggattcgccatcaatgaacggaggccggggaaggggtgtaaaacggcacaatgccagacgaagaggtggcggtgccggcacaatgactggcgctgaaggcgtcatccgaaaaggtaaaaaacattggcaacaacagcagtgagtgcatgtccagaaattttatggtccgataatttggttcttcccattttgatcagaaaatgatcgattctaacagtgctgatcagttaaggggatttattgttagccctgaacagaactgggtactagagcccggaatcgggaattctatactcagtcaggattttcgcttttattcaaaaattcttaatgaaaaaatctttaaaaatttagcaaaaatatttgccttaatggattaagatcaaaatctgactga

SEQ ID NO: 82332 - DNA, 1259 bp, Heterodera glycines
atgtctgacaaccgaaacgaagcggaggagaaaatggcgaaagcaatgtaaaattaaaatgccaattttcaatttcaatttttaaattttgttttccttttttcagttttatctctggcgacggttggctttgtgtgttcgaattgcttccggcttcacaacttggccttggaattgcgatgatcagccaccgttttgacttctacgtggatgaacacttcaagactcgctactggactctgagatccatgaaaatcaaaatgaagttcgaagcggatggcaccaaggaaatggatgttgtcaatgccaattgggaatcgtttggaattacgcaaaagccgttgccaaagagagtcgtcggattcaaagccatttcattgaagtgagattttgatgatttttttttctgtttgtaaaacaattccatcatttttcacaggtacttcaacaacaatgtcatcacttttctccaccgttttcgtccaattctcgccgcccgccccattcatttgaccatcgacacgtacttcgatcaacgcactttggagtcgattttgctcaacatttggcccatgatcgcgacaaacattcgtggcatccaattgtccaaagaaagtttctgccgtttgcgtcaattcgtcccgtcaattctcgacgactgtccatcacttcgcgttgtcaatgcctattccagtggtttcttcaccaaatttccatgcgatgacagtgccgaggcgtcggaaggacaggcggtggccaaatggcttttcactccccgtccggacaatgtgccaaaggtgttcaaatgctggttggaatgcggtggctggcatttggcgccaaggattgaagccttcaaagaggtgattttgatgtgattatttacctatttgccatttttacgggctttggcgttcgctgacaaaaaaaattatacccaaattggggcatctaatcgtaaaattcattcatctatcatttcatatttttccctattttaggaattttacgccgcttcatctcccgtcaatttcatcgctgtcattcgctttcgttcgtcttttgatcatctggttgtgccatttgttctgaccaacgaattgacccgggagcaattgacgttgaagaagatgaacgatatcgaccgtgttcttctgatccgttgtccgattgtgcgcgacgaaagcaaatgggccaaatgggagaaggaagcgattggatggaactttatggaccagtggaatcggatcgacatttga

SEQ ID NO: 82333 - DNA, 556 bp, Heterodera glycines
atggaaaatggaagaaatgccatgtacggaagaaatgtttggttggagatgatggatggagtaaatctcaaaggcacacacaattcataaccaacttttcttactttagcatttgaacattaatttcaatttttactgagtttaattttgttgtccttccattttctttcataattatcaattttttttttgttgtccgtccattttctttcataaacccgacggtgcctatcggcactaccggacccccagttccaacaagatttcggaaaaggcgcgccgcaaaaaaacgatttaaaagtaaaaaatgtttttactatagacgcgaccgggggaccgggacttgccgggacctgagaagccaggaccgggaccgggaccttgaaatttatttttaaaatactaaaaggtgataagctgaaaaccaagctaaaattaattttcgtgtgaattaagccgtagaggtaaggaaaaaaggcatatgccttaaaatccgggctttaataacaacgaaatattcattcaatgagacgaatgtaaaaatgaaaaaaataaa

SEQ ID NO: 82334 - DNA, 550 bp, Heterodera glycines
atggaaaatggaagaaatgccatgtacggaagaaatgtttggttggagatgatggatggagtaaatctcaaaggcacacacaattcataaccaacttttcttactttagcattgaacattaatttcaatttttactgagtttaattttgttgtccttccattttctttcataattatcaatttttttttgttgtccgtccattttctttcataaacccgatggtgcctatcggcactaccggaccccccagttccaacaagatttcggaaaaggcgcgccgcaaaaaaacgatttaaaagtaaaaaatgttttcactatagacgcgaccgggggaccgggacttgccgggacctgagaagccaggaccgggaccgggaccttgaaatttatttttaaaatactaaaaggtgataagctgaaaaccaagctaaaattaattttcgtgtgaattaagccgtagaggtaaggaaaaaaggcatatgccttaaaatccgggctttaataacaacgaaatattcattcaatgagacgaatgtaaaaatgaaaaaa

SEQ ID NO: 82335 - DNA, 260 bp, Heterodera glycines
aacattgggcgatctgatcagcgaatatcagcagtatcccgccccactgctgacgaagacgtaatggaagaagaaaaaagcgaaacggaaggagaaaaagcggacgaagcgaattgagggaggacaattcatttcatttgtcaatttaacattggacaaaatgccaatgaaaactgtgccgatcatttcgtcactgagaattaattttaaaataatataatggaaatcttgattttatattttttaatatatttttacca

SEQ ID NO: 82336 - DNA, 1178 bp, Heterodera glycines
  unsure (1)..(1178): unsure at all n locations
ttattttgaatacatattaattttggttttcttctaagcattgtctgtctgttttacccttttgcctatgaattccgactttcgtttctccgccgattatcagccgcccccgcgcctcgcccataattatgcccaattaaaagccttttcgcaaaatgtgtttcctcttcttccttatgcttttgcgccattttgtgctttcgccgcttacaaattaattaaatatttattcggcggacaatcgcaaaaaaaactcgaattgaaaaacaaaactgtgctaattgttggcgccagctcgggacttggccgttcacttgcctttgagttttacgcaaaggtcagaaaaaaaattaatgaacgattttcaaaaaattctttttctgttaaataaagttttccttaagggctccaaattgattttggttgcccgaagcatcgaccgcctaaaagcactgtgtgccgaactaatcaaatggggggacgaaaatggcgttgaaaatgccaatttgcctgtcttccgctatttggacatttcggaacttaacggcgatggaatggaacaaataagggaattatgcgaatgttcaattgatgggaaaaccattgatgttttggttaacaacgcgggactttccagccgaggatcatgtgatgagacatcgatggaagtctatcggcgattgatggaggttaatcggaggaggccgaaccgaacgaggggggggagagaaaaggggagacagagggtgtaagagttcgaatcgaaatggtgagacaaaaggtgtaagggaaggggtcgaaattatccccacagaatcattttagtctacacaaaactgtgaatatttatttcatttttcaggtgaatttcttcggcttcgtggccatcaccaaatccctntttggggtgtattcccgacgatggtgccattctaaacatcaacagcatccaaggcagagtggcacttccctaccgcagtccctattcatgctccaagcatgccattcaagtaattcggctaaattcccttcttttcaaantttttttaaggcattctttgacagtctccgcggcgaagagcgaccgcaactccaaattctaactgtgaatggccggtacataaattggttgagtttttaccattcgtaaatgacattccttccattctgttatcctt

SEQ ID NO: 82337 - DNA, 1707 bp, Heterodera glycines
atgcccaaattttgtacgtggaattccaaacaaggaaaatggttattgcgaaaaaacccggaaataagtaaaacaattggtagaatgtacccagttaatccgactgaaggtgagaaatattatcttagatatcttttgcttcatgtgcatggtaaaaattttgatgagctaaaagttgtaaatggtgaaaggtataacacattcgcaaaagcatgtttggcacggggtttaaccaaaaacgatgacgaatggaaatattgcctaaaagaagcatgtcagtttcgattcccagctgcactaaggagtctattcacaagtattttgttatttggcgatccaaaatatcccgaacttttatgggaacaatttaaaaataatttatcggaagattttttaaaaaaaaattctgaaagtgttgcttataaattgtcattaacaattataaataaaaaattattacaagaaagtaaatccttagctgatttcaaaaacctacctcaagaaacaaccacaaaagaagaacaggaaaacataaactatgaagaagaaagaaaaattgcggaagatttatataaatttatgaacaacgaccaaaaaaaaatttatgatattattaaaaaagtgttaacgggtgaaattaaacaaaaattaatatacattgatggtcctggtggcacaggaaaatcttttactttaaatacgctttatcatttgattcgtggttataaaaaacaaataactaatatggccttttcaggaattgctgcgactttattaaaaaatggtagaactatacataatcgatttaaatttccattaaatcttaacgcgtatactgtttccggtgttgttaatggtacaaaagcatctgaagaaattttaaggagtgatttttttgtaatcgatgaggcgcctatggctccaagatttgcgcttgatgctattgaaaaaaaattacgcgaattaactaaaagcaatcaattgtttggaggaaaaacaataatacttgctggtgattttcgacaaacactacctgtaaaaaagtttgcagtaaaatctgaaataattgatttaacgattaaaaggtcgattttttggaataaatttgagcatatgaaattgattataaataacagagcaaaagatgaaagtttttcaaaacaagtactcgaaataggaaatggatttaatcaaaatgggtttattcaacttccaaacgaatgtatattatctgaaaattcaaatttagttcacgaaatatatggagatatatttttaaataataattttaatgaacttaaaaaccgtattattctttcaccttataatgatttaactgattaccataatgcagttgctttagaacattttccgggacagttagttagctatttaagtattgatgaagttgaaaccacaaacaattttccagtaactactgaaataatgaattcttttaatgcacctggctttcctttacacgagctaaaactaaaacagaactgcaaagtaatgttgttacgtaatattaatattgaagaaggactttgtaacgggacaatgttgcaagttttagaattaaaagaaaacgtattaagatgtgtaattctcgggggcgataaaaatggttcagaagtttacatacatagaatttctttaataactgaaagcgaattccccgttccgttaaaaagacatcagtttcca

SEQ ID NO: 82338 - DNA, 275 bp, Heterodera glycines; identical to SEQ ID NO: 71924

SEQ ID NO: 82339 - DNA, 892 bp, Heterodera glycines
atggtgcaaaaagagctcattgggaaattcgcatcgggagactatgccaagaaaccaataagtttccgtgagtcagtttcatgtttaggggagaggaaagaattagtaataaacagtccaagatgaaaaccaatgaaagttcatgggaatcgggagacgaactccacccccatcctatggatgaatagttttaaataactaatattttcaaatgggtaccgtaacaattgtttagtcggataaccattactctttgcaaaaggaatcgacgaaattacgcttgcgggggcggcagcacagaaggctttcaatcctggtccaacagtcgctgagtactttttgaagaaaaatggtattacacttaaacatccgcaattgccttgtttggtgcaaagcggcggtggaaaccataaaagcttttatcccatggaactgttgttctttgcccaataatttgaagatgtccatttctttttcattttttatttgtttatttttctataagtaaaaatttcgattgttcgattatgctaattaatttgttttattacaatattcaattacctttttacttgacttttcatttcaattgtcctatgttaatttgttacttactgttagctattacaacaatttcaaatcgtccagcaaccacgaacgtcttttcttttcagaatatgccgatcttcggcgatccttcctccccttatgacgaagccgtagagaaagcgactgcggagacgatgacaaatgagaactggacattgatgttgtgagtgcgtacggattcacacaattaacggcgaacaaattgttgattcgttgcagatattaggaagggactgaaggcggacagaaaccttaagtaatggaatgaatgaaaggcaaacta

SEQ ID NO: 82340 - DNA, 291 bp, Heterodera glycines
ctcgattcgacaaccaacaatcattgtcagaagaagaaggcgattgtcagcaacgatccgaatgtcgtgtcgagtgagcaggaagaagcggacattgcgaagggtcctttttggttggcttaaactgagaatttaaatggttcagccattgctttgtcattgcaagagggagggaagcagcagcaatcctcacaaaatttctacccgagtgccgtcgttggcacagctccgacaaggttttggcatatttcagaaccttcaattgaaatgggacaattattcaaatgttaa

SEQ ID NO: 82341 - DNA, 152 bp, Heterodera glycines
atgaaatgcatcgaactgctcgagaagtgtgaccccggggccgacccgtcgtccgaccctgccgaattgccttttctcgagcaaatggcgaaggctcaagcaccactcatcgatcagaaactcgtcaaaattgacaaagtgagcaaggacgg

SEQ ID NO: 82342 - DNA, 1360 bp, Heterodera glycines
atgatttatcacattaaaaagttgccactttgccatcgactttggtgccgagaatggaagggacgacaacaacaacagaaagcgcaacaacagaaacagcaatcgaagcagagaaaaatgccaccgaaattggggcaagtgaaaaagggaaaaattaaggacaaaaaggcataattaaggacaaaaaggcataattaaggacaaaaaaggcataattaaggacaaaaaaggacagaagaccgaaaacaaactaatttctttttagatagaaagtgaaaccgccacttcgatgcttttcagtcagccgatggaattggccggggatgtgagagacgaaacggaagggaacggaacggaaaaggtaaaggaaaagcggaaaacggaaaacaaattagcaaacaaatgaaggtgatcgagacgacgggagaagcaaaaattgaaacgatcactcaaaaaggaaaaacggcggaggaggaagaggaaaaagaggagaaaaaggagcacaaagagacaaaggaggagccggaattctcaatggacgaagagaatcagacagaaaaggaaaaagaaacggtaagggaaaagagaaagaaaagaaagagggaaaaagggagagaaagagagtgaaaaaaagtaaatttagacggaagaaagcacaacagtgacggacagagtgccaacattgccaattttgataatgaatgaacaccaaggcagtgaaggaaggccaaagtcagtgggaatagcagtgccaagcgaaacgaacccaacggcaacaacagcaacaacagaaggatcagaagaaggcgaagaagaggaagaagcacaaaagaccagggaaaacggcacgacaaaggcagctgatcagccgatcagcgaaagaaaagtcatgttgaaaagcgaagaaaaggtgcaacagcaggaggacgatgtaaatgcaacgacggcatcaagcagtacagaagaaacagcagtgactgtaaaggtggaacagcaggaggacgatgtaaatgcaacgacggcttcaagcagtacagaagaaacagcagtgactgtaaaggtggaacagcaggaggacgatgtaaatgcaacgacggcttcaagcagtacagaagaaacagcagttactgcaaaggtggaactgcaggaagatgatgcaaatgcaacgacggcttcaagcagtacagaagaaacagcagttactgcaaaggtggaactgcaggaagatgatgcaaatgcgacgaaggcttcgagcagtacagaagaaacagcagtgactgcaaaggtggaactgcaggaagatgatgcaaacgcaacgacgggatcaagcagtacagaagaaacagctgttactgcaaag

SEQ ID NO: 82343 - DNA, 611 bp, Heterodera glycines
atgtactttagtgcaagcattttttataaagtaagccgaaattaaattgtccgataataaaatccggtggagaaacttgctgctgtctgtcacaaactgctgacattcattttaacatttttttttatttgaaaatgcaaattcaatttgctttcgggttcgaagtaatttgaaaggcaaaaagtgccatcgacaattttcaaaaaaatatttaggaatttgcatttattttcaaatctttaaatttttatttgaaatgttctttcgaattttgcatttttaacttttcaaatcctttcgatttctgtccaagaatttacattttaaattttgcacaattttctcgaattcacatttaaacttttttgttttataaaaataatatttttcgagttttgaaatattttaagttaaaattcttttgaatttttcattgaatttcaaattaatgcccccataaaataaacagtttcgcatttcatttattccttcagcggatatccaaaagaaatggatatgtttggggaaaaaatgaacgaaaataatagaaaaactgagcccattcactaaaggccttccttaaagcaatcgattcaaatttaaagattaaa

SEQ ID NO: 82344 - DNA, 1548 bp, Heterodera glycines
atgccacgctttgtggtcaaggacatggagacgttgttcatcgacgaggttcgccagtccatcaatctgttgatctccaacttggagtcggtgccggtggcgcctcggcaaacaatgggccgcaaaaaggagaaaagccgaggaaacaggtgagtgccaaaatcacggggccaacaccaattaaaattatcgcgcaaaaattttggtgtctgataactcagtagtcactgatcggagaaatggctaacatatataattataatgtggagttgatcaaatgtaaatccgattaatcagcgtctcgttcccgttttaattgctgatcagtaatgaatcgtaatgaccaatttctttcgttcaaaacatgatcaatcaaaaattgttttaaattacttgttagtgaccagctttaaacacatttgaacagatttttcttttatgttcaacaacaaaattttggttcattagtgtttgacttttttgatttttttggtgtgctaattaactaactacgtataattcactaattaattaattaattacgccttaaacctcagcaaaaatgtcttaacaagaatatttgttatttttgtcaatttgtgaagtgcttttttgttcatgtttcagatcaagatcaattgaggatttgtcgttgttcaattcgtaagtttttttgttaatacaaaaaataagtaaaaaataataatttttctaattacgcttcggaaaagtttgttcgttttttgaactttttaatttttgttttaattactattaaaaaatttttgtttttaataattttaaaaattttgtggctctattaacactaattaacccaaaacaaaaataacgatttgtttgctgaatttgtatctgaataacaccatatacatttttatttgaatttaattttaagtattttaaattatttatttaaaaaataataatttttttagtttgaagcgcagaacaagctcaatgtcgttgaacaaaacagagaacggggacgacgaagtcagcctgaccaaaaatgatgtcgtgctcaatttcaacatggaggtaggtgttttgatttgatcaaagataatctataggattagggaacgattaggataagtgatctggaccatttgtgaatgattatcttcgaaaaggcactggtctgagactgtgactgatcggaaccgtttgatttaagctaatttgtaagtgtgattgcaatgatctctaatcagtgatcggctagtaagggtgatcaggaatccaagtgatcactgaacagtggtgagcctggtttgtttctggtcagcctaggagcgatcagacttctgagaattgggttgggcccatgttgactgatcattatgtaatttggcattgatttgtaccaattgatttaaatttgttttaaaaactctttaaaaaaattaaatttttaaggttgttgtgatggaagtgcagggactgaagtctgtgcagccaaatcgagttgtttactgcacaatggaagttgatggatgttctaaattgcaaacgtatgcattttaa

SEQ ID NO: 82345 - DNA, 771 bp, Heterodera glycines
agctgggcaaagtagtgatccaaccgacgccgaactgttcccggcagcccgaatggtacaaaatgacggtgccaaaaagcagtgccgacaaaaacttgaggtccgtggcttttgaaattaaaggtgcaatggaacaggcaaatatgagagagcctggacctgggtttttttcatatctgacctggatctggatttcaaagatcaaaacccagggaaatccatgttgccgaaaatggcctggacttgggcctggggatccatgtcaaattcgaactctagataaaactttttttttaaaccaatttgatttccagttaattttgcagaattcgtctcgcaattcgaatggaaaaaccgctgaatttggtgagtttttaataaaatttttaaattttaaaaattatttagcgccaattttgaaactcagttaaaaaataaaatagattaaaaaatttttaaaaataaaaatttttttttttactttttgaattcagaaaaataaatttatatttatgtattttagaaaatttgcggctacctttacgggttggtggctcaattaattaataaacctaattaataatgattaattaattacccctaaaaattataattttttctctctctctctctctctctcttcagaattggccgaattgcgtggaagaaatggaagcggcgcttcttctgccttgtccaagtgtcccagtacgctttcgcaatgtgcacttatcgggagaagaagtcggacccgaccgaattcagtcagtt

SEQ ID NO: 82346 - DNA, 675 bp, Heterodera glycines
cctgcaggtccgtcttaagccttcaggccaagacccatccagggacggtttgctttgaattttactttggaagtgagcggctgtcagcaggggacacctgttttgtatttggagcatgtccaagtgattacgaccattcgttttgggaagcgaggcgacttgaaattgactcttttttcgccgatgggcactcgctccgtccttttgccgccccgtccgcaagtgcgtcatcctttgccgtcggtcgtaaaccttgaaaatcgtttaggatttcaatcaaaatggcttccacaagtggccattcctcaccgtgcaggtttatcttaatcttggacattgttatccgtctcattgtcaatcaaatctcagatgtggggagaggacccccgtggtgtttggacattgctggttgagtccatttccaacaacccaaacatcggaggtatcgttcgccattgtgttccttgtttagttttgaacttttgctttcaggaatattcagtgactgggctctcttgttgtatgggactgaggagcctgcccagccaagcgaccagcgatacagtccctacgccccgtcggcgtaccgtcgtccgggcattgggcaggccctcacttctcaggtaggcggcttccgtcggcgtgttggtggcccctccttgccttttcaaaagc

SEQ ID NO: 82347 - DNA, 2875 bp, Heterodera glycines
atgtgcacaaaagtgcaaggctttgcggacaaagccagtaagcatggcatggacgagctgatacaggtgagaaaaatgctgatcagaacactgataaaaatgccaaaatgcaataaccaaccggtgatccgagaaaaaaaatacccaagtgattgggaatagattgagactgaccaagctgattggagacataaattttgacaagaatattattcaagagtcacaaatgctcatcagcttttatacgggagatacagtaacttcgtttaaaaaattttatcgataaagaaaaataatagggcaatcaattttaatcaataccttattatttgatctatggatttatccaagacagacacataaagaaaatgagagagagctccataaatgttagaccgattattcttacggtacatatgtgatatactgtaattttctgccaaattttgctacaggcggaccctgtccaaattgggcatgaccatctgtttgccaagctgcaatcgctgacgttggacttccgtctgaatgagcacatctgttcgctgggatggttctcgcctggccaagtgtttgtgctggacgagtactgtgcacggtgtaagtccaacgggttacggtaggtgcctgggctgttgatgatttgcttggataatctcttgaccgaatgttgctgtcaatccatatcattcgagatttggtcgagattttttgaaaatttccgagtctcaggcctgagactccaaaaaaagccccaaggcgcctttcaaagactcgtgaacaaaaggcctcgaaaactccgccacaatttcggcctaagcctcgagaacgggaagcctaaaaaaacacctagacactttaagatatggccaaactcgagatgaacacctctaaaaatccggcaccctttttcaacctaggcccaagaatgagacccaccgagacttttttttggcctaaaaccgggaccatagctctgaaaatgcatagattttcacggaccgattctcgagattttccagatatggtgcgcggatgccatcggcacgtctcgttgctcaacgatttgttgaacaaagcggacgatggacatttggtggacccgacacttattcattactcattcgcattctgtgcatcccatgtgcacggcaatcggtgggcaaaatgccaaaaaactgggaatgaaagtgccagaaaattgtggaaattatttaacttatgccaattcgccatttcaggcccgacggtgttggcactgtcacattggaggagaaggagaagttccaggacgtgaaggagcgcctgcgcggtctgctcgagaaacagatcaccaattttcggtacgaaatctttttttggtttttgaattttaatcttttcttttagctattgttttccattcggacgccctgagggtacggtattttctcgattagattagtgaaaatttgacgctaaacgaacctgacttctattttgaccagtttttaatccctaaaccgaactttgaaaaaagtcgaaaattctaatttctcattttatgattttcgttttgttcaaatttaggttataaaattggaattagtcaatgttgatgtcagaccatgatcagggacgacaaaaaccccgcgggcgcaatttttcattattagaaattattttaccaaaaaaaaaacttaaaaccaaaagggtccaccctctctttggtttttttttttttgtataaaattcaaaggatacgatatgactttgcagcgaaaatttcgtgaaatcgaaatttgccccaaatttcaggtgcgcttaaaggcactctgtcactgttggagcgggtgctgatgaaggacgtcgtctcaccggtgccgcctgaagaagttggtgatttgccaaaaaaagaaaaatgcgaatgccgaaatggtggctaagtgtgtgtccatgcggcacacaaaatcggcaatcaaaatcagtacaattctccaaattttttttttcgtgattcgggtcctgatcactaattaacattgtcagcttgaatggcattctgatcagtttcaaaacaattgttcaacaaaagaatgccatttgcagcgattgatcggttgatttctcttcactttgatcaattcaatgactctgatcatcttcaaattcgttctgatcagcaattgcaactatgtccctgtgtttttttgccaggttcgcgcagtgatcagaaagtgcctggaggacgcggcgctggtcaattacacgcgcatttgcaacgaggcaaaaattgagcagcgcatgggcctggacgtgagcccacaacagcgcatcgaggacatgatcagggtgacggagctgtgcattgatttgttgaaagagaacgaggaacaccacggcgaggtgggcacggcacgggggggcgagagtcggagggtgggtgccgtagaacgaaaatactattttgggatcattatcgatgctagatcgtttcgtaaaatccgccattttagctattttttcaacaaagtatggtataattttgcttcaaaataacaaaattttacattcttggtatcgttcgggtagtccttattttttctattagcatgcaaaatttaaaaaaaaatttaaaaaagccataacttaaatgaatttgatttgtaatttttgcaggcccgatctcgcctaactttaggtcgcttatttttatcagaaattttcaataatttaatttaaagattggagggggtttagcgctttgcgttctccatttctatcagaaaatttttgcaaatccatcgaattttttcgtttttaaattctttaaaaatttttcaattaaattttttattttatttaaagattgacaacgttttaaattgatctttta

SEQ ID NO: 82348 - DNA, 801 bp, Heterodera glycines
  unsure (1)..(801): unsure at all n locations
atgaagcgtattatggctgatcaaaataaaaaatacaaaaaaggcatttaccagtgtaagtgcatatactttgtttttgcgtgtgttggcgttttgttttacgccaattattttttggcaatttttttcgttttttaccgtccatgtttaaaactatttcacccactcttgaagaaaattttttttttattgttgtggcctaattgtaagccaaattttaatgcgatttcattataaacaacacacaatcatggtaccccttttgttggttcaaacaaaaattacaaaaatgaattattttcgttggtgtccaaaatttatttgtcgttgtcaaagaccaaacacaaaagcgcatggggaagaaaccacgcgttttacaaatgtataaaagggcgaacaaacagcggagagagagggagagaatgcattatatgtataatatatatttttttgtatgacatatcacaacaactcattcagtgtctttttgttttgtctgtccaaatgtgtgcaaatcgttcgcctccagcctccatgaatccgtccgttccgtcgatgacattatttggggtgtgttggtgtcgtgttttgctggcagttcgtttaacgtctcagaattgtcgcggccttttccggggcggttggttcagaatgatgggcggcgtctgctgggtggccaacgccttgaacacctgctcgagcaacggcgggtgctccttgaccagaatcttccacccgtccgactccatcacctgngagaggtggaaattgaattatgatgaaaagcgaggaaatgttcca

SEQ ID NO: 82349 - DNA, 358 bp, Heterodera glycines
atggctggtcagatggtttccgacctcaccgccacgaaccgcgagctgactgcctcgaaccgaagttaccaaagacaattgttaattcatcgcataattttgggggttctcgttgcgctcaatattggtaagtgttttctcacttaatttctttatacacatatatagtgcttatcattcttgtggtttttcttgtcggaggttctgggcccactcacaatgagtgcgtgaaatgcagcgaacgatgtggcggattattacgaatggaagtgccagtgaggagggtgaattgtaaaaggtgatttgatgttgacatcttatccatttataaacgttttaatggattttcataaataaa

SEQ ID NO: 82350 - DNA, 758 bp, Heterodera glycines
atggacaagtgtttggaccgaaaagatgttctaatgtgtcgtgaattggcagacgaagcgaagggggcttttgaaattgttaagcagtataggttggatgccggtactgcgtaccgtaacgcctacactcagtcagacctcggaatcggggaattggccgataaagttaaggaaacaatgaaggaatatttatcccgccccggaccttccccaagaccaacatttaaagaccaatttatatctgattaatgtataaaagagaacaaaaaaaagataaataattaatttaaaaaatggttcaaaaaacagaaatagggacggcaattttgcttgaagctgtgaaaaaagaggcagaaagggcatggaaggaagtctcggtattggcagatgaagttgatgattattccaaatccgcccgtggagcccttaatcgggcaattaaatcccgagaaaaggccccctatgccccgggggttcgagaatggtttgtaaaattatcagattgtatctgggaaatttacagtgttctagataaaattaattccgagtctgatagaacggagtctatttggcacgaggtcgaacgatgcaaagacctcgatcaagctacgaaattagaggataaggtatttaagggtttgagtgaatcgagaaagctacacttagaatctcgcaaaattcacacaaaaattttggagttggaaaacagaattcaatctgttgtttggcgttttattgagtttcacgagtaaaaaaga

SEQ ID NO: 82351 - DNA, 845 bp, Heterodera glycines
atgtggagtgatgatcggtacagtagcccggagcagatgaaattgtgcagcaagaagaaaaagaaagttgaagaaggagaggaagaagaacatatttacccggttaaatacaaataaaaaaattattaaaaataataatattgttttattattaaaggtttcatctaaatcggacatttgggcaattggcatgatgctgattgagttcttgttgatgacaccattgttcgacattgacccagtggtgattaagcgttccaatgatcaaaagaacatttacaatgccgtcatcaacctgaataggttttgagtgaaaaattgcaaattaaattttaaataataccattttcttagatcttattatgatgcagaattggtgcaagaacccaaaagaacatataaaggctatctgagagagattaaacgcaatttccccaatttttataaaatcattaaggtcattttaattatttataataataaaatattttttcactttgaggcctgtcttcaaatagatccatatcgaagaccaactgcacggggaattgagaactttatgaaaggcgaatgcgattttaaatggctaacgctcaagccatgcgacgagggagccgcagtgaactagcaaaaaatgggcaaattttgagagaaaatgtacaaggaaagaaagttatgattagggcatagaattatatttgtgcatatttcgctatttatgtgcatatttggatatttgtgcaaattttggcatttcaaaagaaattttttagcaaaattttgtcgaaaatattgactaaattaaattttcttaaaaattgattaatttatgtctaaaaatagca

SEQ ID NO: 82352 - DNA, 207 bp, Heterodera glycines
gtttttcaatggccgtcccattgagccgtcgcggaaatttgaattcaaaaaagagcacacagagttggtgatttatccatttttggagcacgatgtgggcagctatgcgtgcgaagccacaaatttgaacggtcgagtgaaaagtgaggcggcacaaattggactggttggcaattactgaaactaattagttgtaatttaaataaa

SEQ ID NO: 82353 - DNA, 885 bp, Heterodera glycines
atgttgagcttcatctatacggaagagttgagtgaattaaacggagacaatgcaatggcagtgctttacgccggtgaattttatttatagtaattaaattaaattaaataattatttttaattagccaaaaagtacaacatccctggtctagtcgatccatctttgcaaattccaattttaaaactacgcaatgttttcttggcatatgcccaggcctgccttttggaacgagacgaattgcaaatccgtggagaaatttcaatttggaacgctgtaattttactataaataagaaagaaattcaataattcgttattctcattaataaaggcactttgttgtgcagacgcaaaatgccgtcaaaatggcattgaaagttcttcagaaaatcgtcgtgccattctcggtccagcacttttaaaaattcgcttccctctcttctcaaaaaaggaattttttgataaaataggtaaaaaaaatattaaatttgaataattttcatttttctataatttttcagttccttcaaaggttttaacagccgaagaaaagattggcatttatcagttctattgtcaacagaattttcgtggaatgtattctcaactatttcacccactgaaatttccgagtcattggcgaatttggacatttgggacaatttcgatgaaaattgaaaaagtgtccgaatttgcaagacatccaatggagagttacagattcagtgacgataccgtatacataaagggacttttttggaaaatattggcacaactaaaagcgaagacgaaaagaaatgacaatgaacctttcgaattgtcttgcaaaagaaagtggcggagaattccattggaaaattctatgacctagtttttaacaataaa

SEQ ID NO: 82354 - DNA, 869 bp, Heterodera glycines
atggaagaaaataaaggaaaatttaaggaaaacaatgaaaaatgggagcaaatcattgaaaaactgaaggagaagacaaagcaaatggaggagaacactgaaaaaatcaaagagaacactgagaaaatggaggagaacacagaaaaattggaagaaatcactaaaaaattattggaaaacattgagaaaatgaaggaaaatacacgagaaatgaaggaaaacgccaaaaaattgaaattggaggaaaagggtgaaagattggaggaaaatgccaagaaattggaggaagacggtgaaagattaatggaaaatgccaacaaaatagaggaaaacggtgaaagattggtggaaaatgccaacaaaatagaggaagacggcaaaagattgattgaaattaaaaaaaaagaaaaattcaaagaaaccgctgaaagattgatagaaaacaataagaaattgttggaaattcgtgaaaaattggaagaaaacggtaaaaaattgaaggaaaacaatgaaaaaatcagtaaagaaagaagtgaaaaactgaaagaaagcattgaaacgaataaaaaacgccaagaaaaatgggaagaactcaaaaagtggaaggaaattgctggcgctgagaaatggctgggctttttcctattgtacgacgctccaaaagacggtaaatgaaaattaattgggcaattaaaagtgctaattaactgattaattggttttaagactccaatttgggctgcgtttgttcggcaacccttcgaattgtctcacaaaagaacgaagtgcgcgatttccagcacaaattcaatgacgtaacaatgaaagcaagcaactgctggggattctccaatttcatttcttttgcg

SEQ ID NO: 82355 - DNA, 736 bp, Heterodera glycines
atgcagctgcttctcctccgcaaaattgccctgctgagggtatgccgaggtgaccggctgctgttgctgaacattcattgctcaaatgttgtcaatttggtgcacaaatgaggttggaaaaacaggatgaagtaaaaataagtttgtccaaaagtgacaaattgggcatagactgatcggtaaaatgtaaaattggcactccaaacacctaaaactgatcagagattcattgcatagagtgatcggaaaatgcaaagagatgatcgggaaaatgtaaaattgatatttccaacacctaaaacggatcagatattaaaatgtggatgttaactgatcggaaaactgataattaatcggaaaaatgcctaattgggcattgattggaaaaatgaaaaatggacacactgaaaacgcctaaagctgatcagagagattcattcaaatttagcatagagtgatcgggaaaatgcaaaattgacactcggaactgcaaagaaaaaactgattataggttcaaagtatgatcggaaaatgaattgtcataaacaaatggattctaaacacatttaaacgttaaatctgatatcagatatattcagattgggcctagactgatcggaaaaatggcaattataaaagtgtaaacaaaaaacaacaacaaaaaaaactcataaaaactcgattttcactgattatctccataaacatatgttttttgaggaaaatgttaaataaa

SEQ ID NO: 82356 - DNA, 1520 bp, Heterodera glycines
cctcagcagggcaattttgcggaggagaagcagctgcatcccaatcacaatgtgtataggaaaatggaacgactgatcaggtgaagttcaaactgatcatcgatcaaattatttggcatggttgatcggattaatcggtgtgtatagatctgtagtggattaatcggtgtgtatagatctgatcaatgatcagtctgtgtttaattaatatgtgatcagaccctggttagggctaattcgtcaatcaatcatatgggattaatgattgatcggattgaattttgcgtatcaaatttttcgttaatctggttcattaataaatatgtgatcagatcctggttagggctaattcgtcaatcaatcatatgggattaatgattgatcggattgaattttgcgtatcaaatttttgcgttaatctggttcattaataaatatgtgatcagaccctggttagggctaattcgtcaatcaatcatatgggattaatgattgatcggattgaattttgcgtatcaaatttttgcgttaatctggttcattaataaatatgtgatcagaccctggttagggctaattcgtcaatcaatcatatgggattaatgattgatcggattgaattttgcgtatcaaatttttcgttaatctggttcattaataaatatgtgatcagatcctggttagggctaattcgtcaatcaatcatatgggattaatgattgatcggattgaattttgcgtatcaaatttttgcgttaatctggttcattaataaatatgtgatcagaccctggttagggctaattcgtcaatcaatcatatgggattaatgattgatcggattgaattttgcgtatcaaatttttcgttaatctggttcattaataaatatgtgatcagatcctggttagggctaattcgtcaatcaatcatatgggattaatgattgatcggattgaattttgcgtatcaattttttagttaatccgattaaattttcaagaaaaaatttttgaaggttttttataaggaaattctaagaaaaaaaattcaaacagtgattttttggaaaatttttacaaaatcttaataattcaccacaaattttttttaaacttttttccttgaaattttcttataaaaaaactttcttagatttttttcttaaaaatttctacgttggtaatatttttttaaaaaaacttctcgagggggggggggggtgaacgagctgctcccgctggatcagtttacaataaaatttgttcagtctgatgctgaatgttgatgatggcgtgccgatcaagacggtcaaatcgtttctttcaaagtgaatgatgcttttggcaccgattttttggcacatttaaatcaaaattttggattgccaaggattccgtcggtgttcacgggccaagacttggtcggttggctgctccaaaatgtggacattgctgaccttggcgacgcgttgcatttggcccatttgctcgcctcccatggctatgtgtttcaggtgg

SEQ ID NO: 82357 - DNA, 1516 bp, Heterodera glycines
ctgatgaccccggaggagttgaccaaccccaacgtggacgagaagagcgtgatgacttatctgtcgcagtttccgcgtgctcgtccgctctactcggcctcgacccgcgcccccttggaacaacaagactccgaaggcacaaccttggacgactccaatcaatcggatataccggtgagtttggaatgggatggaccatttcgagtaattattcttgggcaaaaacttgttgggaaatcctatcatagcttgtcaggcattaattcttttttgctaggtcccggctatccaaccgttctcttttgacgaagaaccgcttgacaatgttggggaagagtgccagcaattgactctgtcgcaaatggacgacgacgacaacaacggagtgaccacggcactcacctgtgtgaccaaaacgaccacatcttacacaattgggcagcagaatgaggctgatgacgaggcaggcatactttaacccaatacaaacaatgaatgaatggtctaatgccacacggacagaccattctgaaaatgggaccaaattgcacccggttaagtttttcaaagtaatttcaatttttctgatttccctcacgaatgggagggggagcgttcgtgacatatgagggacggtcggagatcgtctgggtcgacttattatagcttttttcagtttccaaatgagccgtctttgcccactgacatggaaaacattccgcaacagaatcatcagctgtacaacctcatggtttgtgagtcggacttaaacgacggaattgccgagacggcggcagagccaacgactgactttgacgctgtacggatgacttatcggcacgaggagctgcaatatgagccgttggtggtggtgtcagacgaagagacggttgccctcgggacgaccgccgtacgtcctcagcccggctttcggtcgttgtgccgggaacgatccaccgaccacattgaggcggctgcaatggtggcggtggagggccacggactgcaaagctttgtgcctggtcatgcggcaaagtttgcggtagacgcttcgaacaccggtgggtcagagacgcgaggattctcagaattggaccatttgcaattcaaaagcagagttggcctgcccaaaggcgttgttcgtcggcgttgtcacttcgcatggaccggcggacaaagtgacggttgagcatgtgggcggtggctgttacgaggtgggtaataattaatcgttctattcgaaaaaaatggaattaggtatcctacacggtgcaagacgacacggaagcgttggtgtttgtcaaatacggcaaaaacaatgtggacggcagcccgtttaggtcaaattcagattggttggaccttggaatacttttttgatttttccgctttttaattccattaattttgctttttgtttttcagcgttcgtccgatgcgtttccgcaacaatcacaatgacgacgctttcttggcggaaatgcgaacagacgatgttaattattatcggatgtga

SEQ ID NO: 82358 - DNA, 1143 bp, Heterodera glycines
atgaggcaatgttcaaatgccggagggatttctcttcaaaagaaaacgccgcgagaaagtgaaaacagcgaagagaagcagaaagtaaaaaaagaacaaattaaaaataataataattgaaattaaagcaaatttcgtcaaatttttatggaaattctttttttccgcaaaatgttcaaaacaaagccaagggaagtgaatggagaaaagtgagtcggattttaagcgttagcgtaaaaaagggttagtggaaaatgcgtcagtgaatcagaatttcttggaaatgagactcggtagtattatcttggatacattttcaaaattttattaaagtaaaactgaactgacaattcagaacgaagttcttatacaattttgtcttttgtattacaataccttagaaatactgtatttattactgacgcattttcgggagcccttttaagcaattgtaaaacgaattttatcagtaattaattattcgctctaaaaaataattacaaaaatgcatttttcttctcttttttgttttcttaaattctcataaataaattctgaaaatggaattaatcttttacaaaaggaaaagtcacaaggaaatgggaaagaagcaactgacaacaaacaaaaagtaactgtggaaaacaataatattatagaaattcaaaaataagcctttaaattattatattttgctgttattttcgcttttatttcaataaataaatttaagcaaagttcgccaacacttttcgctcctcaaaatgaaaattcggaaagtgaagaaagaaaggtgaggaaaaaaggaaagtgaaaaatgtttttgcatttttcaggaattggaaagaatgggccgccaagtcgcagaaattagaagcaaagtcgaaacaatcaaaagcaaaatgaacaaaatggccaatgatttcaaaaagacaatgttggagctcaaagcctttatggagcgcattttcgatgatgaaaatgagaaaagcgaaaagaaataattattttttcaatttccgttcttttttttaaatttatatttatttcaaagcaattccatacggaaaagagcactaaaaatgtggtcaatcacaaaaaaaagcatttgtgatcaaaagacatcatttgttggcaaataaa

SEQ ID NO: 82359 - DNA, 1040 bp, Heterodera glycines
atgctggtgaaccgtgtatatgcttttaagcaccgacaacaacgagacgacgacggggaaggtgggcaaaatgaccaaggggaggaggagaaatgggctgtcgaagaggcggaggaggaacgttatgaagatgttgatgaagatggattggttggtggcgacgacgacgcggcggtgccaccaccaaatcagcagaagcagcacaatggcaaccgatggcggtggcatcaacccactggctggctgcacaggaggccagtgcggcgcagcggtgctgccgcctctgccacaactgttggtgcgtgctgagtgtggtggcgggggacggacggtcggtgcatgcgctcgacatttcttgcgaattttgaacaaatttggattaatttagttgcataatgggctccggcggtgccgatccaataggcgctatcaggaaaaatttttttgcttattttctttacaacattaaaatttaaaaaaaaaattcccggttgaataaatgggtcccgcgatgccgcgcgatgtcacagaaaactttgcttccaaaatttatttgtgtatgttcacaggttatgacccaactgtccgcaacccattgtttgcgggtgcagaatgggcagtggacgacgaacttcgcacgctctgccaccattttcaccctaccgtttccgcatttactcgagcattggttaaaggttggtcgatgaattggttcaaacggttgcagcgaatgggggcggggtcgcaaggcaaggaggggtcgcaatttttggaaattttaacgacgcatttgaaacgtcgccgcacaaaaaaaaactttttcagaatttcaagaaaatttaaaattgttttttttttttgaaaacctaattgtaagtattaataaaaactaaatttccagaagaaaaacaaaaaactggatttatttccttggattttcttaataaaaatttacgaaacgacgttttatcctgctcccatttgtcgaccccgcccccttagaaattaatgtatgatccgtttccattcttgatgcaaaa

SEQ ID NO: 82360 - DNA, 1106 bp, Heterodera glycines
gcgaactccaatccggcactctgtcggccacccaggttctgtacgcgtacgcgcacttcgcactgctggtcaacgaccggctgaactgtgtggccgaaatgttgcccgaggcgttcgacgaggcggcccaattggacgccaaatacgccgccggcggaaccgggaagaataaaccaccgctgttcggcttgccgttcagcgtcaaagccaacttttttgtgagcactctgatcattaagggtctgtgcaaaactgaacgaacaaatttctagattttcccgtaggtgcctaacaagcaccgccgggtcccaatgcgagtgcccctttttttcttttctgaatacgggccagacatgagaccctcgcccgaacattccatgtgtttcagttgaaaggctacgactgttgcattggcattgcccgttggttgggccacccgcggagtgtcgactgttccctggtcacccttctgcgtcagcttggcgccgtgcccttttgctacgccaacgtgccgcagacgctgttcagcttcgtctgctccaaccctgtctacggcacaacgggcaacccgcacgacccgaagcggtgtggcattttttaagaatgaatgggatacacatgccatgatgcattcatcctcccctcctaaattacctctccctctctttccagggggttcaaaaaaaacacacatacgggggctctgttttaggaaatccgttagattttcggatgttagtatgcttaattgtgccttcttttattgcactgcacagaagccctggcggttcgtcgggcggtgacgcggcacttttggctgccggtggcacggctttcgcaaccggcggtgacattggcggctcattgcgtattccggcacagttttgtggcttggcaacactgaaaccgggccaaagtgccttgtttatgatctgcacagatatgcaatgattttcccaaaatttcagaccgatttgaaatttcaaatgcccatttgggaatgccgggccatgcccgactggggttgggcactggagtttttgccaaatcagtggaagaggtgtgttacggacagcagcaggctgtttaacagatattgattgttg

SEQ ID NO: 82361 - DNA, 797 bp, Heterodera glycines
atgcccgccggggttgtgccgacgggcaccgttcgacgagaggacgacgaggcgctgatggacgacacgcaatgggccaccggtgggtggtgatgaacagtcaaaacagtcaattgccacgactaattatctaattattcgagttagcaaaattaatttatacaacaaattggcaattggctataatgttatattaatattattatttttcggtaattcataaattaattattaaatatgcctttacaatttactgaacaattattaataccattttattggctattagctaaaaatttaatttaaataattatttgcatttccctacaatattttataatcgatcgcctaattactcaattaaagacgggaatattctgctcaaatggatgcgttccgcggctgccaactccgttgggctccccgttggtgtacaggtgggcaaaacccggccgatttcacaaattttttgtaaaaaccgatttccaggtggttgcaatgcgttgggaggaggagaaatgccttgggctgatgaatgccattgaagcgatggccaaagcacagaaaaagtgaacagaatgccaagaaattggggaaaattttcaaaattgatcgacaaaaaattgtgttgtgattgaccctctgctgctgcttgccttttaaaaagcccaatttggacacttatatattcattatttgtcttcaatttctgaactttttttcttaatttaaatgattatttaaatatattatttttcaaagaatcaaatcctcttcttgtaatttaaaatatttaa

SEQ ID NO: 82362 - DNA, 1320 bp, Heterodera glycines
atgcccttttatttgtacatcgccggctcaccaatgctccattttgccattatgatcgaaagggtccgtgccacactttttgttcacaattacgaaagggccagcacaaaattcgccgttggcattttggctttagtggtaaaaagggaaaatatttgacgacatatgccaattcgttaaggcaactctgttggttgctttctgcgtttacgtttacttcagcacaatcattgacccgacctttgagaaacccatggtttgtttgttaattaactcattaattaatacatcatttatttgccattttaattgctttattaattaggtttattttacgctcactggtcgttacaatgccaccgaattattatatgcacattatttttttctccttctcgtcatttgcatttcaatcgccgattattttttgatcagaatgaatcgacgactaaagcgggcattgtaaaaaaggggggaaagaaaaggaggaattagtggggaacaccaaagcacaaattatttaattagttctaaaaagagttcatcccgaaaatctgagccaatccccaagtgctttgatcatttcccaacttttgaatattttaagtctttaaaaactaatttattccctccaaagctccaacaaagtgcaggactattcactgagcagaaactatcaaacaaatgaaaacattttgaccatgcgtatcattttcccgttggacttctcctacaccattttcttctccattttcaacatcctttcgggttatattcgaatcaaacgtgaacaatttggcattttggtgtacattcgcacgtacgaaacaatcactttggtgcgattttctgaattaattaattaaaatagtaattattacattttccattttggcttctcttcgcccatgccatcatcactttggtggtctatcactatttcttgagacgcaaaaacaaaaacagtcaaaaaatggagccagcagcggacgaacatgccgatttgtacttccgaattttgcatttgcaatggcacaaatagcgaaagcgaaatgacacagtgtttaatggggatgatttttcaagcttctgctttatgttatttataaagtaaactgtctcaattatggccaaaagtgaatttacaatttgattaaatataattaatcaattaatttaggggggggggggtcaatttggcaatactgcaaaagacggtgaattaaatttggcatttcataattcacattggtaatatctagggctgccaaaaatatgcacgaaaagtggccaaaatatgcgcataaatatgcaaataaa

SEQ ID NO: 82363 - DNA, 775 bp, Heterodera glycines
atgacgacattggaggctcgaccactatgtcaacaaccgcttcttcgtccatgggctcgcctttcagggtgagtgggagggcataaatatatatgcctcgggggcaatatgcctttttcgtcacagttaatttgttgattaaatttgaaaagcaatttccgtcattacacacacatttacagtaccacacttgtttgttgtttttgttcacgcatattctgaatacacaataatttacatgaattttttaccgtatcgagggcagggatggtcccaagatctctcggcgggggtgccgctaccgcaccccgcgcgacgatttttttgtttgttactttttacgccaatttttgttggcacgctttttttttaatttttggggacccaggaggggtcctgcgcggtgccgacaggcgccgccggaaaaaaaatgaaattcaatcattttttttaacagattttcacgaagaaatttgttgtattttgaaaaaattcagtgaaactttttggaaaatttgggttccggaggtctggatgggtaccaaataaggaaaaattgaaagttcagtacaaaatattaatttccattaaaaatttcgagtgggaggcgtcttggccccctccagctgggctatccatgctcggtggttttttcacttctatcaaaataagttttttgcagatttttatatgtattttaattaaattaatgaataattgaaattgagaaatttgataattttaaatttttgatggcaccgaaaatgagtataaa

SEQ ID NO: 82364 - DNA, 2081 bp, Heterodera glycines
gcactttacgcgcgaatgttcgcttggcttatcagacgatgcaacgcgagtttgaagcgaaggattgcagcgcgaaatgtttgtgggcgtgtggacatcgccgggttcgaaattttcgacctcaacagcttcgaacagtgtaaatcattcaccgcattcactaaatggaaatttagtctctgttatagtatatttaatttacagtatcctcacccaaaaaaatgtatttttagtttaaaattcgacggtaattgatttcgacagtatccaatacataaaaattttcgaagctatattagaattacataatcttatctttattgacagaagtatgagttccttatctgggggtgccgttgaattttaaaaataccgtaatcggacgggcggaaatctgtggtcattatactgtcgaaattcaattattgtttcgaaaacactttgcacgttttcttttagtgtggatcaattttgtcaacgaaaagctgcaacaattcttcaaccagcacatgttctgctcctgtctttctgtccccccaattgccccctccccttaaggttcgttcttgaacaagaagagtaccgtcgggaggccatccgctgggaattcattgacttcggcttggacctgcagtcgtgcattgaactgatagaaaaggtagccgataactgagtgagcacagaaccattcggctctttttgtgcagccattgggcatcatctcaatgttggacgaagaatgcattgtgccaaaggcgacggacggcactttcgtgcagaaactgtacgaccaacacctgggaaaacatccaaacttcaaaaaagcaaagccgcctaagggcaaacaggcaattaggggggggaggcataatgagacggagtccttcctcaacaggcggaggccgatttttcggtgcaacattacgccgggactgtccgatacaatgctaagtcgtggctggaaaaggtgccaaattggcaaaaaataagcttactttgaattttaaaattgtcagaacaaagacccattgaatgactctgtggtcgccgttttgaagacaaaacaaaaaatggcacttttgaatgccatttgggcagactatcaaacacaagtgaatcaattaattaattgataagtttgctaaatgataaactacaaaataaaaggaggatgtgcaagaacaacaaatgcgaggcaaagtgccgaaggggaagaaaaagggaaaggcgagcacattccaaacggtgtcgatgatgtacagagactcgctgaacaaattggtcaaggtgagttggccgaccaaagaccgaccaaagcgaaaaatccgccgaaggtgctaagccaaacgcatccgcactttatccgctgcatcattccgaacgaacagaagaagtcgacgagaattgaagccaacttggtactcaatcagctgacttgcaacggcgtgctggagggaatccgaatttgccgcaagggatttcccaacagagttgcttatgccgacttcaaacaacgctatgccattttggcaacaaaagaagcgatggaaacggacccgaagagggcgggcgaagcgatgtgcctacgtatggaaagggacgggacgctgagcagagacggcttccaatgcgggacgaacaaagtgtgccttccttgagcccctcccccttcctccgccgagggatcaatgggataaatccctccctccttcccccaccgttcatcattcctccttctcttccgaaggttttcttctgttcgggagtgcttgcttcgcttgaagaactgcgagatgaagcattgagtgcagtcatcgtccaattccaacgcgtgtgccgtttccatctcgcgcaaaaagagctgaagcgtcgacttactgagaaaattggcgtgaaaattgtgcaacggaatgtgcggagatggtgctcactgagaagctggccttggtttcgcttgttcagcagaattaaacctttgattaaagacttaaaaatggtggctccataataatttcaaataaaaatggattttaaatgttatttacagaatgaggaatacggtagtctacaggactctagag

SEQ ID NO: 82365 - DNA, 833 bp, Heterodera glycines
gtgatctcctttttcgctgttgtgggcggaacgaacaccaaaaagaggacaaagttcgaaatgccttcgacggagaaggaatcgtcgtccttggaggaccaaatcgttcgaactaatccagtcctcgaggcattcggtaagttcgatgatgaataattaatgagtcgatcatctacaatttatgtcaatccatcgcttttcaggaaatgccaaaactgttcgcaacaacaattcatctcggtttggcaagttcattcgcatttatttcaacaacggcggaaagctcgccggaggggacattgaacattgtgaggggagacaacacccgtttattttcacaagggtttagaccttttggagaagtcgcgcgtgataaagcaacagcccaccgaacgctcttaccacatattttaccaattaatgtccggtgccattcccggccttaaaagtgagccaatgccgaccatgccacccaattctccccccccccccccccctatagcaaaactattcttggatcgtcccgtgcattcgtacaattttattgcccaggcggaagtggccattgaagggatggacgatggggaggaaatgctgaccacggacgaatccttcgacattatgatgttcagcgaattggagaagatggacctttacgcattgatagctgcgataatgcatatgggcgaaatgcgctttaagcaaaggccgagggaagagcaagcggaagaggaggacatttcgggtgggggggggaagaaagaggaggggggagaagaagcaggaggaggaagaaaaaggacatttcggatgggggggggggggaaaaaaga

SEQ ID NO: 82366 - DNA, 826 bp, Heterodera glycines
atgatcacaaaatttaaccaaaaattatttgatttacatcatggcaatgggaagaatctacaactatctgttcggtaccaggtaaaataaaattttaaaaattattttttattaaattttttgaagccctaaaaggctgataattatttgtaaaaaattattaaattaattaaaatgtaaatatattttttttttaatttttgattgaaaagtcataattttaatattattaaaacattcaacttaaaatatttttttcaataaagctcattttaaaagcaaatttttattgcatatcgcttttttccctacaaattaattaattttagttaaatgaaaatattcggacgggtcgacaattggcaccaaatttttcgtgccattttatcaccgtttttattacatttgttatgacaatgaatttccaattcggaattataacaaaggacgaatatatgttgttattttacggatttttatttcttgcacatgctttcaatgaccttgctcttcccgttgtaatgctttggtcagtttcgattgtcaggaaaaattccgggttatttcctaataaaaaatttcaatttttttcattttttttgtctttcgcaaggtttgctaatgtattgatttacaaaatctatcaaaaattattcagttatcatccattgctgaacagaaaagccaaggcgtcattagcgatcattaaaaaattgttgagaaattcgtccgccgtttctccactcgaagaaacggcacaaccattggacactgacggaaggccatttggcgaacgaattcagcaagaaaatcaggacaaagatgc

SEQ ID NO: 82367 - DNA, 132 bp, Heterodera glycines
atgaccgaacacaactttgagcagaatcgccggaccaattcatcaattgttcatgaaggaaatgtccaattcgacaacgaaaacaacggaactgaaagagatgaaaatgaaattagacgccttctgcttcaa

SEQ ID NO: 82368 - DNA, 120 bp, Heterodera glycines
atgtcatcactttttgttcaacagccgtcgttcagcggctcaacaccgaatttgagaagtttaagcgcagctgaagaagcaggtcaacagagtgccaaaaaggggcataaaagagaaaaa

SEQ ID NO: 82369 - DNA, 1709 bp, Heterodera glycines
  unsure (1)..(1709): unsure at all n locations
gaggggagtccttctttaccatttaaaaaaataatttatgtatttttttcgctgacaggccacgtgcagcgggctcgancattttgtgcaaaacgaagtgatcccttcttcgtcccatttcgactcgactggcgaggttataccacataattttcgtgccctcaaaaaaaaattggaaaatatttaaaaaagggtgttttttggattttcttaaaaaccaaaaaaaaagggggaggggactctttgattagcagttttttttttgtcataataagtcgttataattaattccattgggttttctgagccgctacgaatctgacgcccatggaccgattcctaacccgaattcgaacaaagggccgaacaaataaactattcataatttagtgttttggttcgaattcggttaaggaattctgaatggcggtaatggaggctctactgcagaattaagcatccaatcaggatggtcattgattggacgcgtaaacggcaatagagccgaaatggggttcagatcttcaggttcttgaccagccccgcaaagcccccgggaaacggtttattatgacgaaaaaatttgcaattccatagtatttgccccctttggtttttaatagcattcaaaaaatgccttaccaaaattttgactcccaacttggcacttttgccctgttcatacagttcggcactttttccaatttgatgcttttctttagttcccctggccgtgggtgcgccgtgcccatgcgcttgggttgatgaacaccggcatcccccctgaacacggcggcattgggctaccactgacggtcaaagttggcattttcgagaccatcgcttacggcgacattggccttgggtgtgttttatatgtgtggctttgacatttcgttgtgtttaattgtgttattttagtacaactttgatggtcagtgaactgtctcaacagcctctgctggtaaacattaagaaaatgaattttctgttttaatgtaatcggaattttccccgtttttcagtacgccggcactttggagcaaaaacaaaaatttctactcccaatgttgggaaatccgtttttggcagtgcgttttaacataagggataattaaatatttgtaaaattgttttttatcttaattttgttcaaatttttagtaatttcccggggggcggacacctttttcaactttggccccaaattccgtttttattattattattttttaatttccagtcttttgcggtcactgagcccgaggcgggctccgacgtgtccaatgtgtcgacgagcgccgagccgagtgaggacggcacattttatgtgctgaacggtgccaagaaatggatcaccaattgtggcgttgcgcaatggttacatttttaaatgaaatttaattgtaaaaacaaagtcaaaaaattatgaccgatttttgtcccccccccccacccttaaattttgattttttttttttgccattttttatcctaaaatctgaccaaaattttctcgtttttttatcggggatttaattccgttagtttattgataaatatttaaattgccaagtgcaaattcgtcctccctttttcggttcttcgtgttggcgcgtacggcggccgacccggcgacgccggccaaagacgcgttcaccggtttcatcgtggaaagggacacgccggggctaaccgtgggagaaaag

SEQ ID NO: 82370 - DNA, 1833 bp, Heterodera glycines
atgcaaaatgattttgtggccaatcttcatcaaaatggcattgcctttttggcagattatgccgcactttggctgctggggttggacatgctgccaatgtataacaaacaacaacagcaggaaatgaagctgttcataagccaaagttgcagctgcaccatggaagcatgggtaattaattaattgattaattaattaccgatatttaatgaattaatattgaaaattaacattgttctgatttttatgtatacatactttttcctaaattccaagtaattttatttaaattttacatatttccaactttttgatatatattttcgtagtttttttttacattttttcgttttatatatataaattaagataaaaaaaaaatttttgaaaattctcaaaaaattaaaagttaaaattctacacataaataaattttttatatttgtttcatttgatcacatttatatttcagtttgttcaatcgtctgattccgttgggccattctttccgaaaatgccatccgccggttcggcatcttctccacccaaattaactgataaaatatttccaatcaatttaacaaataacggtgaacagaagcagataatcaaaatcaaaggcttaactgatgccaacatcagaagcattttggtggaacttttaagtgccaaaaaaggtaaacaatcaaaaaataattaaagaataaaaaatagaaattaatttaggtagtgagacgaaaacggaagcgagatttataattgggacggacagcgatttagaagtcactttaccaagggtacttaattaattaattaattaaatttaatgcaataaatattatttcatttagttgtcaaaatcaattcgaagtaaaggcgtaagattggcaactggtatttacgtgctaaacttggacattgtgctgaccaagcgttgctatctgctcagaatgaacggcactcagttgggcagaccaatttgtccattggaaggcaatttgccattggaggaaatcagtgggataaaggtgaaacgggtggacgagagtgggagttatcgtggtcaaataggtcggggccagggattgggtttgatcattgtgttaaaattatttaacgaataagtaaaattgtttctctatttttttgttagctttttctatggagaatatttatatgattgttcggcggtgccagaggcgccgccgggaaaatttttgaaaatttagttttggtatgtttacaaattttcacaaaaattgacattttttaggttaaactttgaaaacattaagaatttctaatatatttgatatctttcctctttaggtgcaaggacaaatgttgcttcttggagatcctcaagtgaacgaaaatgatgataaaataaaattcactcaagaagaggtagatctaatattatatccatccctaatggaataattaaaaaaaacatttaatttaggcgcccgaaatacgtttcgattggtgggctttgccgaagggaagtgcgccgttggactgtgctcgtctgtttgccaatgacgcaaaatacattagccagatggtaagacgacgcatttgtcgtgaggaagatcctactgaaaatgacttggatatgtcctgcacggctattcaaagcagaaaccgattttggcacggtgccaaggatgaccaacaaggggagcagaatgagaaggagcatgccaattacccaatggcacaaattcgaacagtgtacaaggcaagaaatgggataactgttggatttaaatattcaaatggcctgaacccattcggccattggttcgaaaaagattcaattttctatgg

SEQ ID NO: 82371 - DNA, 891 bp, Heterodera glycines
atgacgttgtttttacggcacactgggcacccatatggtattttataatatatttccgcttaaattaaatcggttaagacatttgctctttttccatgccgcctctccaaccggtttcaaattttcccacagtcttatattttgaatgcgttttcggtgaccaagggtgattttttgtattttaagcgatgaaatttttatataaagatcgtttttaattactagaaaaaataatatctctaatgtagccatcattaattaatgtgtatttttattaagaacctttggaattggactcaattcgaaaaatctaaaaaaaagtgaatttattggttggtccgaaggaatagggtttgatagcgatggagacatcgtcggtatgtttttttaattttattcaaacatatatttaaaggtttggaattatttgggggaccggcgacaattagaacgtgggggtatgccgaaggggacgttgttggagttggtttaaatcgttcgaacttccaaacgtttttcacgttaaacggaacacttataggtatgataaaccgatgaaaagtattttcaataaatttgggttttgcgattttgatataatttaaatttctatgagggaaaaatataacttaaaatcagtcttctttagtaataatattttaattttgtcttttttaaattaattttccacattatgtatatttattatttttaagaagactgtgcgtgcaaagtaacgcccgacatgacggttcctgtcgtttcattacggggtgctcagactaccgctaagatttttcgtggagcaccatatatctttgaatttgaaaatttatatatttaatcacaaagtgcgtagccatccgatcacttgaaaattttttaaataaa

SEQ ID NO: 82372 - DNA, 2133 bp, Heterodera glycines
atgaattctgaaaaatcagaaaaagctaataccattttggtggaagctgcaaaaaaagagacagagagagcctggagggatgtagcggcgttagcagaagaagttggtgattttgccaaatcttctcgggaaacgcttaatcgtgcaataaaatctagggaaaaagctccttatgctaatggggttcgggaattgtatcttaaaatgtcagattcaatttgggaaattttcaaaatcatggaccaaatcaatttggagtcagtaaaggcggaatctgcgtggcgtgagttcgaaagattgaaaacttttgaccaggcaacaaagttcgaagaactatcgcaaaattcattagtggaagcccgaagattacatttcgagtcccggagggtgcagagccaaatgttaaattatgaaaataggctccaaacaattgtttgggagcatatgggtatataagaacgaaaaaactaaaagggccacactcaaaatggatgggtgtttgataattgattcattttgtcatgaggacttaaaatttggctttaaaaaatataaatctaaattttattttaaaaatcctttcataattaatgccgaggaaaattttaaagatatcctcgcatccataatcgaagaaatttataaaaaggaacagggaaaattcaaaagtattctgaagatttctttcggctttgaatcgttttattgccctcttagatgccctagcgaaaacacagccgaggctttgttccaaaacatcttattaaaagaagaacaatattcacttttttatcctttggatgatgtcataacactagaagtaacaacaatcccagatgacaacaatagaccaagaaattgaatttattaagaaaaatgttacaaaaaattggaaatttgccggaaaaatacttaaacgatcaaataatcttgaaatttttgcaaataaactttttaaacgggtgaaaattttctacatagcggcatttagtgcccccgaaatcgaaaatttatacttttcattcttagaaattctcgaaaaaattcaaaaattacctagacttactatgcatgagtatggaaaccaggccttagctatgcaaaaattgaacattggactcaaagaaataaatatatttaaatgtcaagaagcagagaatttatcggacctttctttttcaaagataaatgaattccgaaaacaagtgcaaaattatcgatttgacacaaaaatgttgtataataaaattaggataactgctctaacacatttgtttagacccgaaaaagaaattttttttagtccttttcaaatagaaagaaatcgagaaatttattattcgttatttcggcatatctaataaaatcgcaacttcctttgcaaaaaaaaaacattttctttaccaatagaatcgcatgattttttgtaatatttgagcgttaattgcacaaaagaccaaaaagttttgcaagtttgaaggccattccctaattttatttgccgaatttggactaaattagtgtttcgtcacacattacaatccaaatagtttgagtatttaagaagataaaaatacgcataactcatctgccgtttttcaacttttcaatgggtatgggttccaaaacagaagttgcatggggagggggggggggggggttaacttcgacttattctagctcttacatttaaaaatatgtaataaaatattatttcagatgtacgcccaacaaaacgacatgcaaatttcagcacaaggtgaggatgtgttgcaactgaccgccgaagattttgccgcaatggatgaggcggagagacaatggcaggctgaacagcgacgccgacgcgagcaacagaggcgggacgcggaggaaagacggcaagtgaggggcgactggcacagtgacatgttgaggcggcaacatgtttgggagcaacaaaaagaggaacgagaaatcgacagagagcgatgggagcaaagaatggaggacgaaggaagaaaatgtgaagagagaagcgaggcaacccgaaagaaagagaaagaagaaaaagacaagaatgatgttaccgatcattactctttcaaatggggagaatggagaaaaaaggaaaaattattttttggaaaataa

SEQ ID NO: 82373 - DNA, 478 bp, Heterodera glycines
atgcaaacaatcgctgaaattaaaaatttcgagattattgaaggcggaagagtttttattgtgagagcgagaattgagaacgtagtacatgcggagtacagggtttgtattaaaaatgaaaaaaatatatcagtttttaaggcttgcgttttatgccgtaagggggcgtgttcatgtggtgttgagaaggcactgacaccttatttcaaggtgtccgtaacggatgatacaggagttttggaaaatgtggcgtttttcggtgtgcgggggaaaaaaaatggaatggtaatattttaagggaaaaaaccgtacaaatttaaatttaggaggagttgaaaggtttgtctggggccgtgtgtacaatgaaaatcggggcgagggtgaaagaattcggaggaaagaaggggatatattactctttgatcgatattgtcagtctttaaatctataaatacgcttgttaatttttattaataaa

SEQ ID NO: 82374 - DNA, 917 bp, Heterodera glycines
atgagccgagaagctgagccgggctggaaaattgagaaaatttcagtggacctttattgcagtgccctgtcagaccccgtgatcatccctgcccgccccttccaacactcgaacccagacattgttttcaacgagttcatgcacagacagcaatcatttggggaagtgaatttgttagaccagagaatttcaataattattggcacttattctttccctgttaaataaaattttttcattttttccctttcattattttttgtttattacaataattatttattcgaccttttttctttattaatttttcagttaaaatgtactcgtttcaaaaatattttgaggaggctctcgaaaaagaagattttttctggcagaaaaacagagcagaagtggaggcattgttaattgaggcttcaaattataaaattataatacacagggactacgaaagccgctattctgattatattgccacctatcaccgcaccccacttttctgtttctgcatgattgagagaaatttaagatttttttacgacacaggaaccgggacggctataggaagggttacaaccgtgctacatgttaccgttgaggcgagctatacaggagagggattcatttcgcctatgttttccttttggttttattgggagggcaggagtcaaacaacaaacgaatctttcacgagccgtctttatttgtacactgtttcgatgctaagagcaatgggcaaagcctggggcagagaactacttttgaaccctgttgaagttttaattgatatgttctaccaacgtatagataggttggaacatagaaaaaacaatttaaaaaaatattttagagatttggtcggatcgtggtcattgttctatagactcccaccctcactttttgacacttcacgccgg

SEQ ID NO: 82375 - DNA, 1858 bp, Heterodera glycines
gagtgtgacgtgaaggaggaattgaagaagaataaggagatgaaaaagttttttgaaagtgtgccggacaagggaccaattaatccgagggatgcttatgccgggggaagaacgatgcccttttgtttgtacgcaaaggctaccgaagaagttgagatatcaatgtttgatatcattagtttgtatccctttgttaattatggtaaaaatgtgcttgctttttttgctaatttccttcgcttaagacaccccataccccgttggagtcccgaaaattgtagtgagcaggaattttaatgtgaattggacaacacccgacgacgtaccttatgatggactgttgaaagtgaaagtaatccccccgaaaaatcttttgtaccccctcctccccgtgcacatcgatgaaatgctcctcttccctaattgttggtcttgtgcgagaagggccaagaatgaatttgtgatgacaaaagatgtgaaaaaatgtaaccatcgtcccacgcagagagcatttttggggacattcacatcaattgagttgcggaaggctttagagctaggatataggattgtgggattctatcgagcgtatcattttgaacagtttgacagtcaactgttcaaaggatatgtgcggatgtttttgaagataaaggtggaagcgtcggggtggccggcggaggtgaaaagtgaagatgaaaaaagagcattcatcgaaatgtacaaggcaaagtatgacatcggtttggattatgataagattgggtttaatcccggactaagaatgattgcaaaattggtgagaaattataaaaaatctctaaaaaatgttcgaatttaagggattaaacagtttgtggggaaaattttcgatgcgcaacaccctttcaagtacggaaattgtgggcagtatggaacgttggatggaattggggagagacaatacaattgagtttgggcgcccagtaaaaataagcgaagagatatcaagagttgtgtaccggaaaaaggaggagttcatcagggagcataaagtgtcgaatattgttttgtcattgtggaccacgagtgctgcgaggctaaagctgtacgagtacatggagcaggtctacaagaaggaggggtgtaaactgctctattgtgacacaggtgaaaaggaataaaaagaaaataaacaccaaaaatttagattctctagcttttgctcatcggaaggggcgctgtccgttggtggaggggaaatttttggggtagaacataatttttgaaacgcatttaaattgcggttttaagggagatgactcgagagtatgccgacagcgaaattttggagtttgtgtccgcgggtccgaagcagtacgccttgaaactcagaagaaagaaggatggcgtgatttggcacaaaaccaaaatcagagggatgacattggatagacgaaacgaatttaaatatgatttgttcaaagagatggtgctggattacaagaaaggggtcaaaaaagtttttcactacccggagaagatcgggccgacaaacgacttccgggttctctcaaaagatgtacaaaaagaatatacgccggtgcagaaaaaaggaattatcgacgatcattttaatgttttgccctttggatattattaagagatttaaaaattttgtgttttttgtattaatgtttataacatttaatatttaaattaatcatattcttttcctattttttagatgtcaaagaaaaacttccaagaaacttcaaaagaagtccgccgctcgaaaaataccaaaaattatttcaagaatagtcctaatttggaaaaatgtttcgaagaagtggagagtcacacaaacgaaaataaa

SEQ ID NO: 82376 - DNA, 1208 bp, Heterodera glycines
atggtcttgacacgcaaaaaaagcgaaaatttaaagaatatgagcaactcagggtgttgaagcaagacgaaagcggaaggaatggcgctgggcttgctcaaaaaggcggctcgacgccaaaaagtgacgaaaattaaacaaattaattttattttagaaacactgaatttttcagggctaaagcagaccgatgccgcgccaacagcagatggagagggtacatcgacccaagccgccgaaagtgcgtgtccgtccaaaaactaccaattggacaaacagctgaaggaacaggaacaagcgatcagctttcttcgactgcaggtccgcaacagagacgcaatgatcgctgagctgcgccgtcaattggaacaacaggcgccgaaggaccagccgacaagtaaatttgcagacttttagaaccattatcatccaaaatattcttagcatctacacggcgcaaaaagaatgcggctacattggagcggacctcgcggcgaaatttggcagagaaaatcgctgatgtgatcgatcgagatcgctctcgatcagtgagccgatgttcgctgcaaactctatttgtcaaacccttggaaaattggtttacaaaagtgcatttttatttgggtttttttaaaatcaaaaaataaatttaaggcccagccattgtcgccacgggatttggacgaattggaaacgtcgattgatcaatttcggacatttctcgacgatcagccacggatgcgcactttgctcgccttaaaaccaaaggtccacttggtgttgaaccattttgtgccgttcgccagacagcacaaatttttggcacttttggacgagcagggtcagggtcacaaagcctttgaaatttaagccctaaattttttttaggtgatgaagcattgcattcagtgtggaggcggttggaacagctttggaagacaatgcccgacgaagaacaaatgcgtcaattgttggagcaccactttgtctcaaattggcttctcgacacaggaaaaattgacgaaatgaagcgggtcagtttggtgcaaattgggttccaaatcaaattcccatgcttaaggaccgtgaagaacaacaggaagaaatcggaggccgggagagcgacgaagaaagcgatggagaagaacaattcgattttgaataacagttggataaaaggttttttctttgtttttccaggaaataaa

SEQ ID NO: 82377 - DNA, 2238 bp, Heterodera glycines
atgaaatgcattggggaaaaggccttgggctgtttcatctcgcctgaattggccaaagatgcgaacaaaatggccaaggtcttttcataaacttttttcaattaatttttgttttattttacttttagattgccgaaaaccgtgacaaggctttgacagactctccaaatggaccaaatgtattacctatttccctcaatttttaattattattattttaaaattcggtttaggatcgtgttgaactctttgccaatgcgaatctctcttcacgtcctgttgctgactcggcaaaaaagagagatgcgtccacgtcgcggctcaaccaaacaatcaactcaactgtggacgatccaaatgcgacaaaaagggctcggtctgctagcgggtaaatgaaaaatcgtacaattttcatttttgctctttattttttagccgtcgtcgttcggttgctgtcctccccaacaattcaatgctcaatgacaacaccgatgagggcaatccgcgtgccccgcgccggtcacattttgttggcagtggtggactttcctcagccgtttcgtactcatccaacttgaacaccacgatgacacttcaatcgcaaaatgttgctggcaaattccaattggacccaaaatttttccaaaacgactttgatgacaatacattgttagccggaaacaacagaggagaaagggaattgacaaacaccacgcaaacgctgctgttggacaaaacattcaaagtgtccactccaaaagtgggcgacaaacacaacaacaacacaaacgcggcacaatcaatggatcaggcatcttctgttgatctacaaccaattgtaatttcgttaaaaatactctgtttttatttagccctctgagaatattgggttgtctcataggtattgagtgtcaaacaaatgaaaattttccaaaatattaaaaaaaaatcaaatttttggatgtatgatctgattcagaataatgagatgaagccatctaataaaaaagaaatgagaaaaccatagcccactctttacgcattaaaatgctattactaaaattgtcaacaaatgcaataactaaccaatttttataataccaagaatttgtgacccgttccccatgagaattggttgaatgttttccgattttttcagaaaccagttgtgcgcccaaccagcactttttcgcgtcgtagtgagtcagtgtcttcaatttcttcgctggaaagtgcggaacacattgaccgaactgtgcacaacatttcctgtcttcagcttaacattgccgaggaggcgttagcccaggtaaaatttaaaaaaaaaaaatttttttttttgggattttgcaaatttgactgcgccctttcagttacttcatctgatgaacgaccagacaacacggcagtatattattgacagaaccgaactcattcttaagacggtctttcattttttcaaaaagtgggaattttattttatttttttagatggtcacgcaaatctttcacattcgaagccaacatcttgaacaattggacggagtgaaggaaggggaccaaaaagagcaggagcttagtgaatttatgcgttccatttgcaactttcttagcactgttagtgaaatgccatcaaacggatttcataacaatgccactaattcaatcccttttagctgactaacgaaatgaccattatgcaacggataagtacggacactttgcgttcattcattgattcacttctttcgttggtcagcgatcagcgtcttaaaatacttaacaaacaggtgattttttaaaattgatttggcttttttttaatgtttcaatcattttttataggtattccgttctctcaacattattgtgattcgactgtgcgaattcacaaatccgaatgtgtgttttgtggcgctgatgaaattggtcatgaaataccaggcctctgatcctggcggtcaattgtcatcgttggtccgcaaatgtctcaccaaattcactgacgcaattgttgagccgaccaggattgaaaaagtttattaaatagtttttttttgtaaacaaaagttttctttttaggttgacattctgactgtgctgcacccaatccacgagtattattcgcgtttttatgttgccgatggacaaaccaaccaaatttctgacacagtgaaggacacgtccaaattgttgtgcatttttttacagcgtttggtcatcaaccaaaaatatgcg

SEQ ID NO: 82378 - DNA, 522 bp, Heterodera glycines
atggaggacatccgttttgagaaattgaagtaagcaaatgatgttgtgttgcacttaatactgtcatattcaaataaaattttgtttttcccccatttaattccgtatttttttcagcggtacgctgtccaattgggtgttggagcgcgactttgacaaatgcattcgtcccggcgtgttgagcaaaggcggcgccgtgtcggacgttgtgcacatcgccaagcatttgggggtacgtcacttttcgccttttggcacggattgtgtggcgccgccggcggtgaatacgtcaacgatcaaatccgagctgacgacgtcactttcgcccgcgggcggcggctcttcgccgtcgatcaaagaggagggaaataatgggaaacagcagcagatgacccgttttgaatgtgcttatcttgtaatgaacagccaaccgagcacactgttcgcttgaaatcatttaattcataaataagatgcttaatattaaatatatattgtcgtgtttgtcatttagagaataaa

SEQ ID NO: 82379 - DNA, 844 bp, Heterodera glycines
atggccagaagattttatggagttcgcgtgcaattcgctttggaacgtcgttcccgtggtgactactctcatttcgcgccccaacgaacggcccaacacttacgcgagtcctgaacacaaaaacgcatgcgtagaaacagaatctagtttggtcacaataaaggaccttcgcgtgaaaaagatggtgagtgattaaaaacaaacatttatataaaatatttatattaagtaaaataagcactttatttgtttttgatttccacaaaaaatttcactgctatatatttatgctccgcttgagaaaatttccctagtcccagggttgccattcgtccttagattccagagaagtctttgactctgggcgtcgtgtcttggaaaaacttatttttaaattttctaaaatcaaataaactaaaaattctttaacttcgaataataaaaacaagttgtttgtagtcgaataaatggctttgcttttgtataaaaatgttgaaataattgtttttttacaaattttatttattttttcttttcaaaatttttcggtcaaaattagttaaaatctcatttaaaaacaaaaattactccggcggtgcctgccggcaacctcggactttttcggtaaacatcctaattatctcaaaaattctttaaaatttaaaacttttaagttatacctgtttacaagtccacattaagattccaaaaatttaacgcagcgcttgtcggcactgctggttcatttttggggcatgctttgaaatgacaatttttttcaaaatgccttttgaaaacaaactcgggagatggcacattagcctagtccatttatttgactata

SEQ ID NO: 82380 - DNA, 1581 bp, Heterodera glycines
atggcacttttcctcccgttcgttcagttcttccccaatgggcacgccttcgccaccggctccgacgacgccacgtgccgactgttcgacatccgcgctgaccaggagttggccatgtactcgcacgacaacatcatctgcggtgggccttttttggtcattcttttccaattaatcagtgaccgttccttaggcgttacaagtgttgccttttccaagtcgggccgtttgctgttcgtcgggtgcgacgactttaattgcaatttgtgggactcaatgcgcgttgaaaggacgggtgagtgattcattttacaattaaatataatttaccaccccccattttaggaataatttccggccacgacaaccgaatttcgtgtttgggggtgcccaacgatggaactgcgctgtgcactggctcatgggacagtctgttgaaggtatggaactgactcttctgttgtgctgttgctggtgtactgctcgaagtcgtgtgtatctcacattacattttattttgaatattttaacatttcgccttttcttcaatatttatgcctaatgtaaacaataaaatgattgtgttgagtatttacatttccaattccttctcaaattgggctttttcttggctttgtctccttttatgttcttcccttctccgtccttttgttgtcattttcgctgacatattccatcatctttttgaccattgtgaacacttctttccctatactgttttcgtctgtttattccgttcagttcgcttaccacttggctcaatctgtccgggtgggatggcaaacccgtgaatttcactgaaattttgtgggaattaaaatttatttgcatatgagtgccattcttccgaaatggtatatgtatgtaaatcaaacctttctacgtcttccggcctcagttccacgccgtaaatgtaagggacgccgcgatactttggttgaatgagttaattgttgggtttacaattgataaaagcacctgccaatagtcaatgcttgtacccgaggcaggataaagcaaatctgcgatggtgccgaaagtgtattctgtgccggtggcctcgcgaattgagtcgatgaccaacgaggccaacttttgctgatggtttgatcagttcgtttttggaatgccaaaacaacaaattctcgagttttccacctgttcccagtgatttgacggcttcacgttggaaaagccccacggggacagcaccaattggccgtaactgtgcagcgaaatgtacgccaccagccgactcagttccgggctcagcaggtccctcaccgcacgcacttcgggttcgctgaacggcgcccggcccgggtaaatgttggagcatgggcttcgggaggcgccggtctctgcaaaagtggcaaatgccaaagtcagaaatatggggccgaaaattgtgttcgatggcgtggcgaccccacctgcccagcggtagccccagttgcgattggcgtccgcaccgacgcaccatttgtgcagcgagtcgttgcgggagcgcgtcttgcgccacaggcggtccctgctcatggagaaggcgtacccgtccgg

SEQ ID NO: 82381 - DNA, 1839 bp, Heterodera glycines; identical to SEQ ID NO: 17848
  unsure (1)..(1839): unsure at all n locations

SEQ ID NO: 82382 - DNA, 928 bp, Heterodera glycines
atggtccgctcaatgcttcgtccatcgatttttgccttgctgctgctggtgtgcctgctcagcgttttgccgaaacccgggcatggtaagtgaatacagtaacagaaattttcaagtgattttagactcgatattattcggtagctctaggaggtctctgtagcctgaaaaaattcgaaaagttttattaagtttgaacaaagttatggccaaaagtacacaagcacaaccaggttttcgaatttgaaacttgacgaaattttttgaaatttgcaggctaatagaacatttatggctatcgaataatagcaagaaaataaaaaataaaatgaatttttgactaacattttttacttagaataaacaataaattttaattaaagctttcttagaaccaacaaaactacgtgatcttgtgttttctaatccatcaaaatttcaaaaaatttcgtttagtttcaaaaaagtcatggccaaaaatttttgaaaaggtttcatgtgtgtgcttctgcccataactttgttcaaacttaaaacgaaatttttgaatttttcaggctaataaagaactcttagagctatcgaatgataccaagaattaaaaatttagttgtttttgagcaaaattatgtgaagttttttgttgaaaattttcatttggtatttattttataacgctctctttgatggattttttttttataacgacaaagcacttttttttcaaattccacattaagcaactaggtgcaaatatctcgttgaatcggaattaatgataagaaaaccgcgagacagggattgcaacaatgaagagaaatgtttcgcgcagttctgttcaacgcaaaatggtaagatgaaaataattataattataataataacactaaaaataacaataataataataatagagataaataataaa

SEQ ID NO: 82383 - DNA, 1279 bp, Heterodera glycines
cggaaacgaagaactcgacgattcgtggggttgggatgagcaaggaggcggagaagaccaacgaagtgaccagaaggagcgcgaggagcatattgatcggaaaggatatgagaagcagactgatcattgtggaaacgaagaactcgacgattcatggggttgggatgagcaaggaggcggagaagaccaacgaagtgatcagaaggtgcgcgagaagcaaactgatcggaaaagacacgaggagcagactgatcatttcggaaacgaagaactagacgattcgtggggttgtaatgagcaagaaggcggagaagaccaacgaagtgaccagaaagagcgcgaggagcagactgagattgagcagaagcaggagaagcgctttgatcaatacgaagaggcggccgcatcggaaccgaaaaaaacgatattcgacaacttggtgggttaaaaattttcaaacttacttggtaataaaagtcgggtccatttgtaaaataatttatattcattcattcgctttaaggttgactgggcatggggagacaaataaatttgttgtgaagtgccgacgaaaaatcgaagaaatttccatggattatgaatgagtagcgcattattaattgttgtacgacttttaacctatattccacgaccaccgttctgtcttttattgtgattgattcattctaagttaatgggtaaaatttcaaattacagtatgtacgttgattaaacccctaaaggaatcttccttttttgaccggaacattttgattataataccaatcgtcatatttcattgattagaccaaccgtaattagggcttattgtccccgtaggctaatcatctttttttaaactataaatttgtataaatcgaccgccctcctttctgtaaattaccgttaaaaatgggtcattggaaaatatggcagttattaacagaatttgtttaaaaacgataatgtaatagggtacttttccgtaatgccgctcaccataaaaatgtcataattccgacaagagaaagcacttttctagggttgttttaggcgctaatcaagaatctggcgtcaaaactgcataaatctgtgcttttatatatgttatcatcatatgattttgtcgatgattttttaaatcgtataattaagggaactaaaagcatttgagagagtaatctattcctgtcgacgagtggaatagattggtactagtttcagggttctagcccaacaaattttatgctggggtggggcggaccacttttcaaataaa

SEQ ID NO: 82384 - DNA, 1605 bp, Heterodera glycines
atgggcaagactgtagagaaaattttatcgaaaatttattataatttaaaatctccggcaagtttcgctgggattcaaaaaattttaattgaggcgaaaaagattgacccgaaaattacgaccgatgacgtaaataaattcctagaaaaacagagaacatacacgattcacaagcccataaggaaaagattcccgagactgaagacaataccgagtggcttccacaccgattggcagtgtgatttatgcatttttgatcagttgaaaaagcataacgacggttacaagtatttattggtctgcatcgacgtgctgagtcgaatgatctttagtgcaccagccaagtcaaagaagagtgaggacatgatcgaagcttttgatcgggttttcgaaaagtcgaaaattatcccgatgaagatatatagtgacagcggactcgaatttcaggcgggaaaaatgaaaaattattttgagggaaaattcatcatcaaaaatgtaatgtatagccccgacctccacgccggcgttgttgaaagggcaaatcgaacaataaaagagcgcttgtacagatactttacaaaaatggacactctacgatgggtcgatgtaatagataaaataattacaaacattaacaacagtgtaaataggacactgggggtcaagccgtcttcaattacttttgaaaatgccggaaatatttgggataagttatttggaaatttggaaacagaaaaaaagaataaatttaaaattggtgatttagtccgaattacaaaagaaaagggtatatttgcaaagggttatcttccgaattttacggaagaaatttttaaaatttataaaataattaaatcagacccaatcgcttatagaattgaagatttaaatggagataacattaagggaatattttatgatgccgagttggtaagagtttcgaaaaatcaaataaataaaatataaaagaactttgacaaaagcaaaaaataaataatgaataaaataattttcttcgtagtttttggtttggcaatcggccaaataaatagcgattgttgttgcctatctaatgaagagaaacaacaattaaattctgctagaaaaaccattgaaaaatgttttcgggatacattccgattaaataacgaagcccgagattttgctgctgcttctcatagggcaattacggaggcagaaaaaattaaagttcgtcatcctgaggcaccgggtatgaaaacgtggttcggtaggttattagaaggggtgagaaaggtacagagtatttcagttaaaattaatgaagaaaaacagaaaattggtcataagatggacaagtgtttggacagaaaagatgtgttaatgtgtcgtgaattggctgacgaagcaaaggggacctttgaaattgttaaacagtatagaaaggacgtcggtactgcgtaccgtaacgcctatactcaatctgacctcgggattggggaattggccgataaagttaaggaaacaatgaaggaatatttatcccgccccggaccttccccaagaccaacatttaaagaccaatttatatctgattaatgtataaaagagaatggaaagacaata

SEQ ID NO: 82385 - DNA, 79 bp, Heterodera glycines
ttttttgactaactcacagaccactaagacgaaaaaaccaacttaattgtacttggagcccaaaattgaatcgccgtgt

SEQ ID NO: 82386 - DNA, 2102 bp, Heterodera glycines
acgaggcaaatggatcataccagtgtgccattttctgctcacatcgaagtcgcaggcgtcatacattcgtatgtttgagctcctacatcaggcatggccaacatttgctcctacatcgttcacaattgatttcgaattggccgtgagcaatgcggtcacaactgtatttggagggtgtcaaatcaatttttgtttcttccattttgtgcgaaatttgcaaaagaaattgaaggaacaaaatttgtggcaggttttaataattttttttttaattagctgtttcagcgctactgcaccgattctgtgtttgccgagaacgctcgaatgatcacgtctgttgcgttcgtgcccttgtgtgacattagaatggcggtagcggcacttgatacggagttcggaaatttggcggttttccaaccgctgattgactggtgtgtgaactttttttaaaaatttaaaccccactgaaattacaggctattaatcaattacgttggacagcccaggcccaatggcacatggtcacaaccaacttttcgccctgaacaatggaacgtctacacacgcacgcttaatgccgatgcacggaccaacaaccactccgaggcggagcatcatcgtctacagggcgccttcaattgccgacacccgtcgatttttcacttcattgacgtgctacgtcgtgagcagacaaatacgcgtcattcattgccggagaggagccaccaccaaaaaagcgaaagtttttggcgacagatgaacgaattcttaatttggtgcgtctttacgtcccgatgaatgcaggcaacatcgaccatgatcacaattaccaccaaaatcccaatcaatttcacattattttggagtttctccggggaatttctcgcaactatcgaatgaacccgtgattttttgttttattgtccaaattaccttatgaacaacccgtgaatttctgttaatttttacattttttattgttaaaattattgttgaatttatttttaaaatgtttattttacatttttatgctgaaatttaaaaagttgtttttactgtgatttttcatttttctgtacttggggcccaaacgaccctggggcccaaacgaccctggggcccaaaaacgagggcccaaaaacgggggcccaaacgcgggggcccaaaaactggggcccaaacgcccccgactctaataggcactatcaagccacttaaaatcataccaagattatttaattttgctgtgaaatcaaaatgatatagagtcttgcgccaaaatggcctgcgccaaagtggccggttcccacaatatatgtacatttaagcacactagagaccggtaaaaaataatttacgggcgaatttaaaattttccgggagcgtgacctggaatcccgcggggcaaatacgggagttttcagggtcgttgataacaaatttgacatccatttcaacttatttcgagccccggacccgaattcgaacaaagtagaaaatttgaaatttccagcaggagcgggaatcccgtaaaatctcgtagaagtctcggtcccgctggtctaggggctccatctatcaactattccatacatattccgcgacaaaaacattaaaagacatttctccgtcggttaattcaaagacgaatatgaaatgataaattgtgcaaaaatgtttggaagttttccgtgtttgagtcactccgggttggctcccaaccagactccggttccttccccaaaatttattaaattatttgcaaaaataatgttcaaaaatataattgtacatagggaaagaaaagggggctggcgcccattcgacccccaccgaaagttgaaacaaaacgatgtgtgtaaattttatttacaaaaaatttgagcgaaaggaacgaaaagacgacgtggcattcatgctgatcaattggagaggctttactcagctgaatggcctcaaatcatttgcaaaaccatgggacacttggcaaagataaacttttacaaaagtgcttttattttgtctttcttgaaaataaaaataaaatttaaggcccagccactgtcgccacgggatttggacgaattggaaacgtcgattga

SEQ ID NO: 82387 - DNA, 138 bp, Heterodera glycines
atgtaaaaattaacagaaattcacgggttgttcataaggtaatttggacaataaaacaaaaaatcacgggttcattcgatagttgcgagaaattccccggagaaactccaaaataatgtgaaattgattgggattttg

SEQ ID NO: 82388 - DNA, 1721 bp, Heterodera glycines
atgtacgagtgcgaacgtccatttgggcgggaccagcttcgtcagatcgccaaatttgtcaaccttttctgtttccatgcgctttggaatgagctgatcggtgggtgccaaggcattcattccccgatttattaaaaaatgctgccatttttcacagattttgaaaaggatttgccttccaaactcttcaacagtgtgtaccgactgctccaaattctgttcaaccgcgactgtcgtcggccgttcaccggcgtgcccaacttttggacggttgacgagctgagccccaaggcgctcattgccgagtttgtcggcggcaccggcttcctcctccccccgctgtccgccgctgtgtcttcttctccagccacaaaacgtgcacacattttgatggacaaaatgccacacgttattccggtactgtatattcaaaaaaacaacattttcaaaacgaacagagaggacgaggcaaggaaaaggaaaagcccgacctttcatattatgccaatccatacaatatttacacaaaaacagctgcgcgaccgaattgtgcttttccgcaaattgatcagacaggacaaagaaagtgtggacacgtccaccaccattatcacggtcgaacggtctcgcctgatcgaagacggtgaacttatcggatatttttaaataaaaacacgaattctgatatggccattttggattttattttctcgtcaattacttactaattaaacatttaatttgatgcttttctcccccattaggctattcgcaattgggcaacctttctctggcagctatcaaagggactgtccgagtgaagttcatcaaccagcaagggctcgacgaagcgggcattgaccaggacggggtgttcaaggagtttttggagctgacgctgaaacgggtgttcgacccggacctgaacctgttcaaggtaacagataccagaattcgttgtcattccattcttgtgcacaatttggcctctagagcaccagtgacaagttgctttatccgtcctccacttcgaccatccacgacaaccatttggaattgttccaatttgttggccgaatgcttgccaaaggtattcggagagtttcgccttttcactaatttgcttttccaatgcaaatttagcggtttatgagggaatttgcgtggatgttcagctagcacctgttttgttggccgccgttctcggcaaacaattgcatccgttcgatgagttggccacgttcgaccccgtgctgtacaagaacctcacctttctgaagcactactccgactcggacgatgttgccgatttggagctgaccttttgtgcacaggacgaattccttgggcgggtgagagacaaatggaggagcgggggcgggccatttggccattaattagcactaattggacttggggttggacaagcgaatggtggttgcagaatgccttaaaaacgaattaaacagtgattttcttccaattaggtaacaaccgtggaactgatcagtggtgggcgtgacatcaaagttgacaacgagaacaagtgagtggagaaattgacggacgaaaaaaatgtcattttatgaaacaaaattggtatcactgatatttgtgtcttgaaaatttgatcccatgaccaatttcccttgctccagggtttcctacatccatctgatggcccaccatcgtgtcgtcaaacagatcagggaccagactaa

SEQ ID NO: 82389 - DNA, 540 bp, Heterodera glycines
agcactttcattgatgcacggcacaagggcaacatttcacgcttcatcaaccatagctgtgagccaaatttgtcactgcaaattgttcgtttgggtcgccaatgtccgtcgttggcgatgttcgcctccagagatatccaatcaggtggcataacccccccccccccccctcatccatttcttcttcattctcttagttatgtttgttcgagagagtggacatttttcgaacacagagagcgaaaatctcgagcaataatccactaattaatttggaataaaatcaatttgaactttctgctgattttgcagcaaaagcaaaacatcttaggccagatttgaccgggatttaattctcgacacctgctggattcaatccaaattttgcctgggttttgatcccgacattaatctcgggaccaacttgtcgggaaaccccgacatgatatggggctctagctacaaaaaatgcaaatttttaaagcattttcaattctttttcttcatcaaaaaggtgaggagctctcgtacagttacggc

SEQ ID NO: 82390 - DNA, 1632 bp, Heterodera glycines
aagtgaaaaaacagtgattctaagaaatttctaatgctttaacttggttattagtaaaccaaataaaaccattttggtctcattttgaagggaaaattctgaagaacatgtctatcgttttttacatgttaatatcatttttaacctttaaaatgacggtaatttagtagaatgtttgcccttgttaaaaattttttcctactgtcagatttttttgaaattttgcataggccaatattttgagccctctagcgattctttgtttattttatggaacaagtttttaactcgagatcggctcttccgtttttacaacggaaattctccaaaattttttaaattagcgtggtttatggcgttttgtctgtgcgcactttatgtcaaattgataatatgtatatgaataagaaaatttttataataatttcttctaattgagggctgatgagtatgtctgggaaattaaaaattgaaaaaccccgaccccgactcttccaaccccgacaaccccgaattttccaaccccgacgtcggggttgcaaccctattaaataggtacaaaaatcccgaaataggtagaaaaataggtaataaaaattttattaacgattttttaatgggaaaaaagcaaacaaagagggaaaattttgttctacttcttagtaaacgaataatgcaaatatttttaatattttcttagaaaatatttaaattacaaattttgtcaagaaaaaaatatataaattttggggataaattctttaaaaaatttccaattcttaggggtgtcttttttgatattattgctttttgctaatggattttctaaaaactcttaaataggtagcaaaatgccaaataggtataaataggtacctaggtaatatgtagaaaaactcccaaattaggtgagaataggcattataaaggtcatcgtagacaccccaaacaaagtggaaaatgcttttttcttgcttatctgtgcgtataagtgcgcaaaagttttaggtatttacctaaatttcccagccctgctgatgagagtagcagatttatttgcatttaaatgaataatttatttatcacttagcattgtttttcatgatcaaaaaaatttcaattaataaaaattttatgagaatttaattattgggttgatgaaaaagttctgaccctctgaaaaaacaaattatgcaaaaaatgatatttaattctaaagagattgaaaaagggaggcaggcaattgggatgaatcagcggacggttggccatcttcatgaccaaattcgtcgtcctccattttctgcaaaattccgcggcggcgtgctccttctccatgacaatgcacgcccacatgttgcgttctcaacgcaacaaaaaattgagaaacttcgatgggcggttcttcctcatccaccatacagcccagacatcagcccgtgtgactactatctgtttcgatctatggagcacttcttgagagggaaagaatttgctgatcaaaacgaggtcgaaaatgcattggatgacttttttggatcgaaaaatgatcagttttataaaaaggggattgaaatgttgcccgaacgatgggggaggatcattgatcaaaaaggtgagtacatcattgat

SEQ ID NO: 82391 - DNA, 136 bp, Heterodera glycines
ccccagccgttgccctcgctacgcccttgctccccgaggcaaaaattgcaaaagccaaaccaacgaatcggccttcaaattatttgctggaccgctgaaactcctcatattccctttcacgctcatagcaaaaaaa

SEQ ID NO: 82392 - DNA, 446 bp, Heterodera glycines
gcacgttggccataatttataagggccgagggtcgataaaatttggtatatttttatgtatgaacttggaatatcgaaacaaaaatttattgtttcactgaggcaaacgaaaaaaaaggcaaaaaaaaaaatcggtttgtaaatataaaaaatgaaatattgtgtgtgaaaagagagcatcaacaaatgacggatcgaaaatttcttttataaagattttgacaaaaatgaccatggtcatgaccatagctatgagagtgggaagagaagcaaaaaaaagaatcgacatgccaattcaaagcaaaatttaaaaatttactttttaaaatgtaaattgttatcgcccaccccatattagagaaatcctgaaagaatgaaacaattcatttattgaccattttctttgtattcccaataaattcacttttatgttcgtagctgataga

SEQ ID NO: 82393 - DNA, 351 bp, Heterodera glycines
atgcactataatagccaagtaacagccggcctttttctctcaatttgtcggcaaaaaccaatactagccgctttttctctccgttcgttggcaaaaagcagccagccggcatttttctccattcttcaaactccggttgctatgtttcgactagctatattactgctgccctgccctttaattttgtgtatggaatggcaagactttatcattgacaaattcggatatcgaagagcgcaaccttggcattgttgcggaatttgtcctgacaataacatctatgacaaaggtcgttgtgttaacgaatctagctacgaaacggaaaccgatcgttatattcgcataaattaa

SEQ ID NO: 82394 - DNA, 971 bp, Heterodera glycines
atggggtgggcgataacaatttacattttaaaaagtaaatttttaaattttgctttgaattggcatgtcgattcttttttttgcttctcttcccactctcatagctatggtcatgaccatggtcatttttgtcaaaatctttataaaagaaattttcgatccgtcatttgttgatgctctcttttcacacacaatatttcattttttatatttacaaaccgatttttttttttgccttttttttcgtttgcctcagtgaaacaataaatttttgtttcgatattccaagttcatacataaaaatataccaaattttatcgaccctcggcccttataaattatggccaacgtgcgcaagacgggaatcatttgcaccataagtattgaagaaaatgaatattcactaaggctggccaagaactgtcccttttcagggcccgtttgtcgttctgtagaaatgcttgtccaaatgatcgaaaatggaatggacgtcgcccggatcaacttcagtcaagaggaccaagaagtgagttttttcacttctttgaatttttgagggccatcttttagtaaaataataaaattgcagtatcaccgtgttaccatcaaacatgtgcgtgaagcagctgtcaaatgcgacggaggacgtgaacaatcgtatcgcgtacggcatcaaagagggcaaggagcgcgggttcatccacaacggcgactttgtggtgcttatcaccggatggaaatcgggtcagtgtctttggaatttaaacactcagtaattattgcgcttaattgaatactgattgccccgtttgttctcaggccggctctacaaacacaacccgtttgcaggaaatcaaataatagaaggacgtgtccaatgagcttttgacgattgaaaaaataatatggttatatttttgtgcctttgtttttggcatttgttgttgtattgatatttatttgcaaataaa

SEQ ID NO: 82395 - DNA, 504 bp, Heterodera glycines
atgcacaaaaatggagctttctcttcaactttccacaggttgtaccacgccttttgtgagattgactccgaatgtgaacgaaagcgttccgtgctcagctctctcccgctgatgggagttgttgcttggctggaggagcacacaatcacttttaagtcagtttggattagcaaatgttttttccaaaatgcgccgttaattattatttttgcatcgaattataaaatgcatgaccaaaattctcgcctgtcattagcaagattcatttaatttctttgtgctcctttcaggtccaaaaatgaatttgagttcccttttctggatgttttgggccgaaatctcagaatagaaaggcgaacaatgccgggagaaagagcagacaaatgtgtaacggtaagcccattcatttccttcaagtccattagcattagcatcattagtgtcataattgcatttcagaacagttcgtcctcctcctccaccgtcgccattgaacccgtctga

SEQ ID NO: 82396 - DNA, 778 bp, Heterodera glycines
gcctcaagcactgatcacaacgctaagcacagaggtcagttatttatttggtggcgtcagtcagggatggcacggaattccgattcccggaaatttttgggtttcggaatgcctgccttccctggtgctggtgatacgaatggtcatgactttttgtttcactctcgctcttattatcgtcgtccattgttcaggttgcccgttacaatgcggtggcccaacatcagaccatccaacacaccatccaaagtccgctgatgcgggcacggaacgaagtgctccgtttgcttgaacaactgtccgacaaacaatacaatttcgtcgtcgatttgatcattccggtgctcttaatttacaattttagactcgtcatttaacactttttccactttttttttatttaggtcggcgaagtgctcgtccattgccttgacctttcgctgctgaagcaacgctcactgttcgagctgttccccgccattgccaagtcggacacccaccaaatcccatcggcaaatttgactttttcagattttatatggtcgcctattgtcccaacacgcgcagattggcatttggtggcaaaaatggtgccatcattgtgcacgaacttcgcgcatcgaaggcacaagtgaatatcaaaagcacatcatttgaattaggacacactccctcaattttcagacagtgcaggcgcaccgtgcgccgatcacagcgttggcattttcattggacggcaaatatttggccgcctacgcagcgcaagacgcaaaaatca

SEQ ID NO: 82397 - DNA, 3879 bp, Heterodera glycines
ccggtcttctcctgctcgactatgagctctgtgccaccgagtcggaggatggtggtgccaatttcgctgccactgtgccgccgccgccaaacattgagtgtctctcaggcgccggcactgacagcgggcgggcactgctaaacacattgatcagccgacgaattgctgccgcttcttcgccgttgcaccaccacccccatcatcaggacaacggcatcgctgccgatcattgccatccccattttgatggcggcggcgcctttccctccggcctcgtcttcgctgcaagaaatgccgccgcctgtgccaacccaagggcaaccatcggcggtgtggtgcttcgctgctgtcccccacatttttggtccaacaacagtcgttgtacatggacacggccaaactgttggtctccctgttgcatgggtgggaccttgacgaggaggtggacagggcgtgcatgcataatctgaagttgtgccggccgaaactgcccatctgttttggcactatcaccaaaaagggtttgtaatttaacgggtcgaaacaccgaaaaatcaaaatttaaatgccaaaatgttcacaggaaatttgtcactttatacgccccattgttcgggcaaaattgccgcgcttgacgacttttcctacaaatatttctcgcgcagcatccattggcatgaaagtcgtgccctgaccacggtatgggatttcagcgatagttcggcatggcctgccacttacattttgttgttcattaaaggctcatctgttgtcagtcgtggccctgtccaacacacttatgacactcaaaagcaaatccaaccaattggccatcaaaaagccgcctctcaagtgagtagtgctcctcttccaggaggagtctttctacaatttatttcacccacttttcccaccaatttatcccttttttcatcaggcgaacatcgtccatcaaatccaccgactttttgccggaaaatgagtgccaactaatccgacagggctggtccaatgtcgcagcacttcactgtgtgctgctccctgaactgatcagaccgagcgatgcctacgcaacaccgcgcatcgatttgttggcaagaaagtcattttttggggataatggggacggtcggacggaccctaaatttttttaaagccatcaacagtattttaagtcctatcgagacttggatttgatcaataagtccatttttcatcgacagcaagcccaaaatctcacccctctctctttgcaggtggcaagacaattgcattgagataagagacgcagcgcaagcactgctcatccgcgaactgacgcggatgggaggcgatggtggggcctcgtgaactcgttaattcccctgaatttcactggttcaggtcgacgtcggctgatcgagcggtggtccaactttttacccaccgttttggacccgtccatctccatttttgggacccattttggcggtgcagggaccacgtcgcagttgtccacaattacatctggtgctggtgctgctcaccattcccacggcaataacactaacaacattggcactctgcaggacaaccaccaccaacaccatgtcgcttttgttgaggaaaagccgttacctgtgattttgaaaacgacgacgggtcatcagcatcatcacctccaccaccatttgtccgcaaccggctctttttttcaaatggattcgtcggcagcaaactcatccaacagtgttgcgtcgtcgaccgcgagcagtacaacaacagcaaccgccgtcacgaaactggcgccaccgcctcgtcctgctgtgccgccaattccgccgcgaacagtcagctcgggcgctctgccgtcgttgctgcccccctcgtcgatggttggcgctgaatgcggcggcggcggtgcaacaaccgagacagtggtggacaccagcggagttggcaatgacatgccgaacaactgcaggtcctcgccgaggagttcactgaccagcaacaacaaacacaatcagcatcaccagcataaacactttagtgttagccaacaacaacagcagcagcagcagttggctgcttcctcctccctggcgtcgtcatccgtcgcccagtgcaactcctcgtcactctcttcgctggacgacccgtaccaacagtgcgcctcgtccaccgcaattgcaaacaaagtctgtgatcaatttgaagaaataatggaatacaatttgataatacctaatttaattcgttgaaatcttattttaaaaaattctaagatttttttcttgaaaaaagtttgaattttttaaaaattcggcggcaagttttggggttcacccaaaaatgtgaccactccgtcactctctgttctcatcaaaattcaattgtttgcatgaataatccatctctttacagctccaagaggaccaaatgctgttgtgtggtggtgtgcaccaagtgcacaggaatcaggcgaccgccattgtcctcctgggcgccatgggtgccgagtttccgtccgatttgcagcggaacaccgacttgtgccgtgccacggcactgtcattgctcgagctgttgctggtgcccgaatcgccgctacttcccgccaattcgccgctgcgccgggcggccatcgatttgctgggccgaggctttgtgctttggcagccccatttggacctgtcaaaaaccattttgggccttctcaatttggcatccgcagccgccggtgttgacgaagaaaaaaggtcagtgcttttctataaatggtagtgcttacagttcaattgttcaaatattatagtacaacaaatatgggagcagctcgtttcctctccccaagaatttcaaacaaaattataaaattttttataataaaataattcatcataaaatttgaaaatcgccaaagttttaggtatatggggtgtggatgcactcaaaaatatttgaaggtccaatctgtccgcttttcagtgacttttgctgcttcaccacagaagcggatgcgtgcaaaacagcaaggcatgcgctgtcactgatcgctttgtcgaggtgttttcttttttgttaatgcgaaaagcttaattcattttttgattcttattaaggcctcaagcactgatcacaacgctaagcacagaggtcagttatttatttggtggcgtcagtcagggatggcacggaattccgattcccggaaatttttgggtttcggaatgcctgccatccctggtgctggtgatacgaatggtcatgactttttgtttcactctcgctcttattatcgtcgtccattgttcaggttgcccgttacaatgcggtggcccaacatcagaccatccaacacaccatccaaagtccgctgatgcgggcacggaacgaagtgctccgtttgcttgaacaactgtccgacaaacaatacaatttcgtcgtcgatttgatcattccggtgctcttaatttacaattttagactcgtcatttaacactttttccacttttttatttaggtcggcgaagtgctcgtccattgccttgacctttcgctgctgaagcaacgctcactgttcgagctgttccccgccattgccaagtcggacacccaccaaatcccatcggcaaatttgactttttcagattttatatggtcgcctattgtcccaacacgcgcagattggcatttggtggcaaaaatggtgccatcattgtgcacgaacttcgcgcatcgaaagcacaagtgaatatcaaaagcacatcatttgaattaggacacactccctcaattttcagacagtgcaggcgcaccgtgcgccgatcacagcgttggcattttcattggacggcaaatatttggccgcctacgcagcgcaagacgcaaaaatca

SEQ ID NO: 82398 - DNA, 598 bp, Heterodera glycines
atgggtgcttctttagatttgtgtgtctgcggtagggtcgaaacacgctttattttcttagttttttgttttctttatggaagagcaccgaacatgaggaggaccactcttccattaaaaatgtgtataacaaaaaaaattgttttcatttaattatttctcaggaattgaccgcaaaagaggcgaccgcaaatgtccgtccgcaaatgtccgtccgacaatgtcccgtccgcaaatgtccgtccgcaaatgtccgtccgcaaatgtccgtaaggcgtttgaatatgctttccatagaatgctttcacaactatttcacaatccgatggatgatttagacgatcacggagctcattaattcgacaattcaaaatttgtgcaattttttcagcaagaaggaccatttttctaattaatctagatttatattaattaattttatagaggaaatttgcaaaattattttgtaaaagatgattaatgaaaaaaaaagaaattcaactgctatttataatagttaagaatataggttaagtaaacattaacaagtataaaaacagattttcattcatttttagtcactttaatattaatataa

SEQ ID NO: 82399 - DNA, 1412 bp, Heterodera glycines
atgtttgacaacgaaaatggaggatccggcgaacctcaacaaataaacgaaaatattcctgctaaaacttcttataatgtccaaccctggaaacttttccgtccgaaatacatgctcacttaccgcatgtgtgaatgtaaacaatataatagaaattattatttattaattattattattattcagtatgtctttcatcattgtggaacaacacaaacaaatatattgctaacgaacgtcgatcattaatcagttttgaactttgtgaaaaatgtacaattgacaattgtcgtgctaccgaaatacttgccccattcaagccaaagaaataagcccaagatgaatttttattatttcatcaccgataattatttaaacattcgtttgaatccaaacccatctccccatctattccttcctcataaaattgttctatttactcgacgatggcaaataaaaaatgcacaaatctaagaagcaatttgaccttttttgaccttcttatttgaattcacgagttccatgagcaaaataatatttgcattagacacagggttggggttaattgcgggatgataaaagagattgcggatcaacagttcaggcactgtgttcctctattggtcgcctttgaaatttgagaaactttttagataatgtgccagctgatcaaaatgcgcagggaggaaatgcttcgggtgatggaaatggtaaataattttaaaataactcaatttcagtcttcaaaatttcagtcccctcgtttggggcaacgattgaaacgcacatggagagatctcgtcgacgtttgctgcatgatgagatggttcagcgcagtgtccagcagcattttcagcatcaacaacaacaaatcatgttccaagcacaacaacaggaacaacgccgagttgagatgcagcggcagtttgatgaagccgaacacttgcaagaagaaattcaggctgcggatgagagacaaaacgcccaacagaatgaccaagagcaggaacaagaggaggaaaatgtacagcatgctgtgcagcagcagcaatttgagagaactgtacgactccagttgcgcgagtcgcagcgcttttacggcggttcgccttcgtcagtgttagtgccaccggttcaattattttgggagactgaatgtgtaatatgcaccacttcaaggccccatttctatagcaaggagtgcgggcatatttatttgtgcagtgagtgtgctgtcactgcggtgatcaacaaggttcgacgctgcatgttatgccgcgctagtgttagtggcatttatccttttgtccgttgagtacctttatggaagtaagaaaatgttaacatttcacattttcagcttaaatttgtcttacttccataaaaaggtgttatttgaaagttggaaaata

SEQ ID NO: 82400 - DNA, 363 bp, Heterodera glycines
atgttgctgcgcttggctctgctgctgtggttgggcatccgtggcgccctgcacatgggcaaccgtctcacgctgaaaatgcaatgtgatgaaatgcaaaaagcaattgaggcaggcagagggagggccaaacattttcgaatttgggaggatttagatcattcacccccaccccactcggtgcccgaaatgcggcttaccggcaagccgggatatgcccgattttcgtccacccatcgcccaaaatgttaaattgaggcaaggaggaaagctttgtttttctggcatttttttaaacaccccgaaattggacagaaaaagcacgcaaaagcatgtttaagtttcgaaatcagcgaaaataaa

SEQ ID NO: 82401 - DNA, 131 bp, Heterodera glycines
cccgttcggccttgttctgctcctcttcatcccgctggcgttccgtcgtcgttgctccgcgtgccgtcacctgtacacctaagaaatgccgctgggccttcagaacaccgaccgactgcttactgatggat

SEQ ID NO: 82402 - DNA, 1327 bp, Heterodera glycines
atgtccaacaataaagaagaagcggtcattaacaatgcgagtaataataaattaattgtttatttaattagcactattaatttttcaaaagacctgacaaaccattggtgcaaaggtggctttttgtgggagagaagcaatggaggcaaaacagaagataccgtagccatttgcaagccaaatgagcactactgttatgtggcgaactgttcagtggcaatggctggtaagtaaaaatacttttttactttatagacttttggtgatttttggtgcatgtgctaataaaagtgccaaaataagggttcaaatcctgtaaaatcccgaaaataaatgcaatttaggtaagcatattccaaacatgctcttcttatattttttttttactcgtcgcccaataaactgctgtataacaaaataagtcgggaccggcagtgccaaaaaaggcgctgccggaaaaaattttgaaaatttcggtttttttaataagatttacaaatttttgggccaggcaatgccggaaggcagcgccaggtgaattttaaaattcagctctattttcgaacgggttttaacaacaaaaatttttgaatttccgataatttttgttattcttcgatatttggtcaaaaatattttgaaagatattaaattttcatgatttcgtcaaagaaaattgaattttttaatttcaacgaaaagaaaattttaaaaaaaaaatttgggttaatttgttaacatattatgccaaggatgatcgtttttatgggcatttttgtttaacattactttatttaataaaaatttggcaaaatgtttaaaaaattcaaattttttataaattttttttgccttttctccaacgaaaatgccattcttaggagtgtatatttaacccggccccaagtttgagttaaaatcggggtcggggtttgtcggggtcggaagcgtcggggtcgggattaacccgaaaaatggccaaaaaagttggagttcggggttggggaggggtcggggcccaacttatgactcgaaaattcttttttcacctaggttaaaacaaattgtcaaaaaaattataattttccagcaattattttctgtttctttgttggcaatgcgtcccggacattgacacaaaatcggaaatctgaacaccccagcgaaaatcagacaatttcgccctcaagaaaacaatcaactaaatttcaaaaaaaaaatttattgtaatacctatgaagtgagaactcactggagttcaaattttttacaaagtggggatgtacgacaaaaattctgatgaatttcatttttggtgcatgtacta

SEQ ID NO: 82403 - DNA, 212 bp, Heterodera glycines
ggagtgctgaactgtctgaagagtacgcaccattggttggcacaaaaacaccagcagctgaacaactaacagaacaaagggccgatctgtcgcaatttgaattttaatacggtagcggaaaataattgtgatatacggtagcaaattgccaaaccgaaaacgcattaaatgcagaaaaaaaatccttttgttctctttccaatggatgttaa

SEQ ID NO: 82404 - DNA, 80 bp, Heterodera glycines; identical to SEQ ID NO: 51817

SEQ ID NO: 82405 - DNA, 231 bp, Heterodera glycines
atgagggaaagaggaaaaaatgagagaaagaggaaaaaggaagaagaggaaaaaatgagggaagaggaaagagcaaaagatgagagaaagaggaaaaaggaagaagagggaaagatgagggaagagtgggaagaggaaaaaggaataagagtggaaagaggaaagagtaaaagatggggaaagaggaaagaggaggagagaaaaatgaaaaaaggaaagagtaaaagatga

SEQ ID NO: 82406 - DNA, 278 bp, Heterodera glycines
cgttgactgaatgtgccgtgcccacagattgtgttcatcgagtggagagggcacttcttcagagaattcaggtgccccgctgcaattccactgactatttcgacctgttaaagtgcttggatttcagtaagggttttgtcgtgcttttcctttgccgtatttcaccaccttttcagtcattctgacgaggactaatttgaccgagctgaactcgcgggcaggccgcgtctgttgcgagatggacaaagtcagtctctcatgccaattggcgtgtcgaa

SEQ ID NO: 82407 - DNA, 1885 bp, Heterodera glycines
atgagtctatccagagccagcaaaggaattattggtgaggtcaaaaaatgtttagcgtgatgagacatttgcgccgcgccatttgcgccgcacagcaaaagtggacacttgcgccgctcagcaaagtcgatacttgcgccgcgccatttgcgccgcagacagttgcgccgcggatatttgcgccgctccatttgcgccgcgacatttgcgccgcccagcaaaaattgacttttgcgccgcgctgtcaaaaatattatattcataaaaattccactattatcaataacttttactaaaactataagccatcgacaaaaataactaattgaaaattcgaaaaaattactagtcaaaaagattgacattcaattttttaaccattaaaatcaaatggcgcggcgcaaaagtcggctaaccgattaattaatgcataaaccaaatatgatacaaattcactagctcaaaacttatttcacatcttcaacattcttaaaaactagggtttctccccgacccctggggggggggcaaaaaaattttggagttttgggaggccggcggttccgataggcgccgccgaaagtttttcggaattttaggaatttttaattaactttattaagaaaattgtacaaatttaaaaattttcaagagtccccaattccccgagttagtgtcggggggtcgggggataaaaagtcggaggtaggggctcggggtcggggagcaaccctattataaacccccaaaataggtgctaaaaatggaaatgagataaatattttaaaaatcaaaaatgtagtcaagtaaataaataaatcaattttgaatatgaatttttgataaaaattttccatttctaaggggtgtatttttcgtttttattgcatttttgttaataatttttttcaaaatagcagaaaacattttacaaaaaattcttcaaaatgaaaaagagcacaaaaaagcaataaatttattattattaacaggttatatcgctccaatttgattcggttttttcggtttttgaaaaaagtcggtcggttttttcggttttttgatatttcggtcggtcggtttcggtataaaaaccgaaaaaaaccgaaaccgaaaaaaaccgaaaaactcaaaaatttctcggtcggttttttcggttaaaaaccgaaaccgaaaaataccgaaaaaacccgaaaaaaaaccgaccggcccgatctctgagttttgaggacccataacttttgtcaatttccttttggattaaaaattctttcggattcatcctttacatgccgagaggaagcgattgatatctattttgttgcattttatgcgttttacggcaatggacggttcagtccagggatgggccgaggtttcgcttttcgcatttcgcctttcgcattattcgcattttttggcgtttcgcatttcgctttttggcgcgaaaagcgacttttacacccctaagaattggattaaattcccataaaatttttcaaaattttacctataaattggctaattttcagtgaaaaactgtttataagtgatcaaaatttccaatttttttccccggcggcgcctatcggcaccgccgcgcccccaaaactcctattttttcttagaaaatggcccaaaatcgcaaaatttggtaatttgctgaaaaactgttctcagcggcgcgccaaaactcttatttctcattagaaaaatgatacaaaaatcacaaaatttgatgattttttggtgaaaatctgtcaacaaattttaatcaaattttcaaaaattttcccggcggcgcctgccccctcttcccaaaaagtttttttggaaaaagcgcgcctcaaaaaagcgttttattgatttttaaatttggaataaa

SEQ ID NO: 82408 - DNA, 77 bp, Heterodera glycines
atgacgtcattgtacaaattcctcccccctctaattaattgttcaattattctaccatcttatgcagagcagtgctc

SEQ ID NO: 82409 - DNA, 915 bp, Heterodera glycines
atgtcacttctgctgaccttcatccgccctctcctccctctcccccccctcctctctctctctctctctctcccgcccactctatacccccggtaatcacttcataaattatttagaatcttttccccgcatccgtttatttgagctgcttcttcaaatggttcttcccatcctttgccgtcattttgttgtgccttcattgaagaagagctctcaacacgaatttctaaacagctgattgcgttttttaagttcccattaaattcatttaataaattaaatgaccaataaaaggcaaaaaaaaaacagtgccgagaaaagcaaagggtcgttaatcagagaaatttccttcaaaaaaaacattggaggagaaaaaggaattttttcctttcggatgactccgaattttcttttgctttttgaggatttttaaggaaccctctttttcaacgaatttgtttagaaaactcgaaaatgacaacactaatttaaaaaaatattgcatgattttgccgaaaatgataactaattaccttgaccatatgtcaaatattcgctaatagcaattatctttttttaaataaaagttgcctttatgtaaaaaagtttaaagtgacactccaataaaactttcttaatttcacagaatttatatttatgcaaatttaattttgaatattgtttatcggctacaaaagtgacagtgaaaaaatcggttcccataagtaagaaaatttacaattaaaaacctaatttaaaaaagagcaaatggttaattgaagggatggatacggtaatgaacaaaatggatactgtaatgagcataacggtaaattgacgagatggggtgattatataattgtgattattaaatggtgaagatgctcaacatatgaaatttgggacgtaacaaaa

SEQ ID NO: 82410 - DNA, 799 bp, Heterodera glycines
atgcaaggagttcaagactggctgtacggggcggaagagcatttggccatggtgccgcaacagtccaagctggtcgagccactcagcgcacagctgcaacaccaccaggcgttccatgccgaactgggcgaacgcgttgagcagatgaaggagctgagcaacaagggcattcgcatccagctcagctgcgagaagaaagacgccattccgatgaagaaccgtcttgtgtcgatgaagcaccgcatggacaagctcggccaacgaagcggcgagcggctgaagtcgctgaccatggcactggacgagtcccggctgttcttcgactcgcgccgcgacctgctccactggacagaggatcagcagcgatggttgcgcgaccgcgaggcggctgagccgagcagcaccggaacgggtgagcgcatccgtgaagcgctcaccgagcatcgcacgcttgcggacgcgcttcagcgcaagacgggcgtctacgacgaggttcgccgccgtggcagtgcactggcagagcacgcgccacccagcgagaagttgcagttggacgaagcgaatgaggagatgacgcggtgctgggaggcgttatcgcgcgcggcactgcgacgccagcgcagcctggaggaggcgttgatccaaagcggcaaatttgacgaggtgcttgccgaactgctcaactggctgggcacggtgttgccaccgctggaagcggagctgaacattggcaactttcttggtaacgtcggtcggataattaaatttggtgtgaatgattcatccaacaatttcttcg

SEQ ID NO: 82411 - DNA, 309 bp, Heterodera glycines
atggctcatgatttctgttttaaaaatttttatgaaatttttatctatgccaattttatcggcttaaattttaaaaaagcattatcaaaggtgcgattttattaataataaagagttaaattcggtaaatctttttgttttaaattataagcctaaaattggcataattaaatataaaattttgaaaatttttattcattaccatttttcagaatatatcattcgagcatattaataacatgccaataaaatttggtgcatttcagagccctttctgaaaaaatatttatgcattaattttgaaaaaaa

SEQ ID NO: 82412 - DNA, 757 bp, Heterodera glycines
agttatattgactcaaagttggctcagacggagttggccagacggagttggcccgttccgcggcgccgggagtgcccgaggtactggcgcgccaactgctcggcttgccagttctgctgctacttgctgtcattgtggtgtgaaatggcgtgatttgtatgcatagagaagagtaaaaatagaaaaaaaaattttctgatttttaattctacttttcttatttgaaactaattttttactcataaatttttaattggtttttatttcaagagatatttatccatttaattaagaaaaaaacaaataattagataaatgaataaaatacattggtgtgtcataatcaaatataaaatgaataaacaaacaaaaagacaccgccacaggcattaattaaatttttgattgtttttattaatttaaatcaaaatttgggcaaatttattttgtctatttagaagagatatttttgtacttttagccaaaaaattatatagcccatgctggtggataatgcgttcaaaatacagacacgagagggacgacttacataaaacattgacacacataaacttataaaaaaatgataaaaatttgctgattggaattggccaactgatcagctgcagagacagatcacccactgatcactgatctgccccttttctctcatggatggccaacaaatggtacgaacacaaatggattagggatgaagcattattggccaagaatggacttggactcgatcttttaa

SEQ ID NO: 82413 - DNA, 278 bp, Heterodera glycines
attttctaagaaaaaataggagttttgggggcgcggcggtgccgataggcgccgccggggaaaaaaactggaaattttgatcatttataaacagtttttcactgaaaattagccaatttataggtaaaattttgaaaaattttgtgggaatttaatccaattcttaggggtgtaaaagtcgcatttcgcgccaaaaagcgaaatgcgaaaagcgaaatgcgaaacgccaaaaaatgcgaaaggcgaaatgcgaaaagcgaaacctaggcacatccctg

SEQ ID NO: 82414 - DNA, 1071 bp, Heterodera glycines
atgagatggcagggtggaaagttcgtacatctagggcatggatttttcttatcaccaggaccagtccattttaggcaaccctggatttttgtacaggaaatctcaggtttttttttccaggtcaaacatggaaccatacaggtatactaggctttattgagctttagaaattcgattaaatgtacgggttaatttaagatgaaagctatttgcatcctgagaatcaataaaatacgcccaaaaagtggcggaatcactttttatgaataatgaatgcttttcgtgttggctcggagaagcggagagtacttacacaattggtgcgtggattcgatgagggattgaaaatttggaagcgaaaagaaaaaaaaaaaaaaaaaattcggctaattgaaatataacgccacaaatcaaattcaaatacccccaaatcctagcagaattttgtgttctgtcttagcaactgatgcggctctcgatgtgtcaaatcgatctaggaggtgaaataagttgatcagaagcgattaaatcggtttttgagccagttcaaaaatcgaaatgtgaagaaaaaattcttttaaaacggtcaaactcaaacaactttgatcgaaacgggccaactgcgtctcaattgattaaatatcaaaattttttaaaaaataaaaataaaatagacaatacaacaaaatatcatttattcatttggtaattgctacaaatccctctaatggcatttctataatttgggttaatttgtttttaacaatattgatgatcattctagtcgattttaacgcgtcccaaaaacagtttttattggtcccacaaaaaaataaactaaaaatccaaaaaaaaaaaaatttatagggttatttgatgcgttgagcacaaattctagctttcaaggtcgctgatcacgataagatatccattttgaccaatttctaaccccggaccagaatccgaacaaagtcgaaatttaaattttttgaattttacttctatgtatatttaatctgcatagaatgactcattttgctgtttagtatttaaggacgctaaaacaataaa

SEQ ID NO: 82415 - DNA, 2873 bp, Heterodera glycines
atggccaattcggaactgaacacaatgccatcaaatggtgatttgaagcacaataatgctgcggaaaaggtgcagcaaccgaacgacttgaagaaggtcaacgagggcggaggaggaggggcagaggctggccaagacggaacagcaccaacagcagcagaacaggcacagaaaaagccaagcccagtgagtgttttgaaacacaaaaaacagggcacaaatcttagaggttttttatgatccgatgtccattttgcccaattccgaatccctaacccgaaatcgaacaataaggtccaaaaatgaattttttttttttgaatttagactgtttgtttcggtttaaggattaagaattggacaaaatgaatgccattttcgtctggcgcgacccaaaaacctccacagaaaaatgtttcacgattttaaaatattaaaaataaaaattacaaaaaaaaaagagaattttgacaaaaaaatgagtttaccaaactaattgtaattggatttttgccaaaattgttttattttttgagatttattgtaaatgtgatgcactttttttgtatttataaaaaaaaaattacccaaaaacgatcaaatttttgctcgaaaaattgggaaatttattaataaattaatactttcctaaaattcttaaaaaattaagttggcattgctacgctcgttgttcaatgacgcggcactgttcggcaatgtcggaggcccaattcaggcgtacattttgccaagaactgacgcacattatgtaatttacggtctacgtcagttcggccccagcacgtttcgcagcgggttttcgctttggcatccaaatccaacattgttggtatcattcgaaagctcttcatgctctattagcctgcaaaattgcaaaaaatttcgtcaagtttaaaaaaagtttgagccagaaaagttggaaaattttgttttttgaactcttctgaccataacttttttgaaccttaacgacatttttcaaaattctgcaggctaatagaggacacgtagggctatcgaatgataccaacaatgttagatttggatgccaaagtaaaaagttataagcgaaaacccgctggggccgaactgacgggttccggtaatttatcttctttttttttttggaaaaatgcgggagagaatttttcctgctttgcgaaccttttttacatagttcgaaaccagacctcagaacttgaaaggggtcgaacttgatgtcaaaaacttattctcctactaaagtttacccattttttgaattactataattgcatttcatataataaagccccgaattagggggaaaaccccccggttttcgagatgggaaaggattccggctaaaaatctgtttcaacttgaatttgggtcctgttgctgaacccggttcctggaaaaatctgtacacaaaattctggcctgatcgaacacctttcataataaaatgtaaacgatttattgccgaaaaaaaatttttttttttttttttcaattttcagagtgaatatttgtgtgatcgtgatttgcgtgtccaatttttgtccggcttcactgggtccaacgcatttgtggtggtcacacaacaggacgcactgctgtggacggacgggcgctattttgtgcaggtaaaacaaaaatattttgatagatttcggaaattttggaacaaaaaaaaatttatttttattggaaatcttacaaattttttcgttttaaaatttcatatttttacaaaattttttatacggggagggggagggggtgaaaaaaatggtttataattttttgaatttccaattttccaaggcctccgctgaactgcgcgatgggtggaccctgatgaagcagtgtgtgccggactccatcgacccgattgagtggtgtgtgcagcatttggatgccggtgcacgggtcggatttgacccgaatctgatcaccatccgtaattgtttttcattttaatcatacatttattattactgcaaatttgaaaattttttatccatggacaaaaaaaatgatggcaaaattttttctaaaaactgggtttatgagttttttttttggccgtaacttttttacacttaatgaaatttttttgaaatttagtagtataaactaagaaatgcttgatttgattaacagcgaaaaaaagttatggcccaacaacaacaacacaaaaaaaaacattcaattcggacagcatgaaagaatttatgaatttaatgtgtgtttttttccgcccacagaaagtgccaacacaatgatgaacaaactgttgagcattggcctcataccagtgccgtacacacagaacattgttgatttggtatacgacgatttgattgcttttaaaacaatttttaaatacgattttgttcgcaaattgccccaaaaaaaaaaaattccatgggattttttttttgaaaattttttttttcaatttcagatttggacagatcggcccccggaaatgcctaaaaaactgatccatcttggcgagactgagtgcggtgagaagccggcgtccaaactgcgtcggctcgccctgctgatacggaaggccaactgcgactccattgtgctgtcccagctggacgaaattgcatgtaatgaatttgtaaaacatttaatggagaaaacggaaaattaaatagaaaaaattaattgcaagaaaaaaaaacagaaatttatattttacagaaattaactctcctataggtgtacacccaaaaacgtcgccgccgaaacgtcgcgggacataacgtcgccacaaaaaaaaattaaaatttttcaaaattttaagaaaattaaaaattattttagcttttttgaaaatctaagtgtta

SEQ ID NO: 82416 - DNA, 369 bp, Heterodera glycines
atggcgaactttctgctgtcgctgctgctgaccgcgtcgccgctgcccttggcgttgctgccgccggcattgccctcagcaggcgacgatggcactgttgaaggcgttgttgtacttgttgtcgtcgtctttgtcggcgtcgttggtgctgcttttggttttaccgatgccgtcgtgcccttggcattggcatctaccacctcgtagcagttctcgaaccgtatgccgaacgagccctgggcataatagcccggctcaatggtcaccaccacacccttgtgcaagtagttgtacttgctctgcacgcggtagccaatgtaggctaaaaaaacggcactgggtatttattagtggcacacaaaaattaaa

SEQ ID NO: 82417 - DNA, 1274 bp, Heterodera glycines
atatgcaaattttgcatagaaaaaaaagagaaaattcccattttttcatttgttttagccgtcaacctggacgggatctgtcgcgcaccgttgtgggcacatggctgtaattttgaccatggcgtcggccacggggttggccattttctgaatgtgcacgaatatccacgtgcgtttgttttaatgtgtttttgtttggggcttatttgtttgtatacacagttttaaggagtgagctataaaaaaaatttcgatttttttcgaaatgccaaaaaaactttttttcggcgccctggatgatgctgatttagagaccagggatgtgtcggcatgccagtttctggcctatttccactcggaattcccgattgccaacatttttttgagccgtttgaattacaattgccgaaatttttgagggtgtcggaatagaaaaagtgggatttttaatttttgtgtgccactaataaatacccagtgccgtttttttagcctacattggctaccgcgtgcagagcaagtacaactacttgcacaagggtgtggtggtgaccattgagccgggctattatgcccagggctcgttcggcatacggttcgagaactgctacgaggtggtagatgccaatgccaagggcacgacggcatcggtaaaaccaaaagcagcaccaacgacgccgacaaagacgacgacaacaagtacaacaacgccttcaacagtgccatcgtcgcctgctgagggcaatgccggcggcagcaacgccaagggcagcggcgacgcggtcagcagcagcgacagcagaaagttcgccatgttcgctccgctcacgtttgtgccggtgcagaaatcgttgctggtccgtgaactgctcgaccagcgcgaggtattgtggttttgagtgggaaaggtacaaatcgccatggctctttgattggttgtttggaaatgtttatttttttggcatttttacaattttgtaaattggtttatccagtcaggaatttttaaaattttttttaaccaactttgggtaagtgtaacagtgtagtttgccccccccccttctttttggaaaatttaaatttttttttgccataaaacaagttccaggggttttttttgtccattttccctccaactttccccccaaatcacacagattgattggctgaatcgctaccacaaccaatgcctggaggcggtgggtcgctacttgcaggagaaaagcatgcaggaggagtacaactttttggccgaggcgtgcacaccattc

SEQ ID NO: 82418 - DNA, 2125 bp, Heterodera glycines
  unsure (1)..(2125): unsure at all n locations
atgggnaagcaacgaaaagaaaagaatgaaaaagcttttgtgcaatgtaactgagttttcatgaaagattttcaagactagaaataatttgttttagcatgaatttgtaactgcttccgatgaaagtttaaatccgtcagagtccgaaaattccgctgaaatttttttcgatacaaatgaagaccaaattgaagaattaattgagaaagaaagccaaaattataaaatgaatgaaataaaatcagatgaaaaagaggcggaaaaatctgaggaaaaagagaaaataccaaaaaaagaagtaaaagaagaagaggaggagaaagaaattgaaggacattttgaatttaatgaagaaatggaagaaatgaatagggaaaatgagcattggattcagaaaagtcagaataaaaagtcaaaaggaaaagagaaaaatggcaaacggaagaaaaattattcgtcggaaaagcaaaaaaataatagcgaaaattcaattaaaaatgagaataattcagaaaatggaaaaaaatcgcttgaaacaaatgatacactaagaaaaggagaaaaattaagagaaaatgtcaaaaattcgccaaagaatttaatggagagaacgcgtgacatcacttgcattgtgtcactgaagaaaatgggaatttccaaactgattggtaaaataacaaagctaatgagttaaataattagcacactttcagatttaatggacgaccattttttgactattttatataaaaattattttgaagacaaatttggcgccgaatgtgtgccatttttgcacatttctctgcttggaaaggcaattgaagcgaagcgcaaatttattgaaaaaagtgcaaaaaatgaaattgcagaaaaaaacaattggaaaaaatttaatggaaaatggaaggaatttgtcggcattaaattggacaaattcgaaacgatgcaatttttgatggagaaattatattttgtgcacaatgaattggatatatatgttcttgagtaagaaaaatctaaatttgatcattaaataatatttataattaaatgatcaaaaaatatctatggaatattataattaggacgaggatttttaggagcgaaattccaatttattggcctaaatagtggcgaaaattttgaaaaatctgtactttttttcaaaataatataacttaatcaagaattttaaatataaaaaaataatttcttcttttttgaataaaaactaaaaaaaatttcggttttacggcttattctgtagtataactggaaactattaataaattaattaagaaaataaagagcaaattaaatttagtgagcaaaatgaaaggagtttaattaaaacaattgagtatttggaggcgattgaactgatgaaaattgaaaaagaaagtgccgaatttaaaacacattcttccaaacaaaccgtgtcaattccccaaaatgataaaaaagctaatgggctaattaccacccaatttgggtcattcaaaagcacagaattcaaccaaatgttggacattcttcacacgcacatattttcagttttggtagcaaaaaatgtgcaaaaaattaccgcttcaaacgaatcggatgaaacgaaatgcgcaccaaattggcaacgttattattcacacataataaacatggaacggctgaattcccttttcaaaagtgtggaaaatttggtgaaatccgtggagaacattgaaaagatggaaaaacaacagaaaatcggttaaatgtcttttaattattattttttaaaatgttttaattaaaataggtgcttttctttataatgatgaccatttttttgattaccatttaatccgaacaactcaattcactcgtgaaagtgaaattaaactatcaaatgaggtaaaaaaagaaaaagaagaaaccaaattaattattatttcaattcttatttttaattagtttatccaattcatcgctccgtttgaaataagtcaaaagaagaaagaaaaaattttaaaagtaaaaacacaaattgaaaagctaattgatgagtgggcaacaaaactcggctcaatcggtaaaaacaaatttactcacaaataatttttagactttttctgaaacaaataaa

SEQ ID NO: 82419 - DNA, 1152 bp, Heterodera glycines
atgttgcaattttattatttttttacgattttccttttattccttccacttttttcgagtggtgacgaatgttatttccattatctaagagatacaaagcttgaaaatctgaaaagtagaccacattattcagtggttatgcctcaatgttttgccgatttgtttaggtgagatttttgccggtgtttaccggcacctgtgaacccgaaaaatgtttcttaattttataacatttgaaatttttaatcagtttttattattaaaattaacttttaaatattaccatcaaaagcatatacatattttttatccctttgccaataattagttttcgaaaactcgacgtgaaatccaatgccaagacgaacaaaaatttggaatgggttgaagccaaagatgccagggcattcaagggacaactgtatggtgttgaaacatttttggacttgattttagcacgaggccaaggccttttcgattggcgcacttcaccatcaaaagaattgattgagcgacaacaatggcacatcaaacgcctcaagaaattagctgaaaaacaggaggaggccggcaagcaaaaacaaaatcaacaccaacgacaacaaacacaacatcagcagcaacaaccggaatttggccatgacacttacagtaaaaaaataaaaaagaattcagagattaggaaaataaatctttttttatcagaaaaattttaaaaggtcttaggttaccaaccgttcctccaagcgatattatctcaaaactcttataatgaccggttttttaatcacatagatcatccaatatggcaaattggccttttcaaacggataaacaaagaatcggttgaatgtaatgaatgcaaagacactttgccattgtctgatggaagcctcaatcagctcaagcagcatctgtcggacaagcacagcgagaccgaatatgaaagtacctacaaccaaatatacaaagagttgaacgaaggtacacgggaaaatcttaagttttactgatctaaggtacctctggacattcttttatcgatcgaaggtaccggaaaattcttaattttaccgatcggcgagacctcggaagattcttaagttttacctataagttttttagcaagcaacagcatgctcaagtaataaa

SEQ ID NO: 82420 - DNA, 1036 bp, Heterodera glycines
atgtccgccatgtttaagcaaaacaaacgcatggagcgggtgcgtttcgcacaactgccgaactggttcccaaagagcttcgggcacgagggggtcgtccaaagtgttgatgaaaatctgaaacaattttatttatttaataaaaaaatttaggtttttttttgttcatttttaataccaatcataggaatttttatgtctttaatgcgtggaaggcagcttatatgggaatagaaatccgaaactgaagcaaagttgtgcacccgacgactgtaaaattcgtcaagccaaagaagcgaagtcgacgaccaaagtttctgaaaagataaataactgtagctgttttttaaacaaaataattggtaaaagacaattcgttaaaaccattcacataacaataaattttatttgtagttttaaatcttcaaagaagataaaatcaatttaattacagaaaaatttatttttttaatactttgaataaattttttatcttttctccctttgttagaatattttcacaaaggtttcagggtcactcgatatgaaaatggaatctttttttatcgataatgataaaaaatcaattccataaaaataggtttttcaaatacaaatgcgaaaattagccccgagtatattcctaagttaaaaaatttagaatttcatccactttccttctgaattggtcaaatggatatcagattcgtgatcagcgacctcgaaaccccatataaagtagttttacaattgttattcttttgaagaataggggaacaaaccaaactattaccaagttttctaatatttttctttctacgtttgaaaatattttttaaaataaaaattttttaagttttcaggacagtaaaatccatctcataccccacccgagtgattgcttactcgttcatccaccaatcccgacttcacatggggctgaacaaccattgcgtaattccgccgaagtaatcgtttaacactttcagtgatgatgtaattgtagaaacgtcgcccgccttgccaatcgaataaa

SEQ ID NO: 82421 - DNA, 1361 bp, Heterodera glycines
gtggcaatggtgaaatggaagcgatgttcagggttcttgccaaggtgtacccgcgaacttatttcattggcattggctttagtatgggtgccaatgtgctgaccaactgtttggcttctggacttgatccttctatttcttcgcgcattcttctcggcatttccgtttgccaaggctattgcgcttcggagtgctttgaatcgtttttttcacctttaattttcccttttagtgcttcttcccttttattcgattggcaaggcgggcgacgtttctacaattacatcatcactgaaagtgttaaacgattacttcggcggaattacgcaatggttgttcagccccatgtgaagtcgggattggtggatgaacgagtaagcaatcactcgggtggggtatgagatggattttactgtcctgaaaacttaaaaaatttttattttaaaaaatattttcaaacgtagaaagaaaaatattagaaaacttggtaatagtttggtttgttcccctattcttcaaaagaataacaattgtaaaactactttatatggggtttcgaggtcgctgatcacgaatctgatatccatttgaccaattcagaaggaaagtggatgaaattctaaattttttaacttaggaatatactcggggctaattttcgcatttgtatttgaaaaacctatttttatggaattgattttttatcattatcgataaaaaaagattccattttcatatcgagtgaccctgaaacctttgtgaaaatattctaacaaagggagaaaagataaaaaatttattcaaagtattaaaaaaataaatttttctgtaattaaattgattttatcttctttgaagatttaaaactacaaataaaatttattgttatgtgaatggttttaacgaattgtcttttaccaattattttgtttaaaaaacagctacagttatttatcttttcagaaactttggtcgtcgacttcgcttctttggcttgacgaattttacagtcgtcgggtgcacaactttgcttcagtttcggatttctattcccatataagctgccttccacgcattaaagacataaaaattcctatgattggtattaaaaatgaacaaaaaaaaacctaaatttttttattaaataaataaaattgtttcagattttcatcaacactttggacgaccccctcgtgcccgaagctctttgggaaccagttcggcagttgtgcgaaacgcacccgctccatgcgtttgttttgcttaaacatggcggacatttgggctttctcgagggcaattctctgaggcctcgctcgataacttggcttgaccgtttcatcctccaagtggctgcggca

SEQ ID NO: 82422 - DNA, 735 bp, Heterodera glycines
acaatggagaaaattaaaaacaatattggcgactcttacgtttggatttcggtggacgaaacaacagacaaaatgggaagagcgatggccaatttgctgattggaaaattggatggacaaaaatggcacaacccacatttgatttccgtcaaatgcttggagaaagttgatagcgcggcaattgctcggttcatcccgttcccgtttcccgtcttttttgcccggacgggatttttacgggaacgggaaaaagccgggaatcccgttcccgtttcccgtcccgtctttttgaattcccgttccccgtttcccgttcccgtcaatttttcttaaaaaacgggaataaaaatacactggtagaattgggttttcagatttaacttaggcattttgccaaacaaaatatttgtttttgagttagtcaacaacaactcaagaaacgtatgcactattcatatgcacactacatttttgcttctttttaaaaaatcaaaattaagctttaatttcttgtcaatggctccatatcatcctatttggaaaattggcctctttgaaaggagcaaggagaacgacaaaattgctgaatgtgtcgaatgtaaagcccaaaaacaacgcaaattccaattcaagctttccgatggcagtgtttcttctttgattggccatctcaaaagcgacaagcacaaaaattccgaatacaagaacaaatttgacgaaattatcaagacttaa

SEQ ID NO: 82423 - DNA, 1330 bp, Heterodera glycines
atgactcgcctagacaaagctatcatcaacctaatctgttgcaacaatttgtcgtttaacttggtcaatagcccacagtttcgagtattgtgcaagccatggagtgaacagctaaaagatgaatcacattaccgcaaacttttgcctgttgcaagtgaactagtcaagggaaagattaaggaggaattacgaaaatgtgattcattttcgtgtacatcagacatttggagcgggccaaatcaaggatttataaggttagctgaattttaccattttcttttatcaaaagttaagtctgacaatcgagggagttacaaacaaatgggaacgtgtgagacatactctcgcaattaaaccctttcccggcactcacactggacgtcgcgttgcagaaattttgtccgaaattattgaccaatgggaatgtcgagacaaaattcacacttttgctactgatggaggaacaaacatgaaaaaagttggttattagttatgggttgtaaatattcgttttttgcaggcatttgaggaaaaaaaacgaaaatggtcgaattttgcctttttatcgatcaaactgtgcggcgcatttattggaccgtgctatcaaaaatagttttggcaatcgagagggagaaatatcgggacttttttgtatgaaaacgacaatttctttaaaatttttcttaataattaagcaaattgtcgtcggattgttggaagggttaagcactcgattaaagcatttacagaattgaacgaagcacaaattgaggagggacttccgcagcacaagctgcttcaggtaagctgaattccggaataaaaacaccagtttgctgtaaatttaggaaatggcagttcgatggaattcttctttgatcatgattaggcggctttctgagcaaagggctgctattgaccgaatcgcatttgaacagaggaaatttgaattgactttgcaagatggcgagtggcgactgcttaattcactggagatgctcttggcacctttggaagaagcatcactttatttttgcaaatcaccgctttcaactcaaataccattttcaagagcgttgctttcacaattaaagaatttggaccttcgggtgaatatgtgaaaaatggatatttacaagggaattactgaaattgaagaaaatgcgttcaaagcttttggctggacttgaggaaagattcggtccatttggagaaatgagaagtgtgtatatatttttaaattttcttttaaatttcttttttagattacgatgctctttcaacattcttggaccctcggtacaaatatttatttgcaaatgacgaatga

SEQ ID NO: 82424 - DNA, 2011 bp, Heterodera glycines
atgccctatctcttccgcccctcgtccgacatcgtcaaacccatctttttcgaatacaaatcagcaaattccggcaaaacgcaccatggcctgcttttactgcctgcaaatcgcaatgggaccgctaaattcccagtcattcacgcggtttatgccggcccgagcgtccaactcgtgcgcaacagttggtacaggtaaataaaaataccgaacatttaccaacggtaattaattaattactgcggtccttttcagtgtttgtcataatttgaagtacgtcgcctttggctacgccgtgctaatggtcgatggacgcggctcggcaaatcgcggcttacaattcgagtcggccatcaaacatcgcatgggcagcgcagagattgaggaccaacaggagggcatgcgcatggcgggggaacgatttggcgatctgttggacatggaaagggtggcagtgatcggtcggtggacaaaactggcaaaatatgagacgcacagtaacccatgcctttgtcctttcaggttggagttacggtgggtacgcctctctgctgctgttggcctgtttcccgggcacctatcgatgcgcgtgtgtgggaggagcggtcagcgattggcatttgtacgacacggcgtacactgaacggtgggcaaaacagaaagggaggggaggcgaagcaaaaacccaattcatagagaaatgtcattgggtaataaaaaaacggacagcattttacaggtacatgggaatgcccgacgaaaatgccgaggcttatgagaagtcggcactttcctccttcgtcccccgtctgcccaatgagtacgttttccgtcccctctcccttttaatgtgttaattttgtattgatttgtacagagagggacggctgatgattgtgcacggaatgattgacgaaaatgtgcacttttcccactgtgccaaactgatgtcggcactgattgccgcacaaaagccataccggtgaatagagagacaacccattttgttagaaattatcatttatttacaatatcataggcttatgctttttcccaatgagcgccacggcattcgcaacggcgaatcaatcgaattctttcacgccaacattctttcattcttcgcccgcgctttttcacccccgtcgacggcacttcgacaagaaaaaactgtgccgacttccgcccccctgtgaattgtgaccaaccgacgcttttttgttcaaattgacaaaagtcctttatactattttttgccacccccccccccaaatgcttcattacaattcattgaaaatgcctctcctcgccttaaaatgaatattattatatatatatattttttaaacagtcagtcatttgtttaacacaaataattctcttcccttccttttctttcttccgtttatttgtatgaaatacaatttgagcacaccgttcaaatgatgcaaaattcagcaataaaattctattgtaaaggaaatgaaatccctaaatgaatttgtcgcgatgaaatcggcaaaatgagaatgaattaatggccacgcggcatttgcctcctctctcactccgaacaacaaaagaaataatcaaaataattccaattgagaaattggaagacacaaaaaagaaaaggggaagtgacgagaaatttgcgtattaattatgaaataattaggaaattaaatggcatgtggtgacaacttttggggcgtattgagacgagaattgatgagatcaatagctgagtgaatagtgacgccgttctgttgaagttttagtggcatttggacgatgagacaagcaaaagacggagtgaaagttgcttttggcattgcttttccctcattttgcttttggcactgcttttccttttcctcctccgatcagtttttcccattgctttttctttccctctccgtcccttcccctttttcttttctcagagttcgtttctctgctgctgctcctcctgctcgcgcatcaccgtgtccaccagcagaagcaccgc

SEQ ID NO: 82425 - DNA, 649 bp, Heterodera glycines
atgttccgacaacatttcttgttgaccacaatgcttttgtgtgcacttttgtacccgattattattggagttggcccgccagcgtatttggccatttgccaatggaaggattgtgtgggtgaaaagccggcccccggtggctctcacacggtgagacacgattttattttattatttttattttaattaattgttttaaaaaaaatttaaattgtgacgaaatgatttgaatattgtttgtataatacaataaatatgagaaacattgcataattcaaatattttattcaaatgaaaaaccatggattttttgaactaaatcgattttataataattatcgtattcatattttaggattaatttaaaaaaacatattcatttatttaattttgaatttagatttaataaaatatttaaattaaatttatttgaaaatttttgctttattgaaattaagaaaaatttatatatttttaagatgatttgtttgcccgcgactcgtccggcccaatgtccagaagaagcttggaaccaactgacagaattgaacgagctggagccttgttaaatttccaaattagcatacaatggaaaaatcgcttttttaaaaatgacaaatttcggcaaattgttttatttttccgataa

SEQ ID NO: 82426 - DNA, 425 bp, Heterodera glycines
atgatgcaggttgtgatcaggcaaatgatcgcaatcaaaagcaacgcagcatcgccaatgtaaattgcgggatggactgtcaaaaatttatgtaatttaatccgtgatcggaaaatgcgtcgtcagtggaaaatgcgacagtgatacaaatatttttaaaatgaaaaatttctgtagcattagtattgtagtacaaaaggcgaaaagaaccttgttcgtaattggtaatacagtagtttgtaactaccttgtttaaaacaaattttcagcagtttgatttcattaaaagaagttccctctgggttttttgagtcgctgataacgaatcagccaattttggactacggcaggggtgtgatctgtcctgatttgtcagatttgtcctgatttggaggtagcgaccaaaatttgtcctgatttcttaa

SEQ ID NO: 82427 - DNA, 736 bp, Heterodera glycines
atgattctgccagaattgctggatatcatgagtcattttaaagtgaaaatcaaggacagaatggacaaacaattttttggaattattactggtcaattgttgcaccgtctaacagaaaaagaagaacaaacgttgaaaaatgctttcacggtagattgagctaaaatgtttttaaatattacaaattttcagtcattctacaaaacaactttggattatgtcgccaaatggtttcgcaccgaacgttatccggatcatattcaatggctttcgcttacagatcggcaactagtccatgagaatgtcattgaattggcctcaactttttcccctgatttatccgatactttgttcgatgaagttagtcaggtcaaccacattttgaacaacatcgacgcagcagaattcatgcgactgacaacagagtaaaaatggcaaagaattttcagcgctgattttcccagtctgtacaggctcgtaagcaaattaatgtcaattcccgtctcaaatgcatttgtggagagagtgttttcgctttgttcggcgcaatggacagatgtgcgaaatttgttgaaggtcgtcgacacagtgaagtcgctggcccaaatcaaagtcaacttcaattttacatgctcggaatttcacaaaatgcttatttcgaacaaaaaattgctcaaattgatcatggacgatcaaaaataccacatttgaacattttaaacgtgttttgaataaa

SEQ ID NO: 82428 - DNA, 206 bp, Heterodera glycines
attgaatgcacaggatgaagtgcgcaacacggtgaaggcgaatgccgattgtgagatggacccggaggagataagccccgtccctgatgactacttgacgaagtgataggtttttgaatgttaatttttttttgttgtaaaagcctggctctagtgcactttatgatccaatcaattgacaatcccgagtttttttttacaataaa

SEQ ID NO: 82429 - DNA, 1165 bp, Heterodera glycines
atggccatcaaagatcaggaattggttcaattcctcaaggtttgctgacaccagagaatttactccattcagcttttagaaacaagagtttccttctttcgcccattgttgcaaatacaattatttgctggccaacactgccgtcaccattccgttcggttacgcgtcctatttggtctacaaaatcggaggaggtgtcaggttttttgacaattaatggatgaaaatgaatggttcaggattcagttgcaccgactcaaaaatcgcattgggactgtacggtgcgacgctgctcagcggctgttttttggtgcccacactcaaaaaacatgatatcaaggcggtaggcaacctacatgttcagcttcctcagctccaagtcaaaccctttaagctgactgccaacgctgttgtccttgccggactttccggcgctacttcagtggctttctacaccatcgacaagatttccgcttattggacgtgagtgtatttgggagttgtgccggttatatttaccaattcagcgtgcccttcactctttgggccattttctgcgctggacttacggtgaaggcgaatttcgatgcgccgcccgcgcagccgctcgatgcgccgctcgcgcagccgctcgatgcgccgcccgcgcagccgctcgaagcgccgcctgccaacgacgagctcattctacagcaaatgaccatgctgagcgacaccgtccaaaacatgaacgacaattttgaaggtaaagaatgtcgtccctaacttcttttttattttgggttaaaaatcagtttcctagcgtttttgagagtgatggccacgaatatgaaatcgaatttgcccaattccaaatccctgacccgaattcgaacaaaaaataggtgttaaatgaattcgaagcttttacccaagaaaatgcatctttgaaaaagaatttcactttttcgaattcaagtccggggttcggattgggcaagtccaagttcagattcgtaagcagcaagcaccctcgaaacccctaaaaattatttttgatcccaaaattaaaaaaaaaaaatttccagatcgaatggacagaatggaagtgcgcaacaccatttccatgtgtgcctccattttggcgatcgtgatcagcggcgcagtttttttttgcaaaaagtga

SEQ ID NO: 82430 - DNA, 369 bp, Heterodera glycines
atgtacactgagattctggagcttgtcaacttctttgcacgctttttccatcttcgcgttccccgtttgaaggttttttcaatgcccacattcgtatattttacaatccaaaaaatttacacgattttcagattggaatgttctgcgaacattttgcaaataactgttttctccgcttccacctttattggaatctcaatcagcccaaacaatgttcgttatcacacaatttccttactcatgcaacttaagatgaagaactgcgtattatacgtgtgtcgaacgaatacaccgacgaactgttcacaaatgctgcgaatgctgttggtctccagttggatgagttgcttgcctgcatccctggtactg

SEQ ID NO: 82431 - DNA, 555 bp, Heterodera glycines
  unsure (1)..(555): unsure at all n locations
atgtacgtgacnncaggcgaagtgttctactgtcttggtgactattcgcctccggtgcctgtctgggtcgggtcagtctgtgcggatctcaagtacaacgagacgtccaatgtcacttttccgcctccgccaattccctcgtccattttgcccactcataccatccaaccgcttattccgcgtgccattggcggtgtctctgctacggtcgactttagtgttgtaaactatcgcattcagttgtcgttagtgcatccgcgtgagcttggctacgctaccaatccggtcagttttaaccccgtttttaatcatttgcccgaattttagtcgagtgattttgtgatgttccgttacgttgtccccggcactccgaattacaccgtcgaatcttttgcatcaactcgattcggttagtatgtttttgcatttttctattaattttcgcttttaggctcgtatcgtaagcgtccggactacgaatttgtcacccatcttcaacgttcgctgttgctgatgaacatgaacatccattcgtgctcggatgagagcacttaa

SEQ ID NO: 82432 - DNA, 2393 bp, Heterodera glycines
tttccattcggcaagccaattattcggccggcttttgggacgaattgaccgtccaatttcacttccaacggcgctatgggtggtatttgttgcaaggtgaaaattgggggggggggagacaatcacagaaaatggcaaattaataattgggaaatttccctcggcaggattttatccgacctttctgttcatgttcatcaggtcaggtggaaattcaccgctattcaaaacaagcaaattatgcaactaattgctaattaattaattgcctaattatttaacggattaattccccttgctcattgtcagttggatccctttttatttggggcccaaggcaattccggcacggacaatgatcggagtggtaaaaagggggaagagggcattctcaactcattctgacacaaattattattcgcccacagaatgccctcctggcgatgatcttccaatttggttttgtttgctctttctccccttttccattttcctccccccaggcgcaataattcgcaatttgccgcgcgttaattatgttaaggcaatcgattggtggattctttgcgggatgactttcattttcgccagcctcgtcgaactcgcggccattggatttaaagtgggcaataaaattgggagattgaaatattaattaattcgaactttaaaaaaaagatgagaaatgagggacggacgacgcttcgtatgaaaaatctgagcaaaaggggcggaaggcgcaaaacggacgcatttgtcacttgcgagaaattggactatttctcgagaatcgcctttcccggtcattttgggattaaatatgcgagggatatgtgatcactgatcagtccgattcagcaatttacacgctgttcaatgtggtctactggacttattacatgttcattgccaagtcgacgacgtgaccatacaccaacaccatcagacaacaaatggcaaattaatacacgaagaaatgaaataaatcattacatatcgaaatccgaattgtgtgcctttttatgaagtgaaaattaaaatgatacaataatattccgaaaagtaaaaacaggaaacaaaagaattgatggaataaatgcagcaacaaaaaaacaaatagaaggaataggccattggatcatttactgccgaaaagatttgtcggtttggcgggtgccgagcctttgaagagcgtcccgctgcttgccgaactgagcgtgttgctgaacccgccaaatgtcggctgtgaaggggcggacgaaccgccggcggaagagacggaagtgccgaaaagcgacggcacagcggacgctgagaatgggaaaagcggaaagataatcaaattcaaatcacgagacatttgagaattatcatcaacccaaatatgattaatggttttcattccgtaggccattttttaatattaagtttgttttgttagaaaaaactctcaaaggaggaattagtgaattaaatcaggtttttcgaaagattaaagtattataaccattcaagggcgtagccagacccttggctttgggggggggggctgaagtcaaaaattctatttttaggggtgtatttttcttttttaagtcgatttttaggggtgtatttttggttttttgaaatcccgaattatggggtctattttacaaaatttttcgccgtttttcgccaaaaaacccatgggtgggtatatacgcaaatatttgcaccgaatgaggggggggggggcaaacaaaacgccaacccgtgaaaacccaccgccagccgaagttggaatgactgctgccgcagcaccgaaaggacttggcgcggtggcagttgtggttggcataccaaaaggcgttggttttggtgtgccgaagagattggtggaggactgttgagcggagggggcgaaactgaaggcgggcgcttttgaggcactaaaaaggccaccaccaacagagggctgaccgaactgagctaaaaggggagaaatggacttcagtattgtgactggggggatgagccaagaataagttaaacaaaaggctcttaaaatacttactcatcccaaattggggctgtgccgtccccggttgttgcttcggaaaatattcgccaagttgcaaaagcgcattcgaagagggaaaggcgtcgatgcctttcagtgccgaataagcgtcgatcagtcgtcgccgctctttttgcttctcaaatgggtcaatcagtgcgaaatggccacccaatttttgtcggtgttccacaaaaatgtcgcgcagtttcttaaaaaagtaattgaaaagaataggaataaaaattaacaaaatgatatcacgtcttgtaaatctttctctaaagtttccggggttgctgatcatgaatctatcatctatctaaaccta

SEQ ID NO: 82433 - DNA, 151 bp, Heterodera glycines
atggcctacggaatgaaaaccattaatcatatttgggttgatgataattctcaaatgtctcgtgatttgaatttgattatctttccgcttttcccattctcagcgtccgctgtgccgtcgcttttcggcacttccgtctcttccgccggcg

SEQ ID NO: 82434 - DNA, 1025 bp, Heterodera glycines
atgtacgggtacaatgggatgggaggaggagcagcacaatacaacggatacggcggagggatgggcggagggatgccgcaacaatgggggacaatgggaggggcacagcagcagcaaatgccaaacggacgaggtggtaagctagcagcagccttattaagagggtaattagtgtaatgactatgcttggtattccctaggtcgctttacggagggtattaaaaacgtggcaaacagtgcgatgaatgccatcggaggaggaggaggggcagcgaacggacagcaggggggaggaacttggggaaaattggccaaaacggcaatgaacgcggctggaatgggaggggggaggacgagcaacggacaatggaacggaaacggacaacagaacgggggaaggggaggaggaaatggaagaggaaatggaggaggaagaagagaaaatggaggaagtggagggagaggaagaggaaatggaggaggaaatggggaaggaagagcaggaaatggaggaggaggaaatggaggaggaagaagagaaaatggaggaagtggagggagaggaagaggaaatggaggaggaaatggggaaggaagagcaggaaatggaggaggaggaaatgggggaggaagaggaagaaatggaggtggcagcatggatgaacaatacgacgattatggttctgattatggtgatgaaggaacggaggataattattatgatgatgctgatgaagatggaagagaagggagacaaggaagtaatagtgggagaggaaggagtaggggaaatggaagagaaaatggaaataataacggaaaaagaaagcagagagaaagagaagaaacagtttatgatgatgatgataatgaggaggatgaggaggaagagggggattataataatgatgatgatgaagatgatgaggaaggaggggagcagaggaagaatggccgacggagcagtggcacacgagcaaagagaaggaagaatgaccaaaggagcagtaaaggagaaaaagaga

SEQ ID NO: 82435 - DNA, 613 bp, Heterodera glycines
tgatccgtcgaagagtcctcaaaagatcgtggcagaagccgtcaaggagatggaactttatttcaacgcactgaacaacgcgctcattaagcatttgtctctcaacatcaacctaaaggcctatgaggatttgtctgtaacattggacaatggcgaggttttgttatagggttttctataccacccacaagaatacaaaaaataaactaacgttttggaattatttaaaaaggttactatccccattcacaaagttttgaaaaatagtagttgtgtccagttggagattttactgggcatcctttccggattcgagtcccagaaccgaattcgaaaagaaagtcccatttccaaatatatttttgttttttgtcgaatttgtgttttaaaatttgctcactttttaccctccccctccccttacagacccatcggctggtcaagttcgcgcgaatttccctaaaaacacctaagggaccaattgtactcaatttcgcagacaatcctgctgcgataaagccggcacgaattgccatccaaaatatggcagaaaatgtcactccacaagtggacgggattgtcataaatgtgcaaatcccaaagatcacaagag

SEQ ID NO: 82436 - DNA, 1288 bp, Heterodera glycines
atgcttctgcttgtgcttctcctaattttgcttttcccttccgaatctcttcaggctgccagttttatcactttgcattgtcaagtatttacaaaaagcaattaataaaagttgcaaaaatgtgctttgccagggcaatggcttatacgtttcgggacgatggaatgaaaacggacagacggcggatttgccacttccatccgaactcacaatgcaacgattagctcgtctaattaagtgcttatttatctgttacatttgctttgaaggttcgtgtcgagaaaaaacaaagatggcaccgtttctttcatcagcaattccaatcgaatgcttttgacagttttgccaaatgcatttggacgcattgttttggctcagcataatcaaccgagtaatcattcaaactcctgctgatttgatgagtgccttttcccaattattcagctgatgggtccaccaaattcaaattaattccctacacggacggcacttacgcaattaaggtcaatttggaatgaataaagtcgaaaaacactgcccaaggtcaccaaattcaggcagcttccattggcaaatacttgagctgccgcaattacgcctatcagctgttcgccaaccgggaaaaggtggaggggcccttcgaaaggttttacttggacattgtgacgacattggcggaatttgtcaccgcaagagttccgctgaaattgcgacacttcaaggcacaaagaaaacatggataaaagagcaaaaagaaagataattcaagaaaaagggctaaatactgcgtttagaaggaaagaacaatttatttattataaaattacaaattcaaaaattaattttcttcaaagtataaacaaaaaaatgaatcgaatttctggtgccctccgattgacccctaattgtaaggaatacgtccacagcagatggacggcgtatatttgagcattgcgtccaagtcaagtcactttcgctgttttgacgcaaaatgtccaaaatctcattattaattttaaatgagataagtagagaaggagatttccgaatctgccgggccgggctgactttttcagaagcaaccggttaccgggcccggtctcccaaaaaccggtgaaaccggattttcaaattgccgggcccggaaccggtttggtaaaaatttaaattctcacatgtatttcaaccccaaaatcgacaaaaaccgtgtcaactgttaaatttcggctatatgtcacttcagtcgcaaaaaaaggcctcttcaatttataaatcataatttttcaaa

SEQ ID NO: 82437 - DNA, 1241 bp, Heterodera glycines
atgcaaaacgaacagtacaaagtgattttccttttccttttgctctgttcggtcgaaatcgttggaaagcgtggcgggggaggaggcgcaaggttcggcattattctaaaaatgcaacactaattctttctctttttccgttcagaggaggaggtggctttggcaggtgcactatttgaccctttacatttggtctacttctttattttggttttttaggggtgggtctgcggctcgcgcgagttcggccagccgtggcggtgggctgttcggcggcagtggcaacagtcgaagtggtggtggttccggcggtagctggacggcaccgaaaccgaattatggacagactggcggaggcggattttccaacacatttagcaaaggcacacacggaggatcggcataccgaacgcccaggcaagacgggccagggcttggcatgacattagtgcaatttagtccccttttgggtcaaaaattcttttttaatttttaaaatccaattgttggtcgttttccaacgtgattcttccttggattacacccaaagcgatcattttgttttcttttgtagctcattaaattttctaaaagattattttatgcttgaatttatctatttaattatgcttccaattttaagtgtctttgtttttagtttttcccgagggagtggagtcggctcacagtcacgcggcaataccttcaaaaatatgattatcggtgccgccgccggggttattgcttacgaggcgggcaaagccatcattcgttcggttgcttcgccgatgcagtgagtcattcaccaaaactgttattttccgagtgattgttcaccattaaatgcaatatttacttgtcattctgctcattctcactgtctttcagctggggcggtcgcaattactactggggttcccagtattaccccggaggcggaatgtcttccggtcggacgatgtgccgaatgccggttgatccctcggacccgcagtttggcaacgtgtttctgccgggaggacagtcgcggcccaaagagattgtctggtcgtgcaactacaacgaggcacggacaaaccttttcttaattgaccgctaattacccctcccccctcctttagcaatgttgtggctacgaatgctgtcctagcggcggttacggcggttggaactcgcgtccgggggtcggaatggggtatgcctcttggacattgcctccactgcttttgttacttttattc

SEQ ID NO: 82438 - DNA, 1251 bp, Heterodera glycines
gcactttacgctcgcgtgttggaccgtcagggcaatttcacggaggcggcgcagcgttaccacgagctgtcgctgaagcccggactgattccttcggagaagcgccaagtgctgcaaaatgcgctcacctgcactttgctcgctgcgcccggtccgtatttttttgggcattgcgagactggtcaataaaatgcttcacccctcttatttattatttagttgtatgactgaattttcagtttttttcataagttcgcttttccctaagggacccaacgcaatcggttgctcaacactttgttcaaggacgaacgctgtcagcagttggtcggccattccctgctgaagaatatgtatttggaacggctcgtcaaagggcccgaggtgagaattttttaaatttcaaactttgaaaattttcaataaaatgtcttattgtttaaaattttttaagactttcaagaaaaaatttttttattttctagcaatttttggaaatcaccataaattaattttcaaaaaagaaacgctacaaactaattttcttgaaaaattaaaacaatacgttttagtttttaaattaggttgcgagtttttttgtggcatggcttgaaatacacgcccatttgaatttggcactttcagctgactgagttcgaactctctctgtgcccccatcagcgtctgctcgacgccgagggcgtctcaattttgcagcgttcggtcctcgaacacaacattttggccgcctcgcgactgtacgccaacatttcattcgacggattgggacaacttttgggcattcctgcggcaaaagtgatttagaaaaatggaaaatgaacgccaaacggccaacgaatgaaataatttaaggcggagaaagtggccactcaaatgatttccggggagaaagtccaaggggcgattgaccaattggagcggacggtttcattcgaaggtaaaatgccggaaaagtggcgaaaatggcactagcaaaacttttgattttttcattcatatattttgccttaaagttttcttgaaaatggccatttaacctaacaaattattacgcactcttttcaagtgcccgattcgtccaacggtggcgccgattcgcaaattgcttctatctgtgagttggttgcttcgatcaacgagaaattggctactcgcttctcggagtggcacaccgaacgattcaacgcgtacaaaagagcacaccaacagcccaatgatcccatgcaatag

SEQ ID NO: 82439 - DNA, 105 bp, Heterodera glycines
atgcggacaaattgtttggctctgagttcgctcgccattttttattctgccgttttttctgcaattggtgcgccagtcgaaccgagcacaaaagaaagggcaaag

SEQ ID NO: 82440 - DNA, 1663 bp, Heterodera glycines
atgcacagatcggacaccgttaaaaacattatggagaaagtccacgagcagcagggtattccgatcgcagaacaacggttgttcttccgaggagttctgctcagggcggaaatgcctattttcaagtacaacagccgagaaaatgactttgtgcttttccttgtgccgtggatttccctttcaaggtcagatagagaagaacagtttttccaagaggatgcttaatgatagattaaaaccaattgatatatctgaagagtcagggtcggcagttcagctggtagaacactggtccggaaagccagagaagccggttcaaatctaacccgtcacatagtttcccctcaagcttctatatctcgttcataaattcacagataatagttaaacggggaaaataatgatataattaaatctaatttaatattccatgctaatttttgtcataattaagaaaggaatacaaaataaaagtgaaaaatacaaacggaaaaacaattggcttgaagattgatgcgtcggataccgttcagaatgtccagtggataatcgaggccaagacgggcattccgaaccgataccaaaggctcttttatgggggacgacttctggataagcgaaaaacattgtccgactacggcatcattaatattttttacaaatggcaagaagtccgtctcgaagtggaggagccgaaagaagcgcgttcttttggtaagcaatcgaacgttagcacagggaataaactgagtggacgactaccggacatttaagtatttgattatttgaggacccccgacatttgaggacatcaaataacccatatctgtctccgattttcgtgtcacagccgattcaacagttagctttaattatagtaaatttatatttgaattagagaaaatgattcaaattaaccaatcagattaaatataaacgcaacaaacagatgaagcaaagtccgaaaatttcgggtcctcaaatgacaggttctcaaaaggcggatccccaaatgtcgtgttctcagtatttcggaatctcaaattcggggttaccctcaaatctcagatctgcaaatgtcaaatcctctatcccactgcgtagtgcataaatattggcttttaacttctttactcggcacagttcttgtcaatgttagccagtaaatcttaaaatttctttgttcatgcacaattccatgtgcacttgttcaattagtaattaagccaatgattgttaattactgtacatatttagaaattacgataattctattgggacaaaaacgtatcaaaatgagagtgaaagaatggaacaccactcattacataatgaagaaaatgcaagaaattgaggacattccgatgattgagcaaacgctgctgtttaaggagaagcggctgagggacgacgaaacgttggcacaacaccaaattctgaagggagctgttgttgtactgttgctgagccaaccaccgatcacttatggtccgaatttaatgcttatgacagagtaattagggatttcttgaataagatcttgaaaaaccaggaagttcgagtttgaatatcgagcagagtttaagtaaaagggcgcaattcggcaacgaatgaatttcaaattaaatgttttattttatgggcctttttaatatttaataaa

SEQ ID NO: 82441 - DNA, 1003 bp, Heterodera glycines
atgcctttgatcggcgcctcctccaccggctccttctcctcctccttctcctcctacttctccccccgcgtccgttctccgttcgtccctctccgtccccgcgcccgtcgtctgcccaacgaattgcttactgagttggccactttcgcgcactacgactttcttgagctgagtcgcgccgcaaattcgcgtctgcgcggactctaccggccgattttacagcgaaaggacgcgaaggtgggaatataaaaggaaagaaaaagcggaagatatttccaatattcattgtatggctttaatttgccatcatcactttcagttgtgcgcgttgttcttcgacgacgtccgttcgttgtccctttggtttaaaaattgggctgtccgttccgacgctttgcgaaagtttgtcaatctccgcgccaccgtggacagcaaatggtgtgaggaggcgatgcagacgaagcccgacctttgggcggtgaatcgggcgcgagtgacttcccgcggactgatcgccgacctgcgcgagttgcggaaattaaccgacgaactcatcgccaccacccataaagtgggaatacaggcgcagatgaatagcctcgaaaattcaattcgattttcgttttccgatctctgccgagggtcgtctgatgcaaagtgccgccgccgtttccgcgccgcgcgattggctccgcgtgttcggcctcggctcctcttcctccgtccgtttccattctcagaggtcacttctcatcgccaaatcgttggcggtgcccaaaacggtggtggaccggtggctgaacaaagacttgccgagtctgaaggctttggtgcgcgggttggtccaactgttgcgcgacgacttcaaagacgagtccatcacgtgccaaagtcgtaagtttcggattccgatcttttttacgttttcttgattaatgattaaatcgcttttcagagtacaccggctgtatcaacgttctcaaaacgtgcgacactcgtctga

SEQ ID NO: 82442 - DNA, 341 bp, Heterodera glycines
atgtcgtgccatggtccgaaagcaaaagtgacaattgtgagctttgcaaaatacgctttacaattactcgacgaaggcaccgtaagtttttggctttgtgtaatttttgtaagaaatttttatagattgtcgcttgtgcggtgcccaactttgtgcttcatgctcccaatttttgactatcaaatcagcgcgtgagtttggtgaccatttctgataaaatgtttggcgctagttaaaaagagcgctcttttgaaaattttttcactttttttgagacttttttttttgtttattttacatataatgatgaatattaagcattaacagcacaattatggcga

SEQ ID NO: 82443 - DNA, 1032 bp, Heterodera glycines
atgatttggaactattttgctttttttacaatctctttgaactccgtttttggctttttatcaattggtgaccaaaatcacggagccttggacaactttcagcaaaatgtgagaattttcgaattattttctactgattttgaggggttgaatcttggtaattaaaatgttctaatctctatcaagaaaatttaaaatttgcgcgtcccgctgcggtttggaactcaaaactttgcgggacgggatcccgaaagataaatcccgcaatcgcccatttaaaatttgctggatcccgcacgggattgcggcatttttaaaatttcggaaaaattttgaagtaaattaaaaaatcgtcaaaaataaaatatatcaattttgaagaaatttttggtgctggctttaaatgggctcccaactctgctttggtgttttatgttgattttttgatacaaatcctcaaaacgggttttttttatgtatacctgcacgaaaatcctttttggcggtttttagagcctaaaaaaattatcactagccgtaagtgctttctaaaagcctgaaaaactaactcctttttgtcttttaggctaatcatcttattaaaaaaagtgcccaaaaaattgcattgtcgttcgacatgggaattatgccaaccgtacgacatagcaccaagatattttacaagtcccttccgcctcgagtcgtttttcccatgctgcaagtgttagttcttctggccatttttagcggaattattgcctcttttttgttcctcgcattgtttcgagcgttgaataaaggcactcaattcaattttcgtttgtcctttctcggccgacgccgttcgccctcctcatccaacggcacgaactcgcgcgttcccatttattcctcacaatcggtggttgagtacgagacactcgtctaagtgtgagttcacatcttttattgaactttacaataatgcttaaatttcttcaaacgtttttatattagaaaattgtaatataaaataattttgatacaaataaa

SEQ ID NO: 82444 - DNA, 1646 bp, Heterodera glycines
atgattcacgaaaacgtccggcaaaatggatatgaagaccatgaaccaccaccatccaaacaaaagaagtgtgtgtttgtttaagttttctttgtgcttttaaattttttgcatattttatgaattggcagtagggccgagtaaaaaatgaattaacaagtgaatctttggtgattgattgttagcttaaatttagggagactggcccacttactgtggaagtaaaagcgaaggtcaatggccaagtatccaagcttacaatcaaagtaccttttttataaaaaattttagttttataattttcttaatttaggaaggcatttcttcagtttcggacctttatgagatcatcgtaataggtggacttgaagaaagtgaattgaccaacgaagtggcattgtttcttggtaacgcagccaaattcttatccggaaaaggtgcctcggtgttgtgcctccctggagactgtcgtatgtttaaatcattaaacgcctaatattaattctatgtttttcagttgttggcggtaaaaatctgactgcgatttcgtctgcactgttcagcaactgccgttttctccaaatgaccggcgaccatctgcagctgcttcagtcctccgcgtgcgaacgaatcgacgaattgcatttggtgtcaattttattcgaatttttgaatagctaaaattcatcttttcaggagctcaatttcactattttggacatcacttcgattgaaagtaaagcattgacaaaatggttgaccggcaaaaaggcgaaaaaaagctcaaaaaagttgctcattcgaccccgaagtcgtgaatttgccacgagttggattcgcaaattgcaatcggttagttcaaaagtttaggtctttcccctctttttttctcctctcccacttttccctctgttctctctctctcttgcttttcttcaattattgcaataattcttgtttaggatcgtctcgacaacatttaccaagtgcgcgttcaatgcgagttcagcctcgagcaattctccattagttgtggcgccaatggaaccatgaccatggaaatgcgccaagacgggcagaaggattacttattgaacaaataccccaccggagaggttttgctttgcttaaattttcctataaattggctgttaaatgatagaaaatgccgccgaatcacgcctttcagctgaatgggcctctcattaaggtgtcctttgttgcacaacagaaatcttgaggtttggactgtttttgctgaatttaaaggtgttggggcagggaaatagacacagtttgcattattttgcaaattttaattccttttttcttcagtgttgcttctgacgcggttttattcaatttctgaaaatggatgaatttcttgctccggatgatcacattattttttgtcttttccctcactttctttttggttgagtgcgttttatttctcattttgcttttgattttctccctccgttggtgcgcactttgcctttcttttttttgtaagcgcattgaaaatgtttttgatccccccaccgatctctccattttctttgcctttgcattttcaattcgtccaatttctttggttatttattttaatcaaatgagttttcattgaatattttcaaaataaa

SEQ ID NO: 82445 - DNA, 61 bp, Heterodera glycines; identical to SEQ ID NO: 61697

SEQ ID NO: 82446 - DNA, 282 bp, Heterodera glycines
atggcttcaaattcaattgcggcttcgattggtgtgaagttgaagcgactgaattcgatggcatttgaattgatttgggcatatttttctgctgagtattctgagacgggtaaacgggtatcattatcatttgctgattttctggcaactccaatgcgaactgattcgagttggatggcatttgttgttgtggcaaattgggcaaatttagccgcggaaaacgaattggtgccgggggttgcgccggcaattccttcccccttagcttgttgcttggtttga

SEQ ID NO: 82447 - DNA, 274 bp, Heterodera glycines
atggccaaaaatgccaaaaaagggacaaaaacagtggcggatttcattagatttaaatttcaagaatgtttaggtaaatttttataatactatagctatctaaatggaatgcttttattttaagggaatgggttagtaattagtgaggatgatgatgatgataatgatgatgatggtaatgtggctatgttagcctctttaaattaatagtggtgccagctaatttatgaatattgattactttttaagcaaaactcaacaaatgagagagaga

SEQ ID NO: 82448 - DNA, 225 bp, Heterodera glycines
atggtggcgagtgtgtacagctcgcagacgacggcaacaagaccaacaacaataagtacacttgccgctgcaagcgcaactttcgcggcacacgctgtgaacagcgcgtggacgtgtgcagcgagcaggaaccgtgccagaatggcggcacatgcatgccactgcagtcggcagaaagcgacggcggcgacgactttcgctgcacatgcattcccggcttcacag

SEQ ID NO: 82449 - DNA, 298 bp, Heterodera glycines
atgacgaggccgaccgcggtgaagcgtgtggcgttgctgctggcgtgctcagtaagtttggcatgcacattcccccattggcacatggctggtccctaatttttttaaaattaattttaaattataaatttagaaaaaagcgtttttaatatttgaataacatgaatttaaagtttaatcaaaaatgggcaataatataaaaaaatctgtaaaaaatttaaaattaccaattttaaaataatttttttattattttaaaaaaagtgagaatgaagaaaatattttaatatcttatata

SEQ ID NO: 82450 - DNA, 869 bp, Heterodera glycines
atgcttttcatccaccgagtcactgttcaacaggattgcagaaatcccagacggattgtttggcggaaggaccccgctgggcggacaaatgtgcgcaaaacggttcgaagcggaaagcctttacataggtaatgtactggcacaaaaatgtgtgaaaactcaccgcactgtcaccgatacgggattgagaaattgttgaaagaaattatttattttaattaaagtcagaatgattagggattgggttggtttttggcaaaaaaaactcgcatattctgattttgataaacccccggatatatataattaaatgaaatatttaataaatgtaaagatcaaaattattttggttgcaaaaatttagcggttgtggattgtgttaataactgcccgagttttccgaacttttgtgacttaattgacctcggtctgagcccgaacgatgctaactacgcaagtttttcattatcagtatattaaatgtaaattatgatatttctttaaattcacaaaccaattaattaaatataaataataaatcaaataaaaaaaaacaattcgttaggttgttacgctgcttgaacgctcccgttctgctgtgcaggactgcatttactcacacgacgccactttggaggacctgaaaacacttggcctgtgtaagtcaatgacgtatgaagcatagaaagaaatataatcataaatttataattaaaaaaattaatttatttttttcacaattaatattaatttcaatatatttatgaaagaataatttgacagaaataattaactcattttttacagttcttcgtacagagaatagtcgcattactcgtggctacaaaattggaattggaatggcttag

SEQ ID NO: 82451 - DNA, 1137 bp, Heterodera glycines
taattaaatccattccttcgggggaccgtgccgggtgccgcggggtaagcagtgctggttcgtttcatcacggcaccgaaccttttggctagtcagcaatcgttgcttaacttgccagatcggacgggtgcgcatgattccactgttccaagcaccccaccaaaagcaaaacgatataaccaaaatataaggaaaaatttttaaaaaattttttctccatcttcctttttgatactaaagcatcagagtgctaaaattaacttgtaaataaaatttggtgcgctttagagcactttctgaaaaaatatttatgaaataaaaaaatcgatttattcaagtgtccgtttggggtactcaaacaattatggggagggagcaaaaatccaacgcagaattaaagtacaggctatagggaagctattccggaaggattcggtctccccataaatctgggcgcatcggttcggggggactgccccgaaaacaaaaaaatcgattttttcaagtgtccgtttggggtactcaaacaattatggggagcaaaaatccaacgcagaattaaagtacaagctatagggaagctattccggaaggattcggtctccccataaatctgggcgcatcggttcggggggactgccccgaaaacaaaaaaatcgattttttcaagtgtccgtttggggtactcaaacaattatggggagcaaaaatccaacgcagaattaaagtacaggctatagggaagctattccggaaggattcggtctccccataaatctgggcgcatcggttcagggggactgccccgaaaaaaaaaaaaaaaattttttggataaaaattatttaaatgaactgactagataatatttaaaataggttatttctcttcctttcagtatccctgcaaagtttggtgcgcttctgatcagtttctgaaaaaaaagttaagcctaaactttttggcctgtttaaaaaggaattaaaaatttttaaaaattttattcatctccctttttgatagaaaaagcatcagagtgcctaaactaacatgtaaataaaatttggtgcgtttcagaaccctttctgaaaaaatatttaagaattaattttgcaaaaaataaataaaaacgaaagact

SEQ ID NO: 82452 - DNA, 839 bp, Heterodera glycines
atgcccaaatctaaaagacgacacgacgacgacttggcgaacacttcggcaagttcgtctgagcagcaattcgcggcattctctcaccgaattgacaaccttgaaaagttgcttcaacaacttttgcaagcccatggaaaagagaaagttgctgccaattctttggatcagctaaatttacgcttagaaaagttagaaggtttggtggcaacccttgtcgcacaaacggcaacaaatccccaaattaatggatacaacaacagtactcccacagttacgccaaaaatcccatggggctgtcctccgcaatttggtccatcccaaattgcccgaatgctcaacagtgccatcgtcgactcggaactgatcaaagaaaagtcaaagcgagcagttgttgaacgcctgccggaacacctcaatgagaaggacgttgtcaaacaaattgctgaagaatgtggtctgctgggcgaaattgacctcgacaatgttcacagacatccgcggacggcacgtgaggaaaatgcaaaaccgagaattgttaaaattcccttttcctcccaaaaatcccgcaatttgttcctttataaattccgctccacacttctcaaaatgcctgtgattcctcataatttgaccgctagacgtgatatgaccataaatgaactacaaatattgtatgacctccgaaaaaaggcttttgaggcaaaccaggccgctggcgtgtataaatacatcgtcattgacctggaactcaaaaccttgtccaacccaaaaccactcaggactagggtttcgtaggggtgcgcgagcaagccgcaaaaaattataaatgaaataaa

SEQ ID NO: 82453 - DNA, 150 bp, Heterodera glycines
gtggaggcatttttggggacggactcctccgaagtggaggcacttcgggagacggactcggccgaagtggaggcacttcgggagacggactcggccgaagtggaggcacttcgggggaaagtggaggcagtgggaccggtggtactggcg

SEQ ID NO: 82454 - DNA, 815 bp, Heterodera glycines
atgattaaggggtttttgcgcgctcagcaacttgagagagaaatcgcaagtttacacgagcagaatagtatcctgatggcagaacgagtcgaggtaagtacgattgggcatgtgtctttgggcttgagttcacactgattccaagttcccaattttttacctgcttgtttgtccataaagttatacatataaagaccaaaaacagctaattttggggttccattttctatttaaaacgcaaaaagaattgtgctttgtttattgaactattctttattttttctcttttagcgaaaccgcgacattgaggaaattcggcaaactgtgggcgaaatgcgcggatttcttttggagctcgtacaacaagtaattcgtagttttcgacatgaaaaatgggatgcctacgtttcagggcttcaaaaaatagtgaaaaagttatcatgattagacatttaaaaaaaattgttgagccctcttttttgtttttaataactcaaaaagaccgtgtttgcactattacaaaatttttaaaattaatagtataaagctctttttcgacatagaaaagatttttatataattacagcgcgagaatgaattgggacagctgcgtcaagctgttcagcaagtatgtttggtgtattcacttgaaaagggtgggtctttacggttttatataattatagcgcgagcgcgagttgcaacagcgggaagaagaacttggattgttgcgtcgcttctttgtccaggtatatttagttcaaaactccttttttaccagtatgaggatagttttttgtggcaaaaacccttga

SEQ ID NO: 82455 - DNA, 327 bp, Heterodera glycines
atgcctccacttccgccgagtctgttcccgtcagtaccaccagtcccactgcctccactttcccccgaagtgcctccacttcggaggagtccgtccccaaaagtgcctccacttccgccgagtctattcccgtcagtgccgccagtaccaccggtcccactgcctccactttcccccgaagtgcctccacttcggccgagtacgtctcccgaagtgcctccacttcggaggagtccgtccccaaaaatgcctccacttccgccgagtctgttcccgtcagtgccgcctgttccaccggttacaatgccaccaacatttccaacatga

SEQ ID NO: 82456 - DNA, 147 bp, Heterodera glycines
gaatgggagcgtattgagcgtgaacgtcgccaatacgaggagacggagttggagaagcggcgcgaattggaactcgagcgggcggaggcactgagacgcgagcagcagtggttggagcagggacgggccgaacgggagcgactggag

SEQ ID NO: 82457 - DNA, 643 bp, Heterodera glycines
atgtcaaaatccaacaaaaaaacgaaaagtgtcaaattaaacttctctcaatgtgaagaaaatcaaatcaatgcctccgctgattggcaacaaattgtgagtggtgcgacgactgaccaagacaatttattaatttatggcactttagccaacatcgtccgggaaaaactgcagcattcaaaataccaaagatgacggaattactccatttaattccgattgcgagaaggatgatgcaaatttcgagatgaacgaagaggaacagttgatgagcatgttagatttggcatacaatctcgatgggaatatcatcaacgaagtgatgagcacaatcgacaaaactttgaatggcaaatgtgccgtggatgaactttcgagcacatccgatccgacatcgataaatggggaatgtgcggaaaatggcaacagcggaatgatttgcacatccgacccaactttaaagggagacagttttattctcgaagttccattttcaccgataagaagggacaaatgcgttgatgaaatggatgatggagagattgttggtgataatcaaaatgacagcggtggtgataatgaatgtgatcggagagcgattgtcagccagcagcaggtgaaagaagaagcttatgttcagtga

SEQ ID NO: 82458 - DNA, 1494 bp, Heterodera glycines
atgccggccccgccacctccgccgcctcctcccccgcccccatccttctcaaccaattcccagccattaacaacccaaaaagcgaccggagaacgggcaatgttgctgaacgaaatccacaaagggacgcgtctcaaaaaggctgtcactaatgacagatcggcgccagcagtggagggaaaggtcgtcggtaagcactcgcagattttaaaatgtatttcgattatttgtgggcattttatcattcaggcgaagaaacaaagccttgtgcgggtcgaacggcgactgccccttcgactgtcagtcaaaaaagcgcagcgccgaagccgggcggtgccatgaatttgggcgatttgtttagggacggagtcccgagaaagccgagtgatttgaaaaaccaaaaatcgtcctctgccggccaaattgtcgcatcgaatacgctcggtaggaacaatgggcagcagaagccaaggagcagcccggtcaaaaaggcaccaccggtggcaattgcatcggaaaatgtgaagacagtcgaaaacaatcactcgccgactccgccgccccacgacgcaacggcaaacaaatcgacgagggcggcggccattgcgaatttgcaaaagtatggggaggacattaactaattgaccaaaatctaactaattaataagaggggtgttggttggacagggcaaatgcatttttatgtgaaaaggctgacgattatttctttccccttttccaatcatattatttccaattaaatttatttttattttttttgcaacaattccatttaataaaaaagagagaccaaaccaatgaacttttttttggtgtctgttttttaccttttccctggcgcaatttttagtatttgcccctctttttgttcttttttaattccactattagaaagtactcccccttcactctaatttttgatttcattttttgttccccttctcccaaccattagcactcgcacttattaactttgtttcagttttagatcggtttcaacgacagcagttcccggcgcaccaccgcctttgccggccaaattgccaaaacaaaagacgaccattgctctacagcccagcaaactccccctctcgcagcacaaccaattccaaacacttcgaccaacgaaaacgcagccaaattcggacgagaaaagaacaacgttgcggcgaacgggaagtacagaggtaggctttgtgtcagtgatcattttatgcttaaactagtacaaattggtcaaattattcaattgcccattcgattgcttaggtttatttgtacactcaaataatgccattttcaggaaatccaaaaacgcccttcagcgcctccaccgccgccgattatgcgccgtccgggcgctcctccgccgccgcccccgcctttggcacggcctccaccgccgcaaatggcacccgctgtcaaaaaggttgagcaaccgatgaacaacgtaagcatttgttgagcaataaa

SEQ ID NO: 82459 - DNA, 312 bp, Heterodera glycines
atggacggtgccgacgaacttgccaaatgttttatgaggcagcgcggaatggacgcgtcgatgatcaacgacccgatccaagtgagtggaggaggcgaaatgggcataaaacttggaccagaattgtaaaagtgccaacattgaaacactttatccacccaatttttacactttagaaggaacgattcgcgcgccttctgaagacggacattgaagaagcaatgcaccgccgaaatgagaacccggaaaagcacacagatccaatgggaattcgggaagagagaacaaatgattggctgggggctgtgaaaa

SEQ ID NO: 82460 - DNA, 7875 bp, Heterodera glycines
atggacgacaacgcattaacgagtgatgctaggtcatcaagtgttgagagccctgcggggaccatctatgaatcattcgaggcgttgagcattgatagctcaaaagtagctgcaagccctgaggggtccgctaatgttggggctgaaattgttattgaagggactgaatccaatgaaaaccctgcggggtccggatatgatgaagtgagaaacgagggtagtagcgtcacgtttaaagcgatggaagtgccccttgaccaggtcgatgcagagggttttgcgaataatggctttgatgatgaggagcctgaagcatgtcctccggctaaagatgtgagcaaatcatcgcttctttatttggtttcgcaagccggagatggctacgtaattgcttgcaagaagtcgcctaagtcgaagccaaattggccattcttcatgaacatcgaagacaagctgattgagtcggcccctggctttcagcgtaaactcgaagttggcgactttgtggcagtgtcctcctttgagtggaatcagaagctgagatatttggctgaacatcgccaagatgccacacagtcctgcaaattttggttcaatgagaattcgcaactgttgccaaagcaggctgatgccactggcgtggctcaactcatgtatatgaacatcggacgtaagcagatcaccggggtcgtttactggataaagaggaaggtccaaagcattccctccagcttcgttcacgcaaacatcgcgtgttgtggtctagcggtttcggcacgcataaatcggcgtcatcttgatggcatcaatccggaagacctcaagctgggctcacttgtgacggtggttgttgccaacattccacaggattcacttgtatcaatgggatacattctgccgaattcttcaccgtacaaactgggaacggaaagaagagccgaaacacctgaatttttcggtgcagttgcgtgcattcgtcctcatctgttggagtggccaaatctgaatgcaaacatgacgcccaaggtttatccatgctccgcggagcttactaaacatcatgttgtggcgatggagcatgttgttggagcagctctccagattgagatggagcgagaggttgacatgatgattgaagcacgctttgaaggaagggctcggaagttcgatggtgctgattgtctgattgtctttggttcgaggtcgaagaaagaagtgaatgagttggccaaggtctgggagccggagtcccaagtgaaggtcttcaaagaattgggtgagaagcattttgctctgggagtggtcaaggatgttgaggtgctccacgcagaatacgaaaagttggaactccacgtcgtcatcttcttgaacaacatccaggaaaggaagaatgtcgacatcgcaagaaaagtggatgagttcatccagggtggcagtgttgtcatacacccggtccctgccactgcggttgaggacagactgttctgtttccgctgcaacgtcccatcaataattgctgatgaagactccccgaggggaaggataatggcagttctgctcggccgtccagccatggaaggcattcgaatggagaagcaaagcgttgacgactcaacggattcgtggatggaagaagaaggaccgctccaccctgcaattcttgctctcaactcgcggcagagagtgactgcacgcctaatgttgggaggaggtctggtgcaacaacaggcgccgccaggcaccggcaaaaccaaagtcgctgcggcgatcattaaggcaatgatggactcaaatcccgggttccggattgtggtgatggcttgtgccaacattccagttgcaaagctggtacaagaggcggaaggcacatgtgctgaaaaggatttggatggagcacgagcaattgccttattttccggttttgccagatgcaaatacacggatcaaataaaagatgttcaacggcatacgctgccgaacaaagtaaactctgaggagttcgtcaagcagttatcgcccaatgtacagaagcaagtgaaggagtaccttgctcattgtgagaagaacccgcgcttggcgcctgagagagcgattggaaaagtattcaactcatgtatggcaccgaaaatagtcttctcaacagctgccatggctgcgaatttacttcatggtgaaggaaacatcactgatgcagacgttttgctctttgatgaaagcactcaagctcagtgggcagtggtggttcacttggttgcgcggatgcccaagctcaaggcattgcttttgacgggcgatcgtcatcagctcggagtgcatcttcaagaactacctgacatcttccactcaggctatggattggaaagcgtcatcctacaagccgaggcttcggttgggacgaactacactttcctcacaaagatgtacagaagccatccatttttggcaaagctcatcagctatgcctcatatgagttgcacaatgaacaactcattccagcaagaagtgctgaagaacgctcacttattacgggctcaggctttcttatgccagttcaagaatgtcctgtgggacttatcaatgctttttcatcgttccgtgtggacccaaaaagcgactcgctcacagatgaccatcaaactgaagtggcatcattcttggtacaagcactcctggaacattttggcaacgatttttcgtcaagaatcatcgttttgtgtatgtacacgtaccaaacttcggaaattgaacgaaagctgaagcactgcggtgttcgtgcactcacagttgatgcctatcaggcacaggagtgcgatgtcatcataatagtgacaacaagatcaaaatactccgagatgggatccggaaggacggacaacatgcacttctttgaagacgatcaacgggctactgttgctctttcaagagctcgccacgctgtcttcatcattggagacttggtttcaataagtacaggacaagtgtggaagcgcttcatcgaaatggcgataacaagaacaagtgtagtccgagccgagtatgttttggcacttctgggacgaacactcgtgaggtcgtcgacatgcctatttgattcggccaaaagagaatcggtggaggatgaaggctttcttgaaagttgggcattgaagcatgggttgcgcctggaccgaacgaatgcctttggacaacaacaatcacagcagccgcgagctccctcattccaattccaaaatcgccactttccggcactacaggcgacagggccctcagaccaagccggtccatctggcagcggtggtcaacaaagaggtgcgcctactttggcaccacagtatggaagaggtcagggaagacgtggcccggacaatcaatggatgcactacggcggaaacccgaaacgacagaagggtggcagacgctgaactcatttcacatgaagtcctgcgggtctcacttctcttcctttcaccatcgctacggtatgtctaagtagttcataattcttttaacttaattaattagttaggtaatttacattttaccctttcattaaatattttattttctttcattttttctgcactcacaagtttttttttctcatgtcacccctccttaacttccggcgttcgcactgtttacgctgtgatacaatcagtagggacactttcccaccatattacggtattaatggatttccgctattttttttttctcaaaacaatttttattacactatttcccataacagaattattgtaacactggcacgccagccacgcccattgtcggggccttttaatctaagcactgcacattcattcattcattcttccattcatttgatttactgttttccactttagatactcttgcacaatcccactgctaattctcatctcacatttcctcttattatgttttctttctcaggtgggggtccacctaatcaaagcgctgcggcgtcaagcaatgcacagacagaccctgaggggctctccaatgatttgcctgagttatcagttgttgataaactgatgtttgctggaaagattctaagcacaccagcacgtttgtctgatgtggacaagctccacacggacttagttcggactgaggatggtgtcaatcgtatgacacgtcaccttaacaggaagataaatcaaaccaatagggatttgactgaacttaaggatgatactcaaactctcataactcaagtaaatactctcgcaaatggttataatgcggttcaagtgttgcaaaacccaaaccagtcaccaagagccaataaccctcctgtcttaaattgggcaactccctctccactcaggaacccgaacaatagctttggcaatgctaatacttcggtggttgaagccatcatacctctcggcaataatgaggaagattcccaggatgaagaatttgaattaaatccttcgggattccatcatgttaacatgcttttcgcagaaagcagtccctctttcacgatattctctggaacatctccattagaattcgatcgttgggcaagaaagttcacggacctgcttgactgcaatggcagaaagtgggatgattctgaaaaagtggcacgcctcaaggcatgccttgatggtgaaccaagacgcatttttgataatttacttcctgcccacaaagcaacttcttcggaagccattcaaaaaatcaaggaaaaccttgacactccacaaaataaagaactcatctatcaggcactaagcatgtgtaaacaaagggaaggagaatctgtagatgagtttagtgcacgactgattcctctaattgaggccaccacggcagaccttacaactaatgctagtgaggaggtactctgtcgagcatttttggaaaaattgaatccaaatctcaaatttctcactcgaaccctgagtgggcccgtcagaagggatttccaaatattgagaatgaatgcacgggaagcagaaatgatgcatagagagattcctaaatctattccagcacctcttttcccaatttcggaacaacaaaatccgagattcaacaacaccgagccgccgaaccacccggaaggcaactttagaacatgggctcccacaggctctaacagagagcctataagtcccagacagaggaaccggaacaattgggataacaatgcccaagcctcaagaggctcttttaacagatcaaataatcatcctcaaaatgacagaagatggaacaatcgcacttccagaaatgatagacgatggaataatcaaacccctcaaaatgaccgacgctggaatgctcggccagtttgcaactactgtgggaaggttggtcacctcgcgtttaaatgttttaaacgtcgtgacgaatttacccaaccatctaagaatttgaatttcatcagagcaattgatgaacaaaacagactgataaacgatctatcaactaaagttaatagtttaacttttagaaatgaccaatccgctgaggcggcctctcaaaatataaaaaccattcaaaaagtatctgaatctagtacagacaaaactcattcatcaatgatgaatgatactctcaaagcaccctccaaaataagtaattgggaaaccagtaaaatggttcagccaaaattttttccagtgctaatgggtctgactcttatttcctctctctcttccactttagttaaagattttaatacaattccatccggtccaatgatttgtcaaactcgcgttcaaccaatgacgtggtcccttcccaaatttccacgatgccccaggatgtcaattgacacaaccaaaccactaactaaacaaagacgcaccatctattttcccaattcactcgaattttctaccaaggcctgggcctgtcgcagaatcatcaaaagtattcggaaatatactacaatcagtggtgtttctgtagaacaacatcttgactctgaacaaacattgatgagtcatgatgaatgtttacaaatggcaaacaataagcgctgcagcttagggtatctcaaaaatgactcaggattgtggcacacagataggaaaattgaccagacaccccgtccttggttattaggctctttttcctggaagaaagtccagagtgagaattgctttgcctttgaaactgaagtatattcgcacattggtgccacttcaattataactcctgcgggaaccgctcaagcttgttcttatgacaaaggaaactgtgtcctctctgacaaaactgtcttagtatgggtccctcaaaaggacaaaatgtgtaaatacagtcccatcggagtcatggatggacataatcttggaaatgtatggctttccactttaggcgacttgggtctaaccagctcaattgttagaaatatttcagattgcggtcgaaatattactgtttctgaccaaggaccagcttttacaattaactcacaaagcccacgccataaaaggggtatttttggattagattctgaaggtgtagtcacctcctctcagttagcggcacaactttcttatttacacactaacatatctcgttcagttaacattgcttttgctcaggcatttaactccttttgtgatttaatgcttgacacacaacgttgggtacagtcatcctatctcaatgatcccacaagccttacgaggttcattcaccaaaataacttcttaattgcgaagagagttggagtttctcttctgagaacatggccatgtgtccctctcagtcagtctgactttgaatttcgtccaacccataccaattcatcctgttttgaatttcttccaataatagtcaaattaaatggaaaggaacatattgctttcttgaaccctacgtatttgacagtctctcttcattctaaaacagctccttgcgaggaccagagaaatattttaattcaaatggctgatcgcacaattgaagttgaccaagtagacggaacaatcaacaatgttcatgtccatgaaatcagggaggttgagcttgactttggtaagccaacgcgcattccaaagctctcaccacatgccttccatcatctggtcattcttaatcttaccgatctcgccacacatgcctttgcttcaaacttggtacaagtaagtcaattcacataccgagctgataaaactcattcctctgaaattaaaactacgctctctgatgaatggtcagcactagaagaatctatagttcaaaaagctgtgggaaattattccctggcatggcaaatttggatcaccatttgtcttttattgtgcatggtagatctcctgacacgccttttctttgcatacattggtatcagacttcaagatcccgtagagacattaggtcgaccaatgatcaccactatagctaatctttttggcaggaagaaacaaaatctagactgcgataacaagaaccatcctaattcgccaaccaaaaccattggtcacattacttactcacatcttcgaagcgttgctgcaacgcccataaatgaggctacaggtcagtccatttttcgagatacgctgaatggtaactcatgtaactttattgaggcataccctcaatcatcaaactccaaggagttcaaaaaaatatggtttacaaaagaaactaatttctctgcttggttgaataattatctctcaaaaccagttaatcacgaaattcctctcctacttccgcggaactcaggcgaattagcacaattcctcgatgttgcaacacactttggaaaagaaattccaaatttcaattcaaaaattgtcccattagcagaatctcgggagatgaacatcttaaatgggacaagcaacgagtctctgcttatcaggtcattttggggcatatacacatgctga

SEQ ID NO: 82461 - DNA, 527 bp, Heterodera glycines
atggctacaatggttggtaatgctaatataaaatttgctgactcaaaggttgagtttttcaagttcggaggaggaccttttgaggtaattggtgcagcaagggttgctggaagcaatatcatgcacaataccaagaacattggtaactctcttattacagagcgaggcctatgaaatcgttgttgtggaatgttttgggttctaccatgaatcagcatgtgtatatgccccaaaatgacctgataagcagcgactcgttgcttgtcccatttaagatgttcatctcccgagattctgctaatgggaccaatttttgaattgaaatttggaatttcttttccaaagtgtgttgcaacatcgaggaattgtgctaattcgcctgagttccgcggaagtaggagaggaatttcgtgattaactggttttgagagataattattcaaccaagcagagaaattagtttcttttgtaaaccatatttttttgaactccttggagtttgatgattgagggtatgcctcaataaa

SEQ ID NO: 82462 - DNA, 4841 bp, Heterodera glycines
atgcccaagcctcaagaggctcttttaacacatccaataatcgtcctcaaaatgacagaagatggaacaatcgctcttccagaaatgatagacgatggaataaccaagcccctcaaaatgaccgacgctggaatgctcggccagtttgcaactactgtggcaaggttggtcacctcgcgtttaaatgctttaaacgtcgtgacgaatttacccaaccatctaagaatttgaatttcatcagagcaattgatgaacaaaatagattgataaatgatctctcgactaaagttaatagtttaaccatcagaaatggccaaaccgctgaggcggcctctcaaaatataaacaccattcaaaaactctctaaatctagtacagacaaaaatccttcatctgtgatgaatgatactctcatagcaccctccaaaataagtaattgggaaaccagtaagatggttcaaccaaaattttttcctgtgctaatgattttgagtcttatttcatctctctcttccactttagtcaaagattttaatacaattccatctagtccaatgatttgtcaaactcgtcttcaaccaatgacatggtcccttcccaaatttccacggtgccccaggatgtcaattgacacaagcaaaccactaaccaaacaaagacgcactatctattttcctaattctcttgaattttctaccaaggcctgggcctgtcgcagaattatcaaaagtattcagaaatatactacaatcagtggtgtttctgtagaacaacatcttgactctgaacaaacattgatgagtcatgatgaatgtttacaaatggcaaacaataagcgctgcagcttagggtatctcaaaaatgactcaggattgtggcacacagataggaaaattgaccagacaccccgtccttggttattaggctctttttcctggaagaaagtccagagtgagaattgctttgcctttgaaactgaagtatattcgcacattggtgccacttcaattataactcctgcgggaaccgctcaagcttgttcatatgacaaaggaaactgtgtcctctctgacaaaactgtcttagtatgggtccctcaaaaggacaaaatgtgtaaatacagtcccatcggagtcatggatggacataatcttggaaatgtatggctttccactttaggcgacttgggtctaaccagctcaattgttagaaatatttcagattgcggtcgaaatattactgtttctgaccaaggaccagcttttacaattaattcacaaagcccacgccataaaaggggtatttttggattagattctgaaggtgtagtcacctcctctcagttagcggcacaactttcttatttacacactaacatatctcgttcagttaacattgcttttgctcaggcatttaactccttttgtgatttaatgcttgacacacaacgttgggtacagtcatcctatctcaatgatcccacaagccttacgaggttcattcaccaaaataacttcttaattgcgaagagagttggagtttctcttctgagaacatggccatgtgtccctctcagtcagtctgactttgaatttcgtccaacccataccaattcatcctgttttgaatttcttccaataatagtcaaattaaatggaaaggaacatattgctttcttaaaccctacgtatttgacagtctctcttcattctaaaacagctccttgcgaggaccagagaaatattttaattcaaatggctgatcgcacaattgaagttgaccaagtagacggaacaatcaacaatgttcatgtccatgaaatcagggaggttgagcttgactttggtaagccaacgcgcattccaaagctctcaccacatgccttccatcatctggtcattcttaatcttaccgatctcgccacacatgcctttgcttcaaacttggtacaagtaagtcaactcacatatagagctgatagaactcattcctctgaaattaaaactacgctctctgatgaatggtcagcactagaagaatctatagttcaaaaagctgtgggaaattattccctggcatggcaaattgggatcaccatttgtcttttattgtgcatggtagatctcctgacacgccttttctttgcatacattggtatcagacttcaagatcccatagagacattaggtcgaccaatgatcaccactatagctaatcttcttggcaggaagaaacaaaatctagactgcgataacaagtaccatcctaattcgccaaccaaaaccattggtcacattacttcctcacatcttcgaagcgttgctgcaacgcccataaatgaggctacaggtcagtccttttttcgagatacgctgaatggtaactcatgtaactttattgaggcataccctcaatcatcaaactccaaggagttcaaaaaaatatggtttacaaaagaaactaatttctctgcttggttgaataattatctctcaaaaccagttaatcacgaaattcctctcctacttccgcggaactcaggcgaattagcacaattcctcgatgttgcaacacactttggaaaagaaattccaaatttcaattcaaaaattggtcccattagcagaatctcgggagatgaacatcttaaatgggacaagcaacgagtcgctgcttatcaggtcattttggggcatatacacatgctgattcatggtagaacccaaaacattccacaacaacgatttcataggcctcgctctgtaataagagagttaccaatgttcttggtattgtgcatgatattgcttccagcaacccttgctgcaccaattacctcaaaaggtcctcctccgaacttgaaaaactcaacctttgagtcagcaaattttatattagcattaccaaccattgtagccataattatattgagtgctttagtgtattcaaggagtcgttcgccaatcagtgcgattatacgtgcaaaaattaatggtttagaaattagggcactagctgatacgggagcaacgataagtgtagctcctctctccttagcaaagaagataggatgcgagctttatgagtcaaaagtggaagctattagcgtctcctcacatgtaataagcatatgtgccgtgggtgaagtaataataaaacttggtgatatatctctgcggagttcaattaattttatacctgatgaccaagcaggagccatgaaaaattatgaaataatcataggatgtgatatctttgttaacctgccaccaataacatttgacttcacaaaaaaggaagtcatgataggtaaatcaaaactaaacatggaatcaaatcatagtaccctctcaaacctaaaagttcgagctctagagcaccaccgaattcctcctggtactcaaatactggtcaaagccaggatagatactatcttctcaatagacaaggacattcttgtagaaaatttggacccaagattatctgatgaacacctaagcacaccagccacagtttcaaagcctaaggacaatttattgaacattgtaatttgcaatccaaccaattttcctaaaaatataattaaaaatatgtgcattgcgactgcatgtgaattaaacaaatctgatcatcctaatcttgaaatggaatgcacctcggatgagatcaatctcctgagggagtcacaaaaaataattcacgcagatccgtcatttaaagttgatttttcaaaatcatcagtctcaggtgaaaatcttaacaaattaaaggaattgtgtgaagtattccaagatatttttagcaaaagtcaatatgacttaggctcttgcactgcaggagagcatgatatagtgaccacgtcggatactcctgtgtcgtcgaagccacaccgaacaccattcaaatatcgtgatgaactccaaaaacacattgatcaacttttggcatccggagtcatggttgagtcggacactccatgggtctcaaatatcgtcctagtgcagaagaaggacggtgggttgagaccatgtatcgattttcgtaaacttaacgaagtgactgttccggatcattatccacttcctagattggaaacgatcatggaacgaataggtaattgccgctactattctagtctggacctgtccagcggatacctccaaataagactaacggaaagggcatcccgaaaatgcggtcttattactgaaaataaaatttttcagatggtcaatctcccttttggtctaagaaatgcaaccagtgcgtttgccagatgcatggcccatgtcctcacaggtttggacgattgtgtaatcgcatatgtcgatgatattctggtatacaccagggatgataactttggtgagcatctcaatgctttgagaagtgtttttgaaagatttaggaggttcaacctaaaattaagccctaaaaaatgcacattcgctgcggcgaccatgaattttctcggatacttagtcaatgctgacggctacactcctagtctaagcaaagtggaaataattaaaaaccttccagaccctaaaacaactcgagatgtgaaacatgtagtaggaatggcttcattctttcgtaaacatgttcctaatttttctacaatcgtagaaccattgaccagactaaccaaaaaggaaaccaatttcgagtggggtacagaacaggctgcggccttcaatgaagtaaaaagaattttgagtgagaaaccaatattggtgtttcccaattatgataaaccctttcacatcttcacagatgcctctaatgttggccaaggtggcgcactcatgcagtggaatgagttggcggaagcatatgaa

SEQ ID NO: 82463 - DNA, 530 bp, Heterodera glycines
atggtcgtttcaatccatgccattgaaggtgaacaattttgtgccgttgtctgcacaaattcacacatttttgtgcttaaatgcgccaagaacggttcccaatctgtcgaattggcttttcaagtcgatttgacttttccaaatgcggtgaataatcagcagaagttggggaaggacaacgaatgcaatccgtcggtaatttttcctccctttggccttttgtcccaaataatttttgattttttcgtcagattctctcttcagatgtttcagccgaccacaaactcctcgcggtggcaacgaccacaaaacacgtccttctctttgagttgcaatcgctgggaaatgcaattggtggcacttgggaagaaacgaaatgccaaaccattcccaagacaccgaccgcagtaacaaattgccattacaaaatgtgccaaaatttcgtcctttgcagatacatttttccgcttgcggtgacactcttttggtcggcactcggtccggttctctgctgcaattccgcgtcaatg

SEQ ID NO: 82464 - DNA, 1292 bp, Heterodera glycines
atgggtcgcgtccgaaggaggtgagaaaatgggcaaaatttcctaatttttcttccatccttcatttgtcaggtcgtttggacttgcaaagagaacgtcgaaatttgctgtgggacggactgttgcccgaatccgaattattctccgccgaacagtgaggcgaagtcgggcggagggatgggcaccgttggcaaagtgttgttggggtgagtcgaccattttcgctgccttcgaaagtctccgaacggtgcgacacgccttgtttttattcagaattttagcattgtcgttgtcgctcttctcttctgctgctgctgtgctctgttaacttacacttcttgtcgctccgtcttcgacaggtcttttaaatggtcatcaacagaatgtttgttagctttgcttaaaagggtttgagccgaaattaaatctgtcaaaaaaggaaattgtttacagcactttgatatcgttgtgttactatgattattcgtacaataggaagttcgtaaaatggagtttcgtacaatgaatttttttaaatttttcaacaaaacagcatttttctcaaaaaatcaatgaattttaaaatctaaaaaacccttaaaaatattgtacgaacttccattgactcgttacgatagatgcgcatattaattgtgatttgtgttttaatccttcagttgtatgccgggaaataacaccaaccaaaactacgaccagaccaaccatcccctacaaatacgatgtgccggtgacaatgtccacaacccttcgggtggggacaacatttataattcttttttaatttttgcactctttcagcaggccaagcttatcccatgcagccttattatcctccggcatcaaataattaccctgcccagccacaagcccaagctgtttaccctccggcaccgacttatccggcacaacctcaggcccaggctgtgtatccgcccaatccgacttcgtatccccaagctcatggctattaagagagcgaacattggctgattttctgatattcatccattcctgtttcaaaggatttctaacatattgtcacttgcaaattccataaccccacttcccatccgatgatttctttgacacacagtaaatagcccaggatgtatttactaacaactaaatatgcttataaaaacgtatagttcagacactcttttgattgcatcctcggtgctgatatactgtacatttgaaaattcagagataaatttatacaaaaaaattacaaacaaactatattaattttttattacaaaaaaattaaa

SEQ ID NO: 82465 - DNA, 204 bp, Heterodera glycines
atggtcgtttcaatccatgccattgaaggtgaccaattttgtgccgttgtctgcacaaattcacacatttttgtgcttaaatgcgccaagaacggttcccaatctgtcgaattggcttttcaagtcgatttgttcgatttgacttttccaaatgcggtgaataatcagcagaagttggggaaggacaacgaatgcaatccgtcg

SEQ ID NO: 82466 - DNA, 1226 bp, Heterodera glycines
atgaaatttattcgaaagaaattcattttttcgtttttgttctgtgccatccaattgcactgtttaaatgccaaaaagtttggcggtggcggtggattccgaggtggtggagctgctcgcgctaatccagcgccagcgggtatattttacaaataattaattgttggaaaggtaaagtgccattcaggtgggcatttcggcggtggtggagctcccgttggaggaggacagcctcattttgtcggaggaggagcaggcggattccatggaccgaccgggggagggttccatccgccgcctgcaggaggcggtttccacggcccatcaatgtctgctggcagtggcccgggccggtaagtggcaaattactggatatttaagtatttttgtctgaacaacaaactttacatgtatttttagaaaagtcaggcgtttactttttcattttgcggttaaaatcgaaattttcatgtcatattgtccctattttttttgttttgattggtctgcactcttaatatgtcactgtttgttttagctttggctccggaacgggactcggttcgtcgagccgtcccgggactttcacgactgcgctggcgggtgctgcggtgggcaccgttggcggtttggttgcctttgaagcgggtcagtcgtaggatggcattaattagtcggtactaatcagaatcctattcaaaggaaaagcgattattcattccttcgaccggcccttccaacacgacggacgcaattactatttggacgaaaaatacgcaaagaaacagcacggagagattcaggtaaacggtggcgactgaactgttccgttgccagaagaatggaacggtttttacattacagataaacttttcggtaatactaccgatggtccccctcctttttggaaaaaaattttcacgtctttttagaatagaaaataaatttttcaaaaggggggggggcatcggcagtattaccaacttttcggctttggctaatgtattttaattttttgaatttagtgcaaagtgccgtgggataagctggtcaaccaatcccctgctgcgacaacaaatcaaacgacaaatggcacatcgccggaacaaacactcgcaaatgtattcacgggagcattcaccccaaaaatttaaacaatttaaagaaaaaaaaacttttcaatcatttttaagttattatgaagagttaagagttagcaaattaaa

SEQ ID NO: 82467 - DNA, 2379 bp, Heterodera glycines
  unsure (1)..(2379): unsure at all n locations
atgccaaaatttggcgctaaacttaaatttaaaaatttttattttttgacaggccaaaggccagcagaattgagcagcgcgaaaggagcagctcatcagcatccaatgaacgcctggaaaatgcgcttggcgatgagtgagaaattaaaaatttaattttaaaataattttaatttttaactatttatgagtccctactgttttgcaaaaataattgtcattgtctaaaaatgttattaaattaatgggggggggggatttctcgaagcggattcgatgagactgagacacccaaaaaatccggggtttttccgagtccggtctcgaaatttgatgaggtcgagatcacccaaaaaaaaaattgggattttttctgaatttacgccgagacttcttttgaatgtcatttgattacgctcggcaccgtcgggactcgggaacactttttttttaatttaaaaacgaaaaaacatttcgccaaatattgattggttaaggaaattattttgaaattttagttttttcattaatttaaatttattcagataattttgacagttcctttctacgccccagcttcttcatcctaccgaccaatcatttggttgtttgcggccaatgcttttgtccaatttgccaactttttggcacctgttttttgggcaattgaattcacccatggaaaaaaaacggcaaaaaaaaaacttaatattaaaaaaactttaaattacccgcccttaattgggctaaaaaaaaaatttgaattccccaatttttttaaaaaaaaaaaaaaaaaaaaaaaaaaaaaaaaattttttttttttatataaaaaaaaaaaaaaattttttttttttataaaaaaaaagaatttttttttttttataaaaaattttttttttgggtggtgtttctattgatttttctcttcaatttttgtaaaaaaatacaaaggccgaaggcggggaagatttaaaagggcttttcctaagggggtgtgggccggaaaggaaaaaggggttttgccgttgaaaagctttgccattttttttatttaatgtagaaggggtataattagggaatcgagtttttagggtttttttcccatttttttcctgggcggcactatgtctgaccgcaagaaaaaacaagttttttcctgattgattttaagctactttcgattattgtgcctatttctagttttattttatgcctaaaactttttaaaaattttgaaaaaagcctattntggtgttttgcncanatctattaaaaatatgcaataaaacaaaaaatacaccattaagaatcgatccccaaaaatgccagaaaaattcactcctaaaaatcacactaaaaattttcaaaaaaatacctctttagaatcgacgataagattttcaaaaataagccttatgaaactaaaaaatttctcaaatatttattcatttccaaaatttatttatttattttcttgacaagaatttttgattttaaaaattatttaatcaatactgatttggcttaattttatttcttttttcaataaatttattttaaacgtatgtttggcagtttcatcttaaaattcatactcaaaaataaattaaattttaaattaaatttagatgttactaagaaatggcaccaacaagcatgcgaaaagaggaaaaagaaaagcaaatgtacaaagattcgaagcgataaatatcgttgtaaatgggagaacgatgcgtgcgtcccagcaacggatgaagcggattacgaaaagccaaaaaagggcgacggattattgcaaaaagtgattgccaaagtgttgtcaagcgctaaaaaaccatcaccatcagaataatagccataagaaaagtgctgttggatgaggagacccatttccgagtagaagtcctaatatgtaagcactgtcaaatattgttgattggcgaaaatttgtgtgacaaaaatttgcataaaatttaattttcatcgtaaagaatttgtttttcgttttcattaaaattatcaacagcgctttatttttagcccaaaaactcttcgttttaacgtctctattggtccccgaaaatagttcatttaaacgtcacttatttgttagtcactgaaaattcattagtttaacatcacattggtcgcaagaaggtatcacctttattttattttttttgatttttcataactaaaatatttcaagactattttgaagcgaagtaaatgtttttgcttttgatcagctaacaaatgaagagataattcgccaaagtgagagaaattacaaagaaaggaacagggaaatagtactaattgtaagcattttttttttctcagcatagttgaaagttgaccaattggcactgaataaa

SEQ ID NO: 82468 - DNA, 135 bp, Heterodera glycines
atgaatttaggtgtaagattttaaattttaaaataaaatattcaaatcattttaatgtccagattttcttgatttttgttattgaactcaaccggatcaagcctgtcctgtcaaagcagaatgtttaacaataaa

SEQ ID NO: 82469 - DNA, 959 bp, Heterodera glycines
atgaacgaacatctggctagaaaaactttacgggtggagtaccacgcgcctgacgccaagcgcgccgttcctgatcccatgaagtttgggcggaagcgcccagcgatggttgctggtttttggaatttgccatttttagagctcaatttattttgtttgtttcgtcggagctaaagtcttattatgattatttatatttcatattgaattccaaaattactaataaattaatgggattcaatgtagcatttgtatttattttagtcaaatgtgtattttataaatagcttcatgcaatggtcaaggtctcagcgattgaagtgcgttgtcaatttcaattttgcccatgtatattaatgctactgtttaaattacaatttagtttattatttatttagataatttttgtgttttatcttaatcttcgtataaaatgaaagtatttattttaataaattcatttgaagcaataatcaaattaataaccaaccgaaattctgccagaatatattaatatttaaaatatcataattaaaattttataatggaaattattatagttttttcctcaatttcaatgaatcgcgttgtaaaaaagaatacaaatctattaattaataaaattcaattttagcaaagtgtcatacgtggacaatgcgtatagtgcgcaacaaaatttcttgccatgcctatcaactcggatgcctgtgccacagtttggcactttctcaaatccgcctgattttttatgatgctgtatttcagttaattgttctcttatttcgtttttgatagatttatttgcaaaaaatttttaaatttaaaaaataagcatatttatttttgaaatagtttttccaatttaatattatgttttataaaattaaatttgttggctatcagctccatatatttgccaatattagagagtagcttagtattattgtttaaaattatta

SEQ ID NO: 82470 - DNA, 537 bp, Heterodera glycines
cactaccgactgcccctgctgattgtggccggccattacctcacaaaatattggctggccaccaccattcgttcggtggtcgaatgggcgcagaaaaaccgtcgcgtgcgcgtgccgctgcaggaacagctccgctggctgatgcccatcggcttttgcgcctcgttggacatcggactgtccaattggtatgtcaacaaatctctataccttttttggacccaaaatcatcgaaaattcgattaatttaaaaacggactgacaatgagctaaaatcccaattgtgatgtcccctcactcattaatctgtggcttcccaataagcctgtccgaaaatacgcgatttggaattcaggactgaaattttactttttcttgaatttcccacccccttggatttttcaaatttttttatttccactgcctaccttcattttaaattttgcccaggtctttggagtatgtcaccatttcgctgtacacaatggccaagtcgagctccattctattcattgtcggcttctccctgatgctcag

SEQ ID NO: 82471 - DNA, 1004 bp, Heterodera glycines
  unsure (1)..(1004): unsure at all n locations
atgccttcacagtcgccacaactccgcctttcgtcttgctccgcttgctcctcccatgaacgccttcattttggcgctgacgacgaggaggttttcttaatggaaaccgtggaaaatgggcacgacgacacgcggcagcagtcgtaccacacggaacggacactgctcgcctcacagggcgaagaggacgaacggaacggagacgacacactgcagcaggtgggccgaaaaggagcaatgaaaacaacgggtgaccattggaacccacggaatgttgtccctttaggaagagtccnacccccccactttatacacgccttgctataggttatggtttttcgcacttaatgaattagttttttgattctttttttagtctttgatcgcgtcacattgtgccaacgttatttatgcgggcaaacaaacagatattgatattgaccataggaccatcaaattaaggctgcaagaaatcactgcccatttggctaattggatagcaaaaatgctggtaaaaagaccttattatattgaaaaatgaaagattatcttttattattttacaaagcaatcaaataagtaggcttctaaattatatggattaacacatattttttctgcgcatatgctatgaagaaaggggctcaaaaatagcatttctacgttatttttttttttggtttggtgaaggttttttgtccatatttcggtcttagtccatatttggcattttatgtccatatttgggggatttatgtccatatttggcattttatgtccatatttggcattttatgtccatatatgggattttatgtccatatttggcattttttgtccatatctggcattttatgtccatatcaggaaatcacttggccaacaatttcacgcactcgtgcaaaatcggcaattggtgattcggatatcgcagagagtgaaaatgagtatcaatctgtagcggaaaagataaaggatgaggttgaccaattaggtgcagaaat

SEQ ID NO: 82472 - DNA, 737 bp, Heterodera glycines
atgaaagtgcaggagatacagacaatgagtgcgcggcagaacttggagcagaactacgccaaggaggaagtgaagcggctgcgcacgcagctgggcgacatgcgcggaaagttggccgatttggagggacgcaactctctgctggagagacaggccgaggaattggcctaccaagtggaggacgaccaaagggcgtacgaatcggcactgaacgacaaggacgcacagattcggaagctgcgcgacgaagcgcaggcactgatgttggagctgcaaatgttgctggacaccaagcagacattggacgccgaaattgccatttaccgaaaaatgctggagggggaggaggacagatcggggctttatcagctggtggagcaggtggtgaagacgcagaacatccgccgtcaggacgaagctggtcagcagttgatgtccaaaagcatttgccctttccttctattctttcagagtctcagcgcattttgcgcggcgaaaagtcctcccgacaatcgtaccaaaggtcggccaaaggcaatgtgtccattttggagacatcgcccgaggggaaatacgtggtgttggagaacacccaccgatccaaggaagagccaatcggcgaatggaaattgaagaggcgcatcgacggaaaacgcgaaattgtgtactcattccctcaagagtttgtgctgaggcccggaaaaagtgtcaaagtcagtgcgaatgccaacagatga

SEQ ID NO: 82473 - DNA, 1118 bp, Heterodera glycines
atggcaaatgaaattcttgaatttccactgaaatatgacaacgatatacactatttaaaagtccgacgtactgatacggtgcgcgaattaaaatttgtcatcgaggcaaaattgaaaattcccccggaagaacagagattgatgattggcagtgagtcaattctttcataaaatattttactaaatcaactccatccagactgtgtgcagccggatacccgccttttgagttcaatgaaagggctggatttggtgcgtgagacgggccctgctgctcctccctaaattggcaatgctgagtagtttgagaaagacgaatgattattggcttttgactttgtttgttgcgaataaaaattaaaaagcaaaaagttctcaaaattttcatttgtttgaacacaacattatgtcctttacataatttcgtaaaactttttattatttctctctatgctcagatggcattttaattgaaaagaaccggcgagacgttccgtttgctgtacgatgtgaagggacggtttgtcatccaccgaatccaaagtcgtgaaggccagtacaaactgtgcaaggtgaagaaacaggcggtcggtgacaagcaagtgccgtacattgtcacgcacgacgcgcgcaccattcgctacccggacccgcacatcaaggtttattgaccgtttagacttaccaagttttatatgccaccaaaataatattggcatccagtatagttttcggtaatagtgacaaatagctcatttacaaaattaaacaataaaagtaaaaacctaacacaaaatcagttatgtatgcactgaataggaaagtgccgagaattcgctctaaaatgggggccgtgtcggattccgagtccaaaaaatctccatgcatcatactcaattctgaaaagctcattttgattgttagtttttatgtgtatctgaattcttgccgctttttcacaaatactgcccagcaattgtcaaaatgtcatccaaatttgttttttttaggcggacgacaccgtagtgattgacattcacactggcaaagtgacggactacgtcaagtttgatgctggcaacatttgcatgatcactggtggacccaacattggtcgt

SEQ ID NO: 82474 - DNA, 781 bp, Heterodera glycines
atgctcgatcaaagagctcgaagcatcaacagaaaacgcggaaattgcaaacgaattttttcggaacatcggggccaggagggaagcgttcagaaaaaaggacatgacggggaactcaatcagaaaagtcctgattcatgcggaccaattggagaggcggtactcagctgaatggccaaaaatcatttgccaaacattggggcacttggcaaaaatacaaacttttacaaaagtgcttttttatttgatatttttgaaaattaattataaatttaaggcacaacccctgtcgccacgggatttggacgaattggaaacgtcgattgatcaatttcggacattcctcaacgatcagccgcggatgcgcactttgctagccttaaaaccaaaggtccacttgctgttgaaccattttgtgccgttcgccagacaacaccaatttttggcacttttagacgagcagggtcaaaaagcattttgaaatttaagtcctggattttttaggtgatgaagcattgcattcggtgtggaggcgattggaacagctgtggaagacaatgcctgatgaagaacaaatgcggcaattgttggaacaccattttgtgtcaaattggcttctcgacacaggaaaaatcgacgaaatgaagcgggtcagtttggtgaaaattgggtttcaaataaaattcccatgcctcaggaccgtgaagaacaacaggaagaaatcggaggccgggagagcgacgaagaaagcgatggagaagaacaattcgattttgaataa

SEQ ID NO: 82475 - DNA, 1701 bp, Heterodera glycines
atggagcaccacgccaacacatccatcgacgacgcactgctcgtggatgacaatgaaaagcagaaaaggctgttcagtgagttttatgggaaaatttgatccagagggaatagggaagagacggaaagaataaatattagcaaaaatcgggagtctcgaaccggaaaatcccggtagaaaaggcctagaaaatttggaaatttttcacaaaaatgtataaaatgcgtcaaagttagtcacctttttcgtgccggcactgatttattatgtcaactgatcagtaaagataaagatgctttcttcaattattacacatcattaaataagttagtctgaacaaattccatagatatgatcggaacaaccaatgaaaagactgactgttctgatcatttatcagtaaaaaatggagaaaattgtgaaagtgatagctggtcgagacaatttctatttcccattttgagaaaatttgtgtaaaaattttctatttttttcagtgctcggcctgttcatattgttttgttgggtggtcgtcataattttgtgtgcttatccccaggttagtaaaaattaaaaatttgtgggaaattatgggataaaacccaaaaaatcactcaaattttatagctttaccgtgatttgttgctacggtatgtgtgctgctgttttgcaggcttcgcagtacggtaatcaggagatttagattaatttaccattcctaaaatagagcccccggtggctctattttcaatccctctaaaaggggggggggctttattttagggggtgcgtgcattattttagtaaatatggtagaattttttttccttttggccgacgagaaaagtgccgtcaaagagcggatcaattggccaaagcgcgcgaaagggtccgagctgcctccaaatcgttcatttccgtatcaacagctgtcagcccaacagcaattatgctcaaagaggtgccgcccaaaaaaacaactttttaatcggcattttctaagccgtctaattaaggaaaatttatttttcaatcctaaaaaagttgccggatcctaaatccaattttcttaaaaaatcgctcaaattcgtaaatttagttattttttagacaaaatctgttaatcagaccagagatcgggttcaattgtcgagataaagtcgggcaaattattcattctcgggattgagaggggatttgcataagtgttgaatgaacgcagtaaaatgccgggaattgatttttcatcactaattgcggcattccatataaattcggcacaaattcccaaaaaatcgcttttttttaaactggcaaaatttgatttgcagataggactttccgagctgaggcaaggcaatgcgatggaaaggtggcatcattactaccagagaacctcaaagtccgaaccaatcggtggccaaaaaaggggcgaaacggagacaaaaatatttttattggacagatgggccagaggggaggaagaggaggaggagcaaaacaacgaaagataatgatgaatgaagccaaaagtgccattgtattaaatgaaatttgcaaaaaaaaatatcgactattacgaccgcgggtcagctgattccttggcttaacattcagagcactgggcagaaatcatacacggtcaacgtccacaaggaccatccgtctcctctgttttaattagacagtcggattccccga

SEQ ID NO: 82476 - DNA, 2371 bp, Heterodera glycines
gcatttctccgtgccaccaccagcacttcggcctgctacacaattaaatttaatgttcacgagtcaacgctaattgtgccatttgaattggtgaacggacagacccaagaaaagttgacactgaagaaagaacggaaaaatgatttttataataattattggtggctgttgaagcgatgcccaattagtgaaaaagtggcggcggatcaatgggaaaacgacgaaaattccgccaattttaacattgtccaatttgcgcttaacagcattgacaaaaatcatcactgcattgggtaggtgagcagaggaacacagcttttgcttttgttaatttgagattaccaattttaatttgttgcatttaattaggtcattatgtccaccagcggcgggtcaaatcaaaggaaagggtcgtctgaaaatgagtgccgggcccagtggcaagagaaagaaaaagtgaatgcaattatttgagaaatgatcgatcatttttaatttaatggacaaaaagctaatttaatgctgtattttctctcaaattattcctcatatattattttatttattggttttccttctctcttaaaacatttattttattgtttcgaacaaatcagaaaaattcttcaaaaaacaaatgaaagtgagagagcatttctgatgagagaaaataaattagcatcaaataaatttcaattggtgagattgatcatttctcaaataaaattaattcacttctgcgcagtcattaaaataatcactcattccgctgattttttattgaataattttttcaagcaaatataccaaaaacattgttgaaaccaccttttacttggttaagaattttaaaatttagcctattaaatttattttgaaaatgttattaggtatatttttcaaaaatttccgatttccgacgttttgggggtcggaatttcgatttgcgctttccgaaaaaaattttttgagcctcggaattccgaaaatttttggggcctctgaatgtcatcagttattgcggccattagcggtgggtcagagcaacaaaaaagtcctctatctctgcggaagagaattaattgaaaaatgatcgattgctttgaattgattattggctctgatgatgctttttttcttctttttgcagtttttttaaaatttaatattattttttctaattatttttaatgattttttcccacatttgttggttctttcataatttcgaatacatttaaatttatttgctttttctcatctttttatgcttcttctctatattttttgaggttttctgcatttgatatgtaggtttatgaaaaaatgactatgaattatgtgcatatttaaatattgtatgctttttatttaatttaggtattttatttattgctcgtttagtctcgcttctattggaaagcaaaatgggaagacgtcgacgtcgtttaaggaaaatgtaagcgaatttgtggactaagttagatcgggaattatttgtcgaaaatttcagttggatttgtacggatgtttggatggacatgttcccgttttttgaccgtccccaactcggcctcaaattggcacttctttcgcctcgttttgatgttttagtggacaaatatttcgatggcaaaagcgaattgccaatttggagaccaatcgaaattcgtaaggacagtgtcgcaaaagtgccaaagttgcgtgtgcttattgatgccaattctgttgaatttccattgcccgaccattcgctgcacaacaaaattcgctttgaggacctttatattgggtaatccttaattgtttttgacgaaaatttaaaaacaaaattagttaattctaaataattaattaattatttaaaattaaaacaattaaattaaaaaagaatcaaaagcaatttattttccaccatttttagtttcattgatcactccgtcatcacttttctccgttccaatcaacaaatttgggacaaaggcaccaatttggatttgtggatgcctacatcataccacatttatgtcaagcggtgttggaaagttttggtcaatgaaatttggcccatttttgcgccgaacattcacaacttttccaatgctaattggttgttgtacgaattgcgtcgcctcatctcaccaacaatcctcaccgatctaagcccgctgaattcaatactttctgggaatctgttgcccgattcaattgctgacgatggaccaaatgcaactgctgaccaagtgttgtccaaatggttgcacactccgcgcactgatggccaactgaaccgattgttttgtggcaattatcctatactgatgatggatatcaacaaatggatcatcaatttcaaagaggtcaaaaaagg

SEQ ID NO: 82477 - DNA, 2824 bp, Heterodera glycines
  unsure (1)..(2824): unsure at all n locations
atgagtgcgttcgtcaatgggttgcacaaaatttcgtctgtcaaatggtcgacctatggccttgcctggggccttatcaccttcaatggcgcaggcatttgtctcttcatgcattacatcgcccagaagacgtacatgggatcgccccacttcaaaaaggcgatggtgcgttaaccgaatttgggaaaagaagtcggattcgtccactcggaaaaagttaattcccgaaaaaaacgttttcgtgtttgctgattgatcgttgaagaaacatccaagggaatttattttaacaaatcagagctctcaaattggccaaaaattttaagaggcaaatttagttataataaattgggaattttgcattttttaattaggtatatggttgctttttgtttgtgccatcatttaaattttccaaaatattatatatttattttacactgtttttttttcgtttttagctcattttcgatggacatgacgaggccaaaagtttgttgggtgaaccggtgaaagttgggaagctgaacatgttggacaagaagaggaattacatgcgcaaaacggaagcgggggtgcgtgaaatttaaatcattttaacaatgttgttattaaaaaatgtaaaaaatgttttcctcccaggccgggaatcgaacccgggtctcgcacgtgacaggcgcggatactaaccactatactacctgggaaattgggaaatgggaagaaacgaattttttatcctcaattcatagcatttttcttttaaatttatgccattcaaagttttcccagcggccccatctattttaccatatttttgaaaatttgacctcaacctggcaaaaatttgtcattttttagccagaaaagtttttcttggcgacgaaaatttaaaaatttcgcgagaaaaagatttttggaattttggcccaaagaaccaaaaataaagtcttcgcattcctacctccgaatttttttctggctacgggcctgggtcgccggaccgggtcggtttatttaaatggatttagtcaaactcatcccccatctaaaaattcgaaatattgctggaatatctaaatttcatgggaatttttgaagtcatttattacttcaatataataaaaacaacgtttactttttaaataaatctctttaaaaaatttgacagtggaatttgacaatttaattcaaattgttgttgtttaaaaaaatcaaaaaatatttgcctcccaggccgggaatcgaacccgggtctcgcacgtgacaggcgcggatactaaccactatactacctgggacatgttgtattggacgaaaaaattatccaaatttcaataaaaatattatgaaaaaccaaccatttattaaaatttctttttcctatttactttttaatattttcaatgtttagcttcacattccggtctgtggaacccattcatctggctttgtggacgtattttctgagagagaaccggacgaggtgagcatttgagaaatggttgctcgggagccccccacccttcccccaattaaaaattttattgcttttaatccgttttcaattttttttcgggacccttaattagcgtgttttggaaaatgcttgaagaaaattcctttcacttatttgtaaggatgtgggtgaactgcttgagttaaataaataagaaatgatcgaccgagaaaattgttcatcgtttgcatcgcccaaaatcggtttgatcggctactcatttctgatcgctaatcgggggtcattaaaaggggaatgatggattggcatagcggaatttattttgggtaatcaaatcatgtgattgatcaggttacatttcctcgatttccgctttttcaatcgccttttttcttacccttttaaaatgtcgccaaagactggaaagttcgcccactcaagaccctattgacaccgctaattactataatatttttttcgagagggttaaaaatcaggggaaaaaagctccgtaaaatgacggccaaaagcaaaacaattaggccggatcatcccatattttcattctgatttgaacgcctttaagtcctcgttcaccatgcagcgtatggtgttggaattggacgacggcgagcgctttttgatgtacgaccgggcggcggaggaaaagcggcggaaagaggcggaggaaaaagtgccgaaaaagagaccacgcggacgatgagaaaaacaaaacaattcattattatttattttaattgtagaaaagtgcttccaatgggagaaagcagagaaaagtgtggcggaagtaatgacaaatattttttggagcgtttttctttgaaattttggcccaaaattttaagtttaaatgcagtaaatccaaaattataactctttcaactcatttgcatcattttgctatgccattcttcaaaatttgaattggaaatgccctttttggaggtcctccgcatatgccagcgggttttgtccgccancnatttttcctcgggattggatttttngactcttgctcgtcatcattttttgtttattttttttttgttttgcttttcctttctctcccatcgtcccttctctttttgttgtccttccttttaacgatgttttgtggaaagagacggaaaacagacacaaaaagaaagaaacaaaaaaaatgagagagagagagaaagaatttatttgaaaattgtgcaatttcttacctacatagaaatggatagaaaaattttttttagaaggaaatgacccccccccccccccaaaaaaaaagcagggaaaatgaaaccttattttactccccattttaggcacaataaa

SEQ ID NO: 82478 - DNA, 2201 bp, Heterodera glycines
atggacggctccaagacggaggggatgacggcgcaagaattgcgcatgattgactacgagagggacattgaacggctggaaatccaatgctcaaagcagcacgaacaactgatcattctgaggtgttgtggtggttcatggattgatggaaaatgccaaaaataagaacaatcgtcgaaaatggaatcactcccaggaaatttagggccagaattttcaaatagaatttaccggaagaacctaaaacataaacaaactataaattttcataatttaaaaacttaaatttttcaaattgcagcgaacgtgccaagcacgtggaactgttggaggaacaaaaggtcgacctgcaaacgcagacggacattttgcggagacaaaatgcgcaactcattgtgagtgttcacgctcattgtcaaaaaagcctaagttgttcatcatcgcgtccctttccttttcagcgtgaccatgaggagctgaagtgtttgtttggcggcggttccatctcacgcaacggtttggaggagttggtgcgcagtgccggccaattgcgcgaaaagtcggtgctttttggttgaggcttataggggcacaccattggggagcagcagttcgtcacctcccccctcccgtcgtttcacaattttttagttttctagtttttccgagtaaataagaatttttttcgcttttataattttcaaagaaattttaaaaaaacatttttttctttcctagaaataaccttccaactgtaaaaaataagaaaacaacatttccgatttaagaatgcaccccaccatggagagaaaagcaaaaatcctaaacgaaaaaattagaggtaacattttatccggattcaattctgcggtcatttcctccaacttcctcttaacaattctaagtcatcgtgaaaaattccaggaacaaagagctggagaccaaactgaaactgttggactcgcagcagcaaccacgcgacgcgccaaccgtcggcgagtcgcgacgaattgcgcaactgttcaagcgcaaatacgacgcggagcttggcgaactgcgcaacaaattgcaaaaatatgtgagaaaaaatatgcaaaaaactgtttgtgtgttttgtgaattttccccggctttaggaggagcccaccgggtcagacacaactcgcattttgcgcttcgccaccgccaatccgttggacgaagcgcgggatgagctggtcatccgcgaggtggctgctgctgctgcgtctgcttcaactggcgcttctgctccgaatccgttgaaacgacgcaaattggtcagtggttttatacttgaacaggttttagtattttttagtgtgtgcgtatttcattgggttgagactcatggaatattttcgtttgcaatttagaaaattttttatgctttatttggctttgacgcgccatttgaaaatttgtttttcccattttaacaatgtgtctcgttttttcaggacaattccgttggtgatgaattagcggcagatgaaacgccggtgggagacgaattcggagaggagacggaggactcggacgatggccatgttcacaatttacgtgttcaaattcgtgcgctcaaagatcggctggatcagacggaaaatggttgggtatttagcggaaaattggggccaaatctcttctcaatatattaaggtttttgtccaccaaaaagttagttcaaacgaattgtaaatgtaaattgtgaaaagaatcttataaaaaaaaagatgagttgtaagggaaataaaagacccttgatatgtgtcccaggtagtatagtggttagtatccgcgcctgtcacgtgcgagacccgggttcgattcccggcctgggaggaaatatttttttaaaatttttctttcaatttctttttgttaaataaacaagttttatttaattttttcagttaatgcggagctgctgcgcgaatttcgtgagacggttgcattgattagcggttacgacgtgcgcattggcgaggagggctttttcgaggcggagagtgtgcattccaagaactgtgtcttccttttccaagtgcttaaaacaaatttcaaaaatttttgtttgtaaaaccaattcctcacagaaacatggccaacaaccgccgacggtcgatctgttggacaacgaatgtgctcaacgttggaaagacttgattgcgaattatttg

SEQ ID NO: 82479 - DNA, 572 bp, Heterodera glycines
atggaccgttccgcggagtgcccagcagcgacctggcagcgaatcccctgctgtaatgtgagatcggcatctaccgggcggtagtgcactgttcagctatcagagcatccagacgctcgaccaatatctatacatatagttaggtgatactgtcggtgggttttaatctttaatatttcaaaaaataaaaatcaatttttctttttttcagtcaggcacaaaacaaggcgtcaaagctgaacatcaacgtgaacgcactcaacaccctatgtgcaggcactgaactccaccatgcaacggggctgagctgctgctgacgtcgccgggccggccgatgacggagggatcgtcaggatagaatatgatcatctgcgagtgtgtgcgttgtcagcgtttccataactgtcataatgccccatattgtaattgtcaatacccccgatcatttgaattgttgtcggtgtgcccataaactgccataatgccccatattgtaattgcccccccccccgatcattttttgtatgtatttgtataaaattttaaactgatcacctcacagcaacaataaa

SEQ ID NO: 82480 - DNA, 668 bp, Heterodera glycines
  unsure (1)..(668): unsure at all n locations
atgcactttttcaaccaattcatcattgtcattggcattattaaattttaaaaaagcttaaatgaatgcctcagcgaacaacacggtatcattaatataattaaattattttaaataatttttaatttagttttatttggccttcaaagatgtccatccaagctggtcactaattggatgtggattgatttacggactcatcgctacagttgggattattttgaattcttctgtcattcttgtgactttgttaacaaagtatgtgcttaatgaaaggcgtgggaataaaatgatttaaattttttgaaaaactttaattaggtcattccgtggcaccgttaattaccttttggcactttgttccctttttgaattgcttcatcaaagtggccattttctgtttgtgtacaccgcattttctggacagaatttcattgagaatcgtctggcagcaaaaattcttttcatttccacgattggactcggtaatatatgtttaaaaaattaaccataataattcaaaaattatattaaaatataaattcaggtgcaatcactccaacaatgtttttcactggcattgaccgactaatcggaattgctttttcggaaatgtaaaaaaaatttttactaatttaatttttattactaantttagtcacgataaa

SEQ ID NO: 82481 - DNA, 224 bp, Heterodera glycines
  unsure (1)..(224): unsure at all n locations
atgggggtctgggtgagaaaagagaagggaattggtgagggataagaaattttgnataaaaataaattaaattatttattttcatttatagcatatatgcatatcataagtggtatagtggctaaaccttcttactttcattatttgtccgtcggttcaattccctgatggaacagaaaatttttttatattttctttaccattattttaattgaatttaatta

SEQ ID NO: 82482 - DNA, 970 bp, Heterodera glycines
atgggtccgtttgacactgcgccaatgttcataggaattgcggccattaaagcgcagaaaaaagcattgaccggagaagcaattggaattagcagaaagtaagtaattgctgagattaaatagccgccgatattcacagtgataatgcaaaaaagggcacgaaaagtgcgacgattaaacgaatcagcggacggcaagcctatattttttattttaattaccatttattaggttgaatcgcaggatcaaaaaacaccagtaaaaaagcacaaaaatttcgataaaaataccggcggtgtatcatatttaatatgttttacctgatgcttttatacgtattgtaatgccaagaaagatataaatggcaaaagtcattatagtaaacaagttacttattgtaacaaacagaggaatgatctgaaaaatataacacagttaaaatatccgacaaaaaagttgccataattttttcctaagcaaccaatttaaacaattcttggtattgttcgatagatttgagtgtcctctattaacaaaaacgccaaaattaaaaaaaaaattatattgaatcttttttgaaacctggtctttggttgtttacaaaaaattatgaaaatttttgttaaaaatgccaaaggatttatgaaatctatcagaactagagttgagcgggaccgggaaatttgacaaaaaccgggaccgggacttaccgggaccagaaaagtcgggaccgggaccaagtttttcgaccgggaccgggaccgcgaaaaaacccgggaccgggaccaaccgggacttttcccaagtgaaaattttttttgaaaaaaattgaaaatttaagtgcacattgttacgaaaattgccaatattcaaaaatgtacccataaaattttgtatttacgttttttgttatcagggggggttcttggaattttctgagtcccaaaattctgtattttttttaaataaa

SEQ ID NO: 82483 - DNA, 900 bp, Heterodera glycines
atggacaagcatttgatcaccgactttgagcaatcaaatcgtctgctgttcaacagcttttcctccacgcctctcccaatgataattcagcgaaaccaaagaactcaatcaacgcaaagtttgactaccgcaaaccaaaaactgcctttggttactgtagcgactgcgaaaattcccgcaaatgtttcttttcaatacccaatttgatcaacgaagattgaacattggcagcgtcatccactttgagtgtaccgtagaaaggtgtgaggaaagaattggaaaaacgccgtcggcgataacgccatgcccacgggtgaaaaacaaaagcaaattgaaagaaataaattaaaaataattaccaaaaaaaaaaaaaatcatttttgtttaattttatgtttaaaacgtaaagcattaaattttttaactttccaacaattcattgttgttctttgtagacaaattgtgatcggaaacggaccatcgctgagaaacagcagcaaccggtgatcacaacacaagcggaacagcatcacaatgttgatgatgccgttgatgaagatggcgcgaaagtgacgggcgaggacgaggagttggagctggtcacccaattgttacgggcacaacaacgggaggaggagggagaggaggaagcccaatttggcggagtggaaggagaaacggacgaaaacgaagcagtgacagaagcggcacagaagaagcagcagaagcaaaatgggacggaaatggcggacgaaaaaggaaaaggaaaagcaaacggaggaaaagcaaagggggaagcggggaggaacagaacggcacaggaggaagaagaagaagcaaaggcaatcagtggaggtgccaacaatagaaaagcataacaaaattaacttagaaaataaa

SEQ ID NO: 82484 - DNA, 386 bp, Heterodera glycines
atgaatctaaagttttacaataaacatacgcacatttttggagaaatggttgttagagaaaaaatgtggaaatctgctttcggtgaaaaagcatcgcctggatagtatgtttttgatgaagagggggacgaggcggatgatttaacgtaagattagtgcaaagaaatttcattcataattaattataaatttagcctcggagtttcggattttttgcgccttgaatgtgtgctggattttaaaaacaagaacatttcttttacaaagaatgttgtaacgtattttgttgactttgagattgacgaccaaccggacgatgagaacgccgcttaatgttttgaatttttaaaattctatgttttttttttactttattggttacctaa

SEQ ID NO: 82485 - DNA, 1290 bp, Heterodera glycines
atgaccgttgaaaaatcggtgtcaaaggctgagagacggcgctgcttttttgacattcacatcgatggtgagcctgttggacgtattgtgatggaactgtttgacgagcttgttccccgcacgaccgagtttgcattcaatggacatttttgcgtattttatttgaaaacaggaattttgtgatgctctgtactggccaggccggcattggcaaagtgacgggcaaaccgttgcacttcaaaggctcaatgtttcatcgggtcatcaaaaactttatgatccaaggcggcgacttcagcgccgcaaacggcacaggaggttcacattttttacaaagttattgtttttggtcggaaaatggaagtccaaatttgatagttttgaggaaaaaagggtctgtccgcaattgcattggcattcaaaagaagggttttttggtgtgttaaaatattttgtgacgcccttcatctttgtactatgattattcatgacgattatagggttgggcctacgaaccagaaaattcgtccagtattttttgttttgtctttgtgctgaaactctccctggttttctgaccttatttgttttggactccgtcaatgtcccccaaattgaatgaccatgtaaattccaatttttatgatttaggcgagtccatctacggcggtgtgtttgatgatgaggcatttgtggccaagcatgaccagccatttatgctgagtatggccaaccgtggcaaggacaccaacggctcacagttcttcatcaccacaaaaccggcgccgcatttggacggaatccatgttgtgttcggcaaggtacaacttttagtttttttcgcttcagtttttttcatgtcgttctaccgcgaaaatgtcgtgcagttacaaaagttttttaatttaaattgggttttggctggttttcgggcagtttttcgtggtttcaattcgttttcgtccatccaccacaataccaaaagtttgcccttcatttttcgaatttagttatttttagagggttttccgaattatttcttcaatttttaaattatttcaaaatccaaattttgtttcagctgatctcgggccaagaagtggtcaccaaaattgaaaatctcaaagtgaacgcgaagagtcgcccgttggccgacgttgtcatcgccaacagcggccaattggtgaagaagcgcagtgcgtcagcccatgacacggaagaggagggggaggaggagaacgaagacaggttttttgggggaggggacgtcaattacacattcagatgaca

SEQ ID NO: 82486 - DNA, 62 bp, Heterodera glycines
tttattgttcgtcaataaacatttatttattgattgtcttccttaaaccctcggaccgaaca

SEQ ID NO: 82487 - DNA, 1261 bp, Heterodera glycines
atggcacgggaagccgaaaacgaaatgagaaggcaacatcacaaaccattggcacatatttatagttagggcttatattaggggttatttttgaaaattttagcgtcgattcttaggggtctaatttttgttgggcataatgcccaaaagacgctaggtttttcaaatttttggacttttaggctctaaaaataaaaacttggaaaataggccctaataactcgaaaagtaagccctatttatagttattgagagcaaagtttggccaagtgttggtggacaagcaatttccacttttagaaaaatggtggacgacgaatggacgagtgagtgaatgaatggaatggtcgcggatggcataagcaaatgggggtggaaaggggggtaaataatttggtgccaatggtcttccgaccgacccgccgccagtggttgcccgggcaacccaacccatcggcacaatcggcagaaattggcacagttatttgagacaaggttgggggagggttagggacaagcgaaaaatagccacaaaaaattgagggggaagtgaaaagtgtaagaagcggacggtaatttaacggaaaaacaaaaacaaaactttttgaaaagacgcaaaattttaattacgaaatgagagaagggcaaataattttttttaggggacacttaaatttctttgctgaattttatttaaaagatttgttaaaaggatatatttataccaaaaaaatgtaaatttttgacacggttcaatttttaaaatttttaacagtttgaatttatcaatgtttataggtcttttttgaaacaatatccaactctttaatttctgttttaataaaaataattttattttgattactctaagaaagataaaattgttttcgattcaattaaaaatttgaagaaagtgtcaatgttgtgacagccttgagattaaaagtttttctttcaccaataaatttccgttcgcgagggattacatcgacatttgtgacgacattgaaggattatcaacagtcagtcacaatgttttgccacaattttgttcattttataccaaataaaatgccattgggataattaattctctcgtcaatttttttttttgcccagtttttttttttcaaattttatcctcgtaatatattgaattttgtcaaaaagcaagttttataaagaaataattttaacataaaatccttaatcagaaatgcaattagaattcataaaaatttaaattgacaaaaattttaaa

SEQ ID NO: 82488 - DNA, 765 bp, Heterodera glycines
atgatgagtaaaaagaaggtattcggcaacatcaaggcatatttggccggcagaatatcggaaataatgtggaatggacattccacaacggcttgttcgggcgatgtaaaggaagcgaacaaagtagcttgtgtttatttttatcgttttttctgttcttgtttcagttggcctacctttccgtgaaaaaatatggcttcagcgatgatttggggcgcattagcgtaaaaaatattttaattttttgaaaaaattttaatgattcagattgacgatgagttagacccgggtccagaattaaaaaatcgaattgattcggcggcgcaaaaaataatttctagctgtgaacttgaagtgtccattttactcagtaagaaggaaatcaatgtaaattgtaagttcaaaagttaataataattacccctatttacaggaaaaatggaaaaaattagtagaggaattattcgagagagaatttttggatggagaatacgttgaaaagtattttaacgagccgctaaaagaagggaaaggcgttcagagttgctgatctttttaaaagtttttataatattttatctgcgatttttgggattgatcaatttatttactgtttataatttctctgctattgccttgtttcttttatttaagaaaggaaaattttttttgataatggtattgaaatttataattaaaatcgaaaatttccagaaattctggaataactttttttcttgttgaggatagaaatccccaaataaa

SEQ ID NO: 82489 - DNA, 340 bp, Heterodera glycines
taatgatcgatggggtgaaaaaaggaggaaatgggagttttcctcaagtgtgatgcgaatgaatgtgccgataggggaatttgatcggccttaaatatgagcaaaaatgagtgggccgataatgaattgcatgtgaatggaagaaaaaatgcgtaaatgagtgacaggtgagacgagtgaacaaacaaatcctacaaaactttactagggaaaatggggtgatagcgtaaatgggccacaaaatttagttactaaaatagatattctcattaatatttcaatttttaaatatttattccatactttcaaacattctgggattgcccaaacaacagtagca

SEQ ID NO: 82490 - DNA, 1188 bp, Heterodera glycines
  unsure (1)..(1188): unsure at all n locations
atgacgagacttttcatcctcccggcaattttcgtggccgccactttctccctgtggctgctcatttgcaatgcgcctgaatggggcgacgaaagtcaaatggtcggagccattcaccaaaagaaggaggagcagaacggcagaagtgagcataaaacaacaaaaaaatgtgacgggccaatgggcgaatgattggcaaaagcctaaaaaggggcgactttccctcccttggccatgctttggtcagtgtgctgagtttgtaaccgtaccgcgtgattaattatatctggcaattattgaaagtcgagactctcggccaatcttttggtcatttgtcccttttctgatactttcagctttgttctgaaaggcttctttccctgtcagatgctccgttttcctccgtgcccattgaattgccgacgcaatttgagaatttcaccacaatggccgaacagttcaaagcgtacaaaactaggcacacttcctacatcacaacactgttcatctgtgcctatctctacaaacagacattcgctattcccggctcattttttctggtttttgctaaaaccaaatttttgtgaccgttggcgacgagtgaattcactggcaaatgaactaaaaaataaccattcattcaatgcttccgtactttttatttatttagaaaatgacattcacaaatccgagacggactcacaaattcccgcacttttttgacaataaattggcatttcccttctaatttctctccattctcagaatatcgccgccggcgctgtgttcggcctttggctgggctttcttttgtgctgtgtgctcaccactctcggctcaactttgtgctatttgttctcggaatttttcagtcgcgaatacgtcctttactattttggcgagaaaattacttatttgcagagaaaggtgaatgattgggttattttgaatcatttgtaagattgtttagaaaattaggggttttttggttcttaaaagccgtgattcaccaaaggaactgatttattaataaggacagaccaacatcggctaatgagcttggcttccccaggacatgtctttccaaaatcctcaaattaattggtgccaaattggtttgggtgttcactctcaaatgcatttgctttttctgttttttgttcgtccgnttttgaccgaccnntgcag

SEQ ID NO: 82491 - DNA, 1274 bp, Heterodera glycines
atgcccgtcaaacggctaaggaggtttacacattttgttgacgattggagtccttcttctgtcgcatttttaaacaaaaaaggaaaagaggattttgaatgtttcggttttttttgactaccctatgtttgatcggcaatcatgaaaatgggggtaccatattctaatttattaatcttgggattttaatcaatttttgatcaaataactaagaaatttttaattcaagaatagagaacaaattgtaaatattttcggttatacatatctcaattccctcttgcagacaggccaaaattgctcgggttttagcattttgtatagttttgttgaaaatcaaatacttgacaaaaaaccatcgtagagaaggtttaattagctattactttaaatctaaaagtatgtaatacataaattgcgccattagaagacactttcagttcttaattttaataaactaaaatgcgtattgatattcttagggtcgccttatattgattttgttttgcaaaaaacgcatttctgtgttgaaatttttcgcttatgttctgaatttttggctgaaaattatgtcactatttcggactagtactacgagttgccattaacacaaaaaatcgctgttaatttttgaattttttttcttggaaattttctgtttctataaagaaaatttcggcggcgaacttttggtggtgtaacccattaattttgcaatattcatttaaaaaaacattttctttttttacagaattttgcgaccattgcgcatatttggtggttggtcaacgggacgtgttccgagtggagttgactgctttggccgaccatttgtggcatcagtgcacaatgaaatcaaatgccaacccaacaaaagcaatgggcgaaatgagcagcagcaatgtgcaccaactgttgatgtttgcggacagtggagaagtgtgttttgcatgttaatttattggttataaatgttttacaaataattagtgatcggaaaatgggagattttccgggaaagtgaagttttttaccggtttttctcaaattttaaaaatttacattaaattttttgattatcttttctttagagcccttcaatcgggtcggttgtgtgcgttcaggcgccaattggaacggatgttgacgaagacgacgacggcggcacggatgagaatcggcaacaaagacgagatttattgattgctgccgaatgcttatttggcaccaaaatgggaagaaaaagcgctttcttggccaccctggccaggtga

SEQ ID NO: 82492 - DNA, 129 bp, Heterodera glycines
atgagtaatagtgatattaaaaagacaattgacatttggattggagaagcagaaaagtcagaactccagcaaagggaaatttggttttttataggagctgaagaaaaatttgtatttgaggaaattttg

SEQ ID NO: 82493 - DNA, 1277 bp, Heterodera glycines
atggcggagcgtccggagcgcgacgaggtggtgtacaccaacagcgcacgcgacttccacgagctgctcatgcgtccggagcaggaggtggtcagcttcacccacctcaacgaccagctggaccgctgtgtggtgcgcaagcgggagccgttcgcacgggcgccggagcacaacaacttggccgtcgcatgttttgtgacgtcccatgcccggctgtacctgtacgactggttggaggaggtccgacgggtgggcggccgatccctgtactgcgacacggacagtgtgctgtacgtgaagcagcgtggcgctgaaggtgtgcgcgagggcaacgcgttgggtgacatgaagcgggagctgcccggccgtcgcatcatcgacttcttcgccgccggcccaaagaactatgggttccaacacgtggacgcgtgcacgggcggcgacctgagggcggagcgcaaggtgcgctcctttgagctcaactatgcggcggaccagcagctgcagtatgagcgcatgcggcagctggtcatcaaccactttggcgtcgggtaaataatatgacaccactcccctgttgggtcgagggggggggcactgaggcactctgaacacacaaacacacacacacacattttttgatgattttcaggcagcaccatcaacaacaacaacaaaggggtcccgcggctgatgctgctgacggaagcgatggccaggaggagcgcaccatctctgtgccatgccagcggtttgtgcgcaaccgccaggcggacatcttcacgcgtcgctccacccgcgtgtaccggcccgtgtacacaaaggggcgcgtgcttcggcggggtgcagcagagtgtgttggtgagtcacaaaagaaaacagaataaccaaaagggagaatagcaactagattaccacacacacacacacacacacacagcaacaacaatttcaatttttcagatgaagtgccgccgcaatccatacgcactcgcccatttggatggagctgttgtgccggtgacgtgggatcacccgacagctcagtgatgaacgaggaggaagaggaggaagagcccatgcaaatggctcccgatgaagctgaccagggggaggaagaccgatggggggagcatgtttggccggaagaaattgctgatgataataaaaaaccagggcctgaacggaagcgtgcaagggtggaacagtgcgtggccccgccgccgccctccccaccacagacgccgcttcgcgagccgcatgcggagccggagccg

SEQ ID NO: 82494 - DNA, 3369 bp, Heterodera glycines
atgcaaatggcaccgggacaggaggaggaggaggacgccgagggaccaatccgcgccgtcgcagtgccaatggagacgctccggcaagtttaaataaaaatccgcaattttaacaaataataattgccctccctttttaaaggagaggaacaatgggaggaaacgggcacgtgaagacagcacgagcaatggcggcagcagcaaccaaagtggcacagccacttcaagtgtgcggcacccgctgtacggaaacaacggcggaggcggcatcggtgccgcgctcgatttggacatgcttttggcgccaatgccacagcagttcgtcagcgacacatcggcaagtttttttttgagttttcaaggcgggattttcggggtcactgatcacaaatgtgatcaaaatctgagcttaataatttcttttgttgcttttacagcgcggtgcaacaagcgctgctggtgccggtgttgcccaagtgtcagcagcgaacagtgcaactgcttcttcttctgctgcttcttcgggtgttgtgccgacgcggtttttggacagcaatgtgagttaattcatgcactggtgggggggggatggtttcggcggatttccgatggcttttgcctcggaaaattttcacattttccaataataatttttttaattttaaattccaggttggcttcgcaaggccgagtgatggcgtcggtggtggtgttggcggcgacggtggacaattagccatggcacacatgcagtttggggtgagtaatgttggacatttgaaaatgcccattcataaattgcttttgctccgcttaagctgtcagcaggcggtggaagtggtgtcgtcggtgatcaacagcagaatttgcagccagtgagctgcatgcgtggcgtgccggcggcggtggcgaccacgatttggactggttcgtccaatgtaagtttttggagatgttttggtcatattttttgttttgcttaccgagataatggttaacagagattttggttaatagaaattttatttttgatttaaggccggcacttttgtcaacagcgggtgtgctgctgctgcagctttcggtggtggtggcatttttgggagcacgacgctgcgtagcgggagtgccagtgctgctgaaggatttggcggactttcggtagtgggggaagtgagagggggggggggaggtcgagatggttgtgtttagtgattaaattttaattttctgtgtattttttaggccctccctccccacattcgtgaagcgattgagcgcgtccactcgaggcaaatgcagcgcatggttactgcacagcccgactttaccgacattctcccaccatgtgctgacaacgggatgtcaaataccgcttggctccttttggattggcaacccgacatgctaattgggtatgttctcaaattctgatcacttttggtaatattgtttatacattggccccgttttgttttaaggcgtgttgttgggcttgtcgtgttgtgtggtccgttcaccacgatgggtggtctgaacggcttcgacgtgcgcctcatcttcgaccaacacaacacccaacaggaaatggccgtccactgttgggaggattgcatgccacgccttgccaacaacattcagtgcgaccagatcgtcgaattcagtcgtcttaaagttcgggagcaggggaagaacgccaagggattcttcccgttcactctcctctacaacaacgagtctcgtcaccgcgtgctctcggcatccggccacattggtgagttgcattttcgcattttttcgaacgtttttttgtaactgtgttcatttttccctcacattctcaggcgcaaatttggccagcagcagtacaccaatcattgttgaggcggtggaacagcaacagccgggcatgaacactctcagcaacgtggtgcgtcacaacagcagcagcagcggtgccaataatcagcacatccacggacaaaacagtgagtgaaaagcaattgtcagttcaacaaaatatgaactgatcagatggatttaattaataatttaatttccttaaatcgttattacaggcaccggcgttgtgacggcagatgatggacaaagtgagggcgagcccgatgagacggcggcggcagcgaccaatttgaccaatgccggagcgcgagatgcggatgttgaggaaggcacgagcgaaacggttagcggaaattaaacaaagaaacgaaacgaaacgaaatgcaatgatcggaaaatctcttttgttttacacactcacgcacatacacacgctcgcatttatgacaacaataaacattttgtcttttctctctctctgagtaaatattgttacactgatttgttagtttcttttttgtgttgtgatgaatttcccgtcacattttttgttttattcatttatgcgggcgtgttgtgggcggtcatgccgttgtaacaaaaaagtgttaacaatactatttttaagaaaaaaaacaacaaattgtgtccttcttataggcatggctgtccacaacacgtccacccccgtgtacaccggttgggcgtccgtgtcgtcgccgccgtcttcgttctcgctgcgtttctccggctgctgtgccgcccagccgtcgatcgtcaccaccaccgcagcgtgcctgctctatcactgctcagcgcagcctgcacagcattgtgcaacgcatgaacgtcgttgatgcgcaagtctcgcgcgatgagcgcaacacgcgtgttcgtcagcgagcccgccgtcagcaactacagcagaaccaccagcagcagcagctgagtcgtcttcgtcggcacgtgccgtcttcatcttcgtcatctcccacccacccgttgttgcgtcgtggagtcccgaacgagttgcgcagtgccagtgccgttgaagcggcagatgtgatcacaattgacgacacggagccgctcggcgttgagccgcaacaacaactccaacgtggcgatgcccggtatttccaagacgaattgctgacgctggaagatgaagttggagcggcgcacatcatcatgattggaaatgagccactctcggtggcagaccgagagtggctcatatctaccggctttcaaatgcggcacctcccatcgtcagtgaaaggcagcgtggaggtggacaacgacggcaacaacaacatcagctgttgtatttgttacaactggctcgtctcagacgtggacaccgtggttcgtctcgcctgccaacatttcttgcatcggaagtgcttcgcccaggaagcgactcaacgcagtatttgtcctctctgccgacggcacttcattacgggggaagcaacacaacagaatgagggtgccggaaactga

SEQ ID NO: 82495 - DNA, 1118 bp, Heterodera glycines
gtcaattgtcaaactaccaaagatttatttttgctgaatcattcccaacaatggtgaagcatatccgtggtcgtccattgggagtaaaattagtataagttattaattacataaataaaacgacggttttagcaagtgcgtattggctttggtgatgccgaccccctttgggactcagagaatgaaaagtacaaagtgctgtgccgaagcattcatgtttccaaggcagctctgtacattggttacatgcggttgttggtctccttagtgtccagtctcttttttgcgtaccaatacatgatggtgggtgtttgaccgatgcttgaacattaattcacttttgttcgtctaggccgtcactggccaattgtcctccgaccattggattaaccaagtgactgctcgctttatgtgtaagttttatcagtatttcttttctttccatcggtccatttaagcacaggcaatgatgtccatctgtttgcaagtgattgtcgtcgtacttatggtccacggtgtgaaggctgagaagaagtccttgttgcttccttttattgtgtatgctgcgatcgcagttttggctggttcgatcaaggttagctgtgtccttttccctatatgcaaattactcttttgaggttatgagtgatttggtgtatttggacacgagcgtctacaaaaacaatgaggcggagagtcgagccgccaaagtgtaagtttacttctatttgatttcttttaccaaattcttcctaagattaggcccacattttacaggcaatttctcactaatctgttgcgcactgtgctccaggcctggtgtctgtctgttgtttggcgttgctatggttacctgaccgaaaaaaaggtggcacgtcagattcgtgaacaactcaactcaactgcgaccgcattcaattacccggagaatttgatggggcacccgtcgatgccgcagcagcctcctccttacgttagtttgcatcatataaatgcttgttatttaattcttaaaggcggctgttgtcactgctccgatcgcaattgggccgtccaatgacaagccgcagacttcagcgacgaacacatccgcaagtgcttctcatattcagcagtag

SEQ ID NO: 82496 - DNA, 302 bp, Heterodera glycines
aaagagctgcctaggacttgcgttataacatgataaaagtttgaaattcccacaacttttttctgagatgtcaaattgcttagcattcgcttagaaaaagattctccttttcaaaaactttttttagataccaaatttgttcagtttaattgggaatgaagcgagttatggcagatcaaaataaaaaatacaaaaaaggcattttccagtgtaaattttgaaatagcgcgcaaaaatttacgccaaatgcgctatttggcgttatgagcaattttgtctgacactggcgcgtacccatagtg

SEQ ID NO: 82497 - DNA, 420 bp, Heterodera glycines
atgggacccgttcgtaccaggaggggttttttccggttcttggtactgagtcatttttttcagagtttttccatggaaatttgtggtttatatgttaaattgtcgactcagtaccaagaaaagaaaaaaaattccgtcacatccatgcctggttcgtacatgtcttaattagaaaaattaaataaaaattttttagatttaaatttgctaaatttgatcgtcacaattcgggtagcattcgcccacttcaggctccgataaatgtgcatgaattcgcgccttttttggaaaaccgtttgccgaactcttttcaattgcggctaattgctttcggactgcatcgatagaaattctctaaaaaaaacgctagctttttcaaaaatctaagtttttcgcaattcaaaagaaaatacaaataaa

SEQ ID NO: 82498 - DNA, 826 bp, Heterodera glycines
atggatgaagaaatgggaaccaacccaaatgatcaacaaaaaagagaaataatcaaatttgaagcaattaaagaaaagcttaaggaaaagtgaaaatttcaacgaaaaaatcaaacaaaaattgagacaaaattggaaaattattaggcgcgtaaaaaaatatataaatggaaaaaagaattaaatttatataaaaagagttattatgatgagaaaaagaatgaattcattgaaagaattgatgaattcaaaaatttatatggccaaggcaaacagaaagaatttgtaatggaattgggcatttctgaaagaacatttcaccgccaaaatacaacaaaagtaagcgatttttaagttataaaatacttatattataaaagtgagagaataaaaataaaaatttttatttagcatgcaataaatatagcaatgaagacaaatttaaaaagttgaagcattatttcgaaattaaagaagaaaacccgaaaattagcgatgaaaaaattgctaagaaattggaaattggaattacaactctgaaaactttgaaaaagacagctgctttaattatggaaaaatgattttttttttttttgtggattctttcggtcgatttattattgtaattcctaaaattatctgctttttttcttttctgttagaaaccaaaggttttttctcattttgagtatttttaaacatcttttaaaaagcataattttaaacaaaagtagggctgccaaagtatgaaatttattttatttttttttttaatattatttctatgcaaaaattaaaatactatttggctatgatgataaataaa

SEQ ID NO: 82499 - DNA, 445 bp, Heterodera glycines
atgaatgtatttattatatttttcttcgcttataaaattgaaaccgccaagattcgaacaaattttgacgaaatattcggcaacggatgggacaaaaatgaaagtgaacaaaaagtaataaaaattgaacaaatcgaacaatcggaatttattcattcttttgttcgaaatggcgcagaaaatggaacacactcaaatgaaatgatcaaagaaaaagagaattaattcaaaaatatgaaacaattaaagaaaagttaagagaaaaaggtaaatatgaacgaaaaaatcaaacaaaaattgagacaaaaattggaaaattattaggcgcaaatcgtaaaaaaatatataaatggaaaaaagaattaaatttatataaaaagagttatttatctggcaaaattcgaccaaattttgacgaaatattcggcaacgaatggacaataaa

SEQ ID NO: 82500 - DNA, 1014 bp, Heterodera glycines
atgccgaccggaaagacgctgcgggagattagggaaagggaagagaagaaacatgaaatattgagccgctacgtcgacttggaggtgatctgggaacacgaaataaatgagaagctgaaaaaggacacagcaatgagggagtttttcgacaactggaaggaccattcgccaataaaaatcagagacgcgtttcacggaggacggacaggaccaatgaagctactccacacagcaaagccaggccaaaaaatcagctacaaggacttcacaagcctctacccgtttaccaactttacgaccgactatcccctcggccaccctaaaatcgtcagtatcccaccaaatgagcagacggttaactggcgttctccatccgacaacccctacaaaggtctgctcaaagtcttgcttctacctccaaacaacaacattaacgtcaccgttatgcccataaaatttgatcaacgcctcctcttccctctctgtgagaagtgcgccaaatacatcaccgcaaaatatcccaatggcctcaaagacaacgactactcctgcccacactacaacccaaatgaccgggccttcgtgtccacttgcacccatcttgagttaaacgcagcattggaggccggctacacagtccgcaaagtcttccacgtcctccaatacgaccaatggagcgacaatgtattcaagtcttacgtgagtgaaatgatggccctgaagatccacgcaaccggcttcccgtcatggtgtgagagcgaagaggagaagagtgaatacattgaggagtgctggatgaaatttggaattcatctggagaaggagaagatgaaagctgaaccggggaagcggtacatcgccaagctctgcctcaactcactttggggccgcttctccatgaggaatctactttcgaaggcggtaatcaacaatgacccttgtgttctccgccaatacaccgacgacaagaaaattgatattatggacattgagctgatggatgaggacaacgac

SEQ ID NO: 82501 - DNA, 729 bp, Heterodera glycines
atggcattggaaaatgggaggacgatgaacggaactcagcaaaacaataaaacagcgattcgaccgtcggagtttgaggatgacacggagaacagagactttgaaaatttgtccatgtcagtgtcggaggcatcgtcagaagtgggaagtgtgtccatccaagacggagcaatgcaaaaccaaaatgaacggccaatgcttgaaaatggaatcacgaaaaggaacgtcagactgaaaagtggtgagatagaatatgaaaaaatttacgtacaggttaggtgaaaaaatttacgtacaggttaggcaagaaacctggattttctgggtaatattttagagtttgttcattcaagtggcaaatgttgaccaatattttatttcaatttatcaaaaagtgattgaattaaattaattaaatattccaatatttttcagatttaagaatttcgcccgcaagttccggaagttgggagagggcaattcgtcccgtagtgaacaaacatcacaatgccaatgctgcgtccgttggacggcgacctgcggcgaatacccaacgatcttcggtgtgttggtattgtggtgtgaaaggacatgccgcggcccattgtcaaaaaaagcgcagaaaaggccaatgagaattgcgagcacagacccaaaggaatgaatgtgcgagacaaatcggaattccagtgattgattatcgaatgtatttcacccatttttcactaa

SEQ ID NO: 82502 - DNA, 285 bp, Heterodera glycines
atggctctcccagccgtcgaggtcagtcagtcaattccccagtcatcactcccactactggccctccccctaagccgaccgatgggacggagcctttccgcgggggctacggcccagtccaacaatccgtcggtggacggaggagatcgatctccggggttggaattaagcaggccgtatcccgaaacccggcacggcttaactgtattttatgtcgattgcccattgaaacatatttttcaagaagatgttcaaagaactttaatataaaaccacaagaagaga

SEQ ID NO: 82503 - DNA, 1193 bp, Heterodera glycines
atgtctgggccaatacaaaaagggatcatcaatgcactcaaagctctggacaatgccaaaagcgccacctcactccttctacaccccgacccggacctgtcaaactgggaaaatgccatcaacttggaggctcaatttgatcgcgtcgtcaaggaaattcgctcgatggaaatgcagatggacagtctacgagattcatccaatgcttggatcgaacttctcggtcgtctgatcggagacgacaaagacaacggcgaaaaagaatacgtcaaattcgacaagaatgaaaaaatcgccgaccgatacgacgcagcaacaaccaaacttcgggatttgcgagatctcgaagcaacgctcagtgccgcagccaaactgcacagaggcagagccgacagagaagcaaaggcggatcaattggccaatccgcagcaacaagcgcccatgctaccagcgatggcagcaccaatgacagtgccaacattcacagcaccgctctaccaattccaaccaattcaactggataaattttttggccaaaagcaaaaatggcccgaattctacgaatccttcaaatcggcaatcggcagccaatcaatcagcaaagcgcagaagctgaacttgctccgcaatctgctgggcggagaagcgcgagaactcatagcgggcttccggttggaagacgcaaactacgagacggtccttcagccgttaaaggacacgtacggagctccggaggaacacatcagaagtcttcacttcgaactggccaatctcaagccgtgccgaagcctccgtgagaccaaagactttctgcttcaacttgagcggtttacaagggagctgaacaatgccggagaggacatcgagggaccgcaggtgttcctcatgctggagaagaagctgactccaccattcctacgaagcatcctcacaaagaaaggagaggatccggcaaactggacgacaaccaaattccgggatgtgctaaccgaagcagtccggaaagaagtccaagaagtgatgggagaatatggccatcactacgtccaaccaaaagcagaagtcgtctcagcagcacctgtacaagcaccgagaacaccaaaccaaaggtcacgaaggcctaaccaaccaatggcactgcgtgatatgacatttatcgcctcatcactggacgagggtcacaaacatcaagg

SEQ ID NO: 82504 - DNA, 1135 bp, Heterodera glycines
atgccatcaccggggaattatcacaaatggaattgggcaccgggatgggacagaaatttcagaaatggggcaaatggaaagatcacaaaaatcaatgatagggaccgggaggaacagaatggaggataccagggggtccacaaaacgaagaccaacaaccggggatcaaagaatgatcacgaatgggggttatcacagttaaaggcaaatggaaggtaggggagagaaacggcaaaaatgcctaatgaattttggttgtgaaattgggggcatttttggccgcttaaataacaataaagttaaataaaaagtggcaaatgtgagcagaacaaaaatgggccgaaaattgggcacgaaatgaaaaacgggggacaaaatgaacagatgaacaaaatgggcggaaaacgggaaatttgggggttcatcgttctttggagtcgattcgccaaattggggacgggggcagaaaagttgcggtttgatgaattggtaattaatttgtgcgcggagtgggggaggaacacagaaaaacaattaacaatttgaaggaaaaaagggacagagggatggaacgccgaaaacacgtcgcgcggcggggggagttggtaaagggggcgccttccctcttaattcgccgatcattgattggcgatcggaattgaaattccgacagtcccaaatttaaacaaatttttttatttgtttaattcttctgaatttatccgagaaattggatggacttgtatatattgattggcacaatgtggatagcctttgggtagaggggtaattccggctagagaaacggaaggtatgtatatgtaaaagagtcaggtactaaaataggtgctaaaaaagtgcaaaataggcgctaaaaacgccaataaatattggaaaaatccagtgtatttatgcacaataattacaaaagtgaatcatttctgatcaatttcgcccgcacaattgcaacttctcatgaaaacaaataaattttggagacgaattttgggaaattttttcatagggaatattttatgaaaatttgttaaattttttgggagaaaatgaccttaacaggtttataatatctcattttaacattttaaaaattatttattggtattctaaggttcaa

SEQ ID NO: 82505 - DNA, 486 bp, Heterodera glycines
atgccaccatcaacatctgctggaactgatgatttggacaataatgcggcggcggcatcaattgcgttgcccgaatttttggccgacctcaaggcggaacggattactgtaaacatggaaaattgtcgtactgagttggccccaatcaacgtgttgtggctgagttcaatggtccgtccgtctttttggccaaatttcagcaattcgtttcgaaagaaaattttaaatttcccattttttcagcttctcgcgctggcttctgtgccgttctgtctcagcgtgttggcacttctgatcacggcaaaatgctggtcaactgacggggatggagccggtggcatatcgttgcgggcatatttgcccggatgggttcaggcaaaaaacaattcgctaaattcataaaaattttctaaaagaatttaaaaattccaaaaaaaaaaaaaattttaaaaattcaaaaattggttcgcctgccaagaaaataaa

SEQ ID NO: 82506 - DNA, 178 bp, Heterodera glycines
tttgaagaaaggagctcaaaaaacgcatttctgcattaaaaattttcgattctgatgtcactatcggtcactagaaatcactattttggcgacttcgtcactaaaatagttaaaaatcactattttggcgttttgtcactattttttcactatttcgacattttttggaaaattcctt

SEQ ID NO: 82507 - DNA, 3605 bp, Heterodera glycines
gcaatggcgatgatgaagacgatgacgttatctttttggctgaaatgaatttgcgaaaggaatgcgacggcggtggcaatgcccaacggcgggaggacgacaatgttgagcagcagcagcaggagacggcggcatgcagcaacaacgtggcgcaacagcccgctaatgatggtaacattagggggtgcttttttgacaattttttggttgctgcatcatatatatgaaaaaaagggggggggggagtcgacccgccaacccttcctcgcttgggaaaatttgtttttactaaaaaaaaaatttcaacaaaaatcatagagttttttttgtaagaaatccaaaacaaaaattttttgtttgaattacttttcaaaaatgttccaataaatatttttggcactttgagtcggaaaatgcatataaatgataatataccattgaatagagcaggttcgatatgttcccttgttagaaatttgaaaaattgtaaatattttgttcctttttttcttttaaattaaaagtactatactagtatactgtaattatctgactgatcggcaacgatagtcactatttcggctgtgggtagggggtactgacaaactttttttttttgctttaaccactgcgccttcaccattttttcgctctgtttttaaacaagaatttcggtgaagagaagaggggaagatttatttttgcaaataaatgattttttttaatttacattttccccctattttcaggcaccgacggggatgatgaaattgtatttttgggcaaacagaaggatgaacgtcacaatggtcggcggcggcggcaatcgttgacacggctcattacggaattttaccgcccacggcagcagaggatgaggacgatgatgatgatggccaaaccaattttgtgtgcaaccggcaataatgccgtcgatgtaacatgatggattgtttaaatgcattaacttttgaagtaaataccgcatgaattaaaaattttttaacttaggaattaatgttttttatgcattatgaaaatgaatttttatatattaatctgtttttccattttgagcaattgctgtaccatcaagcgaacaatttcctcgagggaaaaaagcatcaatcgaatactattagacaaaaataatatttaaaatataatataatatgttaatagtgctagggggtgtcttgaaatttccaggccaattgaaaaaaacttatgatgaaattatgattgtcggcacgtatttgaattagcctagttggaaagcactgaatttaataaatttacaaaaatacaaaaaatcaaattgatgggaaatatttaatgaaactctgctcttgcttctcacagcagtttttttatttaactattttttagcctgcggttcccgcgcctgatcctgctcggccatttgttttccagctgcaacggggcaatgagctgtgcggcgtggcttttgccagcttgctctggcaacgcaccaaggcatcgtcaacaccgctgacgagcgcggttcgccctttcgttgcccgtaagcaaaaattatgaaaatccattaaaataaaacaatcattgagttttatattgttttttattcacttacgcattttccactggcaatttaggtcataataaatagagctatggaatatgtcgattctgtgcacaaaattgtgattatttgttttaaaaatacaaatttggcgatttttgccaaacaactaactcattcattgtcagcatgtatttgaattagcttagttgaaaggcactgaattttctaaatttacaaaaatacgaaaatcaattttgatagtgaaatatttaacaaaactgctcttgcttcgcacatcaaggtcctattttgaaagcattttttagccccctgctcatgcgcctgtggaccctgctaggccattcgtttgccaccttcaacggggcaatcagcggtgcggggccaattttggcaccgaacatgcgcttcaaacgcacgaaggcattgtgcacaccgcggacgagcgcggttccctgtttcgttgcccgtaagaaaaatttaaaggcaccggataatgcgtcagtggaaaattcttcttttgaatttgtcacattcaatttaaaagaaaactatagaattttgaaaatccattaaaatttaacaatcactaattggattattttaaatgtgttcctgtgtcaatttaggttaaaatttaaaaaaaattgatttaccaacgcattttttcagtgacaatgttttctttcggtcatcaaatttaatactatacatatgaaaaaatgaaataaaattatgttgaaaaattaattcatttttattttcatgattacagtatgctttaattggtacttttttaaaattaatttttttatcaaataaaaaaaaatatattaaataaatgtataaagaaatattatatgttatgaaaaatattaaaaaacagctttttagcaaattaagcgtgcctggctgtctctttggcacaaacagcgaaaggaattgtgatcgtcatgtgcgaacagtgcatggcggctacttcccgccggtgatttgtctgccgggagaggcgctgtgcatgtcggcggtgcaaggtaggattttgaaagtttttgaaaatttcaaaagcaaattttgggttttgatctttttcaaaatttccgttgttttcgtttcgtcctatcgccactttttgagtttctttttgtgtttcgttgttgtccgtcaaaaacttttcgtttcggatttaaaattttctttttgttttcttccaatgaaatttggacgaatatattcacactctaagaataacttttttgataaaaaaagataattgatctcattgaaatattgtagtctagtagtgcaaactgcagattgataatgtggtgttcattatgagttcggtcctatatccccgcactttttatttatttagaaaatttttgataaaaggacaaaaaattctgaaatataaatacatggaataaaaatgaatttttaattctttaaaattttttaattggttagaaggccaactttttgttcggggcacatttgtaatggaggcacaagtgtcgcgccgcaccaaaaacgttgaccggcttacactgctgagcaactttgaccaggaagcgacagtaagtaaatagcaaattttatcccaagtgctaaataaaatttataagaaaatcccaaaaaattcttttttataagttggtgaaaacttgttttacatcgatttttgaaaaattttagacggcaatccaaaatgcttgcgtcgcggccatcgggttctccgagcccgggagccggagaactcgtttttcgaccataataaggtcgttatgcgaacacgaccgggcgagggctgcaaaatgggctcctgtggatttgccgcctttgccgcatttttgtcgctggcgagggtcgtgccgctcccggagaaggccatgagcggggccatcgacggcgtcagtttgagggtgcgggcagttgtgcacatcggtctcccaagctggccggggtgttgtcagctggctttcaccaagcgatcctgccagccgtcaacagcagggat

SEQ ID NO: 82508 - DNA, 617 bp, Heterodera glycines
aaaactttcaaaatcctaccttgcaccgccgacatgcacagcgcctctcccggcagacaaatcaccggcgggaagtagccgccatgcactgttcgcacatgacgatcacaattcctttcgctgtttgtgccaaagagacagccaggcacgcttaatttgctaaaaagctgttttttaatatttttcataacatataatatttctttatacatttatttaatatatttttttttatttgataaaaaaattaattttaaaaaagtaccaattaaagcatactgtaatcatgaaaataaaaatgaattaatttttcaacataattttatttcattttttcatatgtatagtattaaatttgatgaccgaaagaaaacattgtcactgaaaaaatgcgttggtaaatcaattttttttaaattttaacctaaattgacacaggaacacatttaaaataatccaattagtgattgttaaattttaatggattttcaaaattctatagttttcttttaaattgaatgtgacaaattcaaaagaagaattttccactgacgcattatccggtgcctttaaatttttcttacgggcaacgaaacagggaaccgcgctcgtccgcg

SEQ ID NO: 82509 - DNA, 881 bp, Heterodera glycines
  unsure (1)..(881): unsure at all n locations
atgcgacgcgaattcggcaagcgatggcncaacgaagacatcgaaacggggcacgtcgttcggtattatgtgaagtgagtgaaaaataggcaaaatgccaaaaaaagtgatcatccaaaatgccattttttatccaattataaggacattcttgagaaaacgaatttcaattcgaaagtttttcctaatgatgccgttgaattcaaggacaaatctatttatattattaatttatttgttgcgccaaatcatcttttttatcatttatttttagaattatttatcatatcataaatattatcatacttcgaatttagttggcataacttttgaattctcataacttttcttttttttatcgaattttagaccacgattttttattttctaacaattttttaaattctaaagaaaaattcaaaaagggttgggttttctcccattttaggtattttgatgtgaatggtgacggtgtggtgcaattggacgagtttctccgagtcttccgcagggatttggccgcgatgacttcgtcccgaaaaaagtcggcggatacgggcctaaatgcatctcgaactgatcgcaatcactccggcaccggtcagaacacatcgggcacattgggtcgagtgcgggacccgggcttggcctggatcttggactttgacaacgatggcattgtgacagcggaagaattggattcggcggaccgaatgattcgaaaagtgccgaaagtgttgcccaaatttgacaaaaaggacgaactttgaataatatttatgttatcttatttataacatttattgttattattattaaggcccgatttgtatggatttccttattatttttttgcacatttattccgaactaaaaataaa

SEQ ID NO: 82510 - DNA, 1270 bp, Heterodera glycines
atggcgtacaatcagcaggcgacgagttctggtgccatttgcatcaacaacacagccagcactttttgctgctgctacggcgatggctgcaactcggcactgtcccccgccgtcggtgggacaatgacgtcactgttccgctacagtatcccattggcactgttgttgatgatcggaagagtactgtactgatcaatggaaaaccttgaggacttttttcatatacttctgatatgtgttattttttcttcatcgttttaatgtatccatcgtactccaatcagtcaggggaagtcattcattggtgtggtgaaaagctgagtgaaaagccggcgacttcgcctccgcggcaatttgaaaccgcgatcgcgttctgcaaactttgattatttttctcaacaaattcctttaaaaattccatttcccccagtttatcggcaccgcggatcaccattccctctagaattttcaaacttaacccaataacaaattcgacccatttaaatgattcgatgagcaaaaattatgcgattttttatataattttatcacttaaatttccgtttcttaaattttagctgataatttgtttaattttgatctttcggtaaataaatgaattaaaaaaatgccaatttttatttgcttttcccatcacttccaattgaggaaattccgatgcccaaatcgattctttccttcacttccgctccaaggtcaatgccctctcaatgcctccaattcctcacattcgttctgctcacattatttgcttcacacaaagaaaagcagaaaactccgcccaaacaaaacgaacaaatttcagattttgtttttttcatcgcaaaataaatcaataatccgaacatcgattaagaattttaaattaaaattcagtcgacaaaatgcttttccgttatttggctcttttttatctcacatttaaaggtgagcaatttgtttatgattttgaaaaaaccagaaaaacccgcaatgaacgccgctcatcagcggctattagcccggggcgagcgaacggcacttcgttttcgagaatttttttttgtatttttaagcttttgcctttgctaattccgacccaattctgccgctgggcgacggagacgaaatgaccaacagacggaggccggaggatgccattccggtgatcgaagtgcgcggcgaggggaagccgatgagcgcggcacaaatccgcgaattggaagaagcggccaatgggggaccattggacataaaagtgggcaattaa

SEQ ID NO: 82511 - DNA, 557 bp, Heterodera glycines
cgcggccgtgcgcggtggtcgtgctggcgttgggaattggaattcggaatggggagggaaagggaaaagtgccacatattcccgaaggatgggtccacggggtgatcaagcccgggattgccttcccacactcgctggtcacacaataagtggctttattctcgggacgactgagctccgttcgcttgaaaaggcaaacgttaaatacaagtgaaaagtgaaatgtcatcgatcaattatcgctgggagggcagtacaattagtaaaaagggaaattaaatgcaaaaagaaataaatgtgaaaataatgaaatcctagagcttcggcagttaaacgagtaaaaacccgacaatttcgattctctcttacacctccaaccttaccaaagaccgtccccggtctcttaccaggatttcacttcacaattgccaaagcaaaaaaattatttcaaaaaaataataattttgctaattttcatgcccttttcccaattttgaatcaaaattttatgcttcgtgccactcactcccaaccttacattggatcgtccctgatcc

SEQ ID NO: 82512 - DNA, 848 bp, Heterodera glycines
aaattgagaaattcttttcgaaaacaacgaatgattcggaaaaaggcggctttttggaagaaagctcggcgattggtaaaattttggcggccaaagtttcggtatatggacgtaagttgaatgccatgctggacggcggatcccaaatttctccaatttcggccaaattcttctcacaaatcatggataaagtaagccaaaagaacgtcatcgcccgctctgaaagccgcattatcgatataagcggaacggaagtgaagtgttacggtgttgtttgtcttcccattcggcgtgaagcattagagacgaagatcaatttattcgtcgcgcaatcagcttttggctacgatttgcttttcggcacgaatgccttaaaacaattaggcttcaaaatgatcgacgaggttagcaaccaaatcgtagacttctcacccgcttcaatgctcgagaattctccaatgatcgttttcaaaacatttgttattgatggccaaaacttggacaaaacaccgggaaattttggagggaagagaaaggacgcgtcggagcctaaaaatggcactgggaccaagaaatgtaataaaggacggcgacaagaaaagcagtcagagacagagaagtcatcagttcgaaatgccggtgaaagaaggcccctattgaccaaaacattcgtgccccaactaaaaaccaaggaaattccgatcaaaaattctgaaaattttggagaaagtgcggcaaacaaacagcgattgaattcggttcaaatgaaagtgggcgtgccaaacgaaagcgaagaagagtatttggagaaggaaaaattatggtcaaattcagttagggacaactga

SEQ ID NO: 82513 - DNA, 520 bp, Heterodera glycines
atgggaaaaggaaaaaaacgggaacggattccctcgtttgcacatgggaatctcattcccggtgggctagaaaagaaagaatcaaagcggactcttaacaaatcaccatttgtacactctgttcatgtatttggaatgtccgtttttttcgaacgccaatttaattatcactttcaattggttgatttggtaagtaattaaaaaattaagccgataaaagacaataaaagttataaattttagctctgctgttcgaaaagtgattaaacagtctcaaattgctctcaaattttcgatattttttgaacctgtgccagataacccgaggctggcattgataaatttatttatgtttgtgacgaaaatatgacaaatttttcctgaaaatttcagtaacaaaccaatcccaactaattaattaatatttgtcaatttcgtttcacaatctgttgcttgccacaatctgtcaatgatttcgtcttcaatgagttcctttctttcttatgagattattgaatta

SEQ ID NO: 82514 - DNA, 975 bp, Heterodera glycines
atgaccgtccctctggttgggaacggtgctaaaaatggccaacattttggcacaaaaaaagcgccatcgcaaagactccgctccattttctcatgggtctcaaagttcaatcaaaatggtcacattatgaagctctaccaaaagttgaagaacacccccgggggatggggccaactcatccgcaaaatgtacgctgaaatgctttcggcaaagaaactcggagctggcaacagcaaaccgttacgcgagaactgtcataaagccctccaactgattggagagggacgagcagttcaacgcgtcgatgttcagaagataaaaccgttccacgacttttggacccttttgaaaaattcggcactttcgctggtgacactttttaagggcactttaaaaacgaaaaatggaagagaaagtgaccgtaaaatgaagagagaaaacattttacgagcattgaaaacattttccacagaggacaactcatttttcttgcgaatggtccgaaaaaatggaaaaacgaacgaaagtaagcaaaataaatactttatttatcagggattttaaaaaatgaactacttggtagagtgattgttaaatgtttttcaaatttaagcacacaaagaccaaaaacgacgacggcaaaaacgattggcccctttgattatttttggcataatcatcggaggactgttggtgatcgcgtttttaagtgaatgggtaaaagctggtttttaaattcgaaaagacataaaattctgcctttttttcgagttgtgctattgcataaagattttaattttggttcaattagcgacaaattttgaagttaattcctaattgctttttttcattgtgttggacaacacagggaaagactaaccgtttgtttttacgttcattcttattttaatttattttctattaatcctttcgttcgaaaaggtcgtaaaccgataaatgcggactttttgataa

SEQ ID NO: 82515 - DNA, 508 bp, Heterodera glycines
atggcatcgcctccggctattctaccgtttgggtgtgcacctgtcgcacagtctttggtgaatttttagatttgctttcaaaaatcgttgccaacctttttgagccctttttggctgctccaccgcctccgcccattctgcgctcccccgctggctttatgccggcagcggcggtccccgcatatgccccatctgcggcattccctggtcttttttagctattttaatgctaattcttggctttttccaatgtttaggcattatgccagccgctgcttttcccggcctgacagccgccgccgctgtgcccgcttttgcaccggcagccgcttttcctggccttatgcccacttattcgcctgctgttgccctcccggcggctcagctgctgcgaatgccaccggcaatgtgcggctttccgcgtaaagccgcggctaaagcgcgcgccatggcacgaatcggaacacgaaaagggcgcgcggaaatgtcggcaaaagggagaaattga

SEQ ID NO: 82516 - DNA, 690 bp, Heterodera glycines
atgggcggaggcggtggagcagccaaaaagggctcaaaaaggttggcaacgatttttgaaagcaaatctaaaaattcaccaaagactgtgcgacaggtgcacacccaaacggtagaatagccggaggcgatgccattatggcgggcggtgggggcggaggcggcaagggaggcggacccgcaggtgcagaagcgaagtaacggccgggtgggaggcaatcatactgtacaacataaatacggtagggataaacggtaggcaattaaaatgcgcaattaataccatgaattgcgacctgacagcactgaacccgagcaacagaaatgggctgaattggggaaaatatgcacaagtttttaaaacaaaattattctaattgatttgaattggggtacaaaagcacggaaacgtcagggaatctcccgaagaatcgacctttgatttgctgacacaaatttaattcactattttcaatcccaattggagaggggttagtcgagattaatttgcattggcaagaacagttatataccctaattaagcaatttaaattaaaaatctatttaataaattattattattaattcagattttatggcaaaaggctgggaaagtcgcgaaaaagctgctagcaaaatattaataaaaagttgttaaaaacaaagattttttttactctaatttttgtga

SEQ ID NO: 82517 - DNA, 90 bp, Heterodera glycines
atgtgtgtgtacacatttgcatttgcattgtcaacaaagttttggggacttggccaactcggccaattccctccgtccgtccgtcgatcg

SEQ ID NO: 82518 - DNA, 528 bp, Heterodera glycines
atgcttcccattgctaattgcattcttctgctaatccttctccttttcccgctgcgcttcacggcagcgggtggtcatccggaatatttgtccgctctgaagaacatctcgctcttgactacaaacgacacgcaagaagaagcggaaatggcgaagaacaggtgaattggtcgaaaatttaaatttgattcgagacgttgggagtacggcatttttccatcggatattttttttaatttcaaaatgaaagaaatttaaggactttcgacattccctttgactacttccccagagacatttttccgccgttgcaaaacatttcatttggcggacgaacaccggaaacagcagcagatgaacaaattgggagcagtgctgctacacacaaaatggatgctttggaaaatccgtagaattatttttaatttactttaaaataataataataattaagaatgcgtttaaaaatcggcattttaatgatcgagatgattctttctttatgtgactttttcctttcaaaataaa

SEQ ID NO: 82519 - DNA, 321 bp, Heterodera glycines
agtttgcaaaatgtccaattgacatatcttctctaagaacttttattaatggacaacagcagcaacattggcacaccgtcgcgtgacaaaagctcaaaggtccgactacggcacattcttggccgaattttcagcagcggaggagtggccaacaacaccaccaactccgatgatggcacaacgcaacagcaacagtccactgaaaagggatggcaccagcagagcatcaacgaaatttcggcacccagcgacgtggtccatcgaatccatgttggctatgatggccaaaagttcaccggattgccaccctcgtggcttgag

SEQ ID NO: 82520 - DNA, 246 bp, Heterodera glycines
ggcacccccacaaagtgtccaagccacgaaatgtccaaaagagtaaaaacccacgaaatgtccaaaatttttcaaaatttataaaaacaaaatgagtctaatttaggatttttagggttttcggggtcgctgaatacgaatataccctttatattaccccttgcctaaccttaggcccatctgaataataaaaaactaaaattcgagacttggacatttcgtgggctggacattttgtgggtcagc

SEQ ID NO: 82521 - DNA, 81 bp, Heterodera glycines
caatttattgacgtgtttatgaattcgttcgccatttagcccccctccccatctctgttccgtaacaaattaattgaaatg

SEQ ID NO: 82522 - DNA, 1413 bp, Heterodera glycines
atgagcgaatttgttgattggattttgggatttaaacaatttgaaacggttgcttttgctcattatgctggaaggttcgactcgcattttgtgttaaaagagctgactgaaagaggggtcgaaaccgagttgatgatggcagacctgaagatttatcaaatgaaagcgcgtggtatgtattttcgggatttctggctgctcagccaaaacaagttggcagatcttccaaagactttgggtttgaaaaccttagcaaagttgtacttccctcataagtacaacaaaaatgtgaactttggaaaaaaattgacacacctaccaccccttgaagattattgtccggacaatatgaaggaggaggaatgtgctaaattggtaaaatggcacaatgaaaattatagaatggaatttgagctaggttagagaaaatctgttttccttttaaaattgaattttaggagagcagctcaaggtttattgcgaaaatgacgtcgaaattttgatggaggcaattttgaaattccggcaattgtttttggagattactgatgggatggatgtgttgaaggacagtgtaacaattgcgggggttgtgatgagaatttttcgaacaaaatttttgagagaaaatcatctcccaattattccggaaggcggttatgagagagccgagaatcagagcaaaattgccgtgaagtattttgaatggttggctcaaagcaaaagagtgagacttagacacgcatgcaatgggggtgaagtggaaataggggattaaaagtggattgtatcatcggagctgagaaaaaaatcattcaggtaggcagaatttccttccctattttattttttgctaaagggatgtgcgtttcatggatgtccaaaatgttttttgccctggaccataggacccaatgggcgttgtatggaagtaaatttccgacgaactgagacacgaatggagtttttgagggaaaaatgtattaaactcctcggtgggggaagtttgcgtgtgttcttttctaatgtttggagcattcgggccattcgtgggtctacgacgggcgcgtcgccctcgttttttttagggatagggggacgtttctccgcttcgcggcctcaggacgggcgcttcgcgcccgttgtttaattttgtggggaacatttggccgcttcgcggcctccggacgggcgcttcgcggcctcaggacgggcgcgtcgcgcccgttttttaattttgttgagaacattcggccgcttcgcggcctcaggacgggcgcttcgcgcccgttttttcttagtcggccgcttcgcgcccgttttttagcttgttatgccgttcgcggcctcagtcaggcgcttcgcgcccgtttttcaaaatttgttgaccttacagggattataagaggtgca

SEQ ID NO: 82523 - DNA, 619 bp, Heterodera glycines
atgttcccctgtaaactctggaatgtagttgatcgagttgctgaagggttgggaagaaccaataactcagttgaggtgaatgattggcaattgcagagatgccatttgtatttatttctaagtttttgtttatttggaggagctaaatcatagaaatttaaaaaattcacatttcaaaacattcatattttgtgcattttttatcagtgcggtacttttgaaatttttaatggcatctctgttctattgcaagtgtggtttaggcttggcattgcatctggaatgttcatctgaaaggaaaccagcgcttgagctcattcattcgaaaaatgattgaagaggataatatgtgggcggacagaattgctgattttcaggcagctccagcggatggcataaggggtccatatgagcgacggaaggcaaaatacataaggcaagacaacaacctgcaagctttagtcgctgattttgatcaacgtgatccgcttgaatacctacgcgcatgtgcctaccacttacacttttaaattaagaaagatcattcaaacatacattcaatttgaactaagaaatttaagaaagttaatccatgtatttgtgcgataatatgcgataa

SEQ ID NO: 82524 - DNA, 1709 bp, Heterodera glycines
atgtcctccaaaactaaaacaacaaaagaattgatcgactttgctgcggagcagctcgagtgcaataaacgggacctcggaaccgtattattgagtgccacggagcgaagaagtctgaagaaacggatcaccgaggcattgaatcgcgggtcttccctttggtatcgattggatgaaggatacatcgaaaatttaaacggcttgaatttgacggtgactccggacaggccctttcttgggttaagaccccgagtctcccatcgccaatttgcctttcaaattttaagaatcaaacggacgcagggaagtgcccttggaccaatgttgttagccggtgaattcttttatcctctgggcggagttttttttgatcattaccgggacgaattcgatgattttggcgacttttttgcgggatttatgaaagagaaggaagaaaaggcgggtaatggaattgagagtgcgggcgagcgcggtgcaaatgatagcagtgggctgataaatagaaatgtaagcggaacgggtaaaagaattgaaattctgagccaaaatttgggtttgattataacggaaaaggacgggggtttaaaattaaattatgaaagcaaattgggttcacaaaatgaggaaggaaaggctgtgattaaggttaaaggtcgcggcacaataaagggaagcatttttcttttggtattgtacctgtgggggtcgatgctaatgagtagagggccaacaatactcaaaacagtgaaagggcatgccaattagagttggaagcaaattcatcaacttcgacggcacattccacaccggcgggtcagcaaataatatgtttgaacactcaaaattcgggttcagaaaagagctttggaggtacagtaattggtgtggaaactgtggcaccaaaggagaatggtacggtagatcagagagtgggtttggttaaaattcgaggtgaaaatgattcaggatcagcaaaggcagtaaaaaggtcacacactgatttgcagccaaaggcaaaggcacaaacgggtttgcctcaaaatgggtttcgatttgatgcccttaaatgggcccagatgcatcaactcatacccccgcccactgtcttgtaccccaatccacagatattgcgtactgcggtggcggtgccctttaaccagcagagttgttcgagcagttcacttaatggtgtacaattgatgccaaccaatggagaaatgatcgtaactccatgccaacagcagcagccgcaacatcaaagccaaccacaacaccaaaatcatcagcaacagccacaacaccaaattcaacagcaacaccaccaaatgcatcagaatcaacgccaaagggcaattgaaggggaaagccgattcacaccgcggcgttttggcccgaatcgctctcatccttatggaggccgaacaactgcttcgcttccattcattagggaacaacaggaaacacaactccctatcaattggccatggaatccccttccccgaattcaaattccagtcgaagttcgtcgtgtcctcttgcaccgattagcacaggagcgggatcatgcctttggtcttgctggagtcatgcgccaatggaatccaccaatggcccttttgttgctgtcaatggaagctttctacagtactcttttggcatttgtagtgaacgaaggcgagccggggccatcacttccccaactttaa

SEQ ID NO: 82525 - DNA, 1004 bp, Heterodera glycines
  unsure (1)..(1004): unsure at all n locations
atgctttgctccgtccgtcgactgtttctccctcttctgtttctgctcgtacttttcttccaaaaggcaatcgcccgacgacgaaaatgtccaggtgggggagaaaaatacgaattaacaataagggtaattaatgaattattgttattaattaggggataatccatcattgattaagggacactttctgaggacaaaattgtgcgggaaatgtttcgaaattacaccaaaaaactgccggacagtgaacacaaagacgagagtgttcatgtcgagattgaaatgcatgttcaggtggtcatttggctgagatggcatctgccaaaccattgagacaaattggcaccgattggggaattaatgaaaagcataaaaagggaatttaaaaaggtgccatccctccaaaaaaattactattgctttatgaacaggacatgggttcgctgaacgaaatctcggccgacttcgaaattgacattttgttcacccaactttggcacgacccgtcgctgtccttcgtcaatttgagttccgaatgtgtgcgcaacatcacaatggagtcacgttttttgaagggtatttgttccaaaatacattaaaattaattttgtcggaatttcaatttgcagacatttggacaccgaacacggtcagtacgaggcaaaatttacagaaaaaattgaaaggaaattaattggctatcacagtgcattatcaacgcaaaacggacatcagtgcacgcatctccggcggacaacataatgttcattctgtacgagaacggcactgtttggacaaaccatcgattgtcagtgaaagcgccgtggcgcattgngtgggccaaaaggacacaaaattaatgggaaaatcaaaaaagataatgggaaaaaatgaaaatgctaagtatttctaatccatactttaatcaggatttaattcagaaaaaatgccaaaaaatggccatggggatttgaatcatccatccatcaggaaaaaacagaata

SEQ ID NO: 82526 - DNA, 898 bp, Heterodera glycines
atgaaaaatgaatttaagcatcaagaaaagaatggagccaaaattatgacgaaatttgtaagaaaattggagtaagcaatggaacaattgacaattggaaaagaaaatttgttattaacagtaaaataattgaatgatcatttattggggaataaaaaaagaaaatccaaaaatgagtgacaaagaaatcgcgaaaaacattgaaaactgatcgattgtgccttttcaaatggaagcaacaattgcggaacccgtcagctgggccccagcggtttttgggctataacttttttctttgacatctaaatcaaaaattgttggtatcatttgaaagctgtaaatgtcctctattagccttcaaattttgaaaaattatgtaaaggttcaaaaaaattatggccagaacaactcaaaaaaccagattttccaacttttatggccataaatttgttcaaaatggacgaaattgtttggaattttgcaggctaatagagcatctgaagggctttcgaatgataccaattatgtttgatttggatgtcaatgaaaacagttatagtccaaaaacatgctggggcccaaacgtgctggggcccaactgacgtagaccgaacaattgtgggagaaataatgtatgattgaaaaaaaaacgaattgaattggcgagaatgaaaactccgaaatatgtgcttgcttttaatattttatttaatatcaaaaatttgctttatttgttaataagtatttctaattatctaattacagtatatttgaaaaaatgctgtaataattaaggtgaaatgttatgccaatgttttattattcttttttgcattgttttaaatgtcaaactcagcagcaaagacaaatttaatgccaaggaaaacaaaataataaa

SEQ ID NO: 82527 - DNA, 705 bp, Heterodera glycines
atgaagtgattttctttggtttattttttaagctaacaatgtaagaaacctttttactcaaaggaatactcctacataaattatggtttttgaatgcgttttcttgatagtttcagcgagaattctggcaataaaattcgaattcataattgagaaaagaatgtttgcgttgagtagtttatttctaaattagccgatcctttctaacgaaatcattttttctcacatttttctttctgagaaaaacagtcctattacaaaatttatttcggagccgttatttgaaccttaaacaacatgaatctcttcattaaattaataaaagcgaacaaatttcgttcattagcatgcttttacaagaaaaacgatattcaggcgacaacgaataataagaaatactttttatcaggatcagacggccaacaataaaaaaattattttaaacttttcagcattccgcaacaacacgttggctgtagcccgtcatggttttcggaaaaacaaagaatagttaaaaaagtcattgcagaatttcggttataatttctcaatcccagacaggacgaaacacttttagaagagaacttgttgaaaagtagggtttgcattaaataattctttttattaaaatattttatgtttaataactagcagaaaatttaagaaatttatcatttaaacttctgttctgaagaaagaaataaa

SEQ ID NO: 82528 - DNA, 685 bp, Heterodera glycines
atggcgttcccattaggcggcccagccacatgcattgcaaaggcgaaagcaagtctgggctttattccatatcatggtcgcaaagctgaccgatatgggtgccatggtcgcgaagcagaccggcactgtgtcatggtcgcaaagcagaccgacactgatggctatggtcgcaaagcagaccagcctagccatggtcgtcctttaagggactggccattgaaccacaatcctcaaaaggcagtccacatttatttgatgaactcagatttcctacgttacttctcaccagtccactggtcttgacaaagtgcgggaccagcttcgcaccggctgttggccagcaacgataaggaattcatggcgccaccattgagcggcccagccacatgcatctctaggcgagagcaagtctgggcttgctttccatatcatggtcgcaaagcagaccgatatgggtgccatggtcgcgaagcagaccggcactgtgtcatggtcgcaaagcagaccgacacggttggctatggtcgcaacgcagaccagcctcgccatggtcgcaaagcagaccggcgtgtacactaatatcatggtcgctaagcagaccgatatttgccatggtcgcgaagcagaccggcatgtgcacaatcttatcatggtcgcaaagcagaccgataagattttgatacaa

SEQ ID NO: 82529 - DNA, 565 bp, Heterodera glycines
atggcacaacagcaagcgataacgaagaagcgtaaagctatgcaagacggtattttcaaggccgaattaaacaactttctcatgaatgtttgaagaaaagcactttcttcttcagttgaccccaactttccctcctcctcctccgtcccgccaccaaccaacgaatgctcaattctcgccaatccgtcgctttctgtcgcccatttgtcgtcctcggtcggacgaacgacggaccgaacgcgtaaattgggggaggaacaaaaccgactttcttcgaaatgggcgacctaagttttcctccccaattttccctattttccaatttaattttcaatatttaagcacataattccgaggcttcgaccagcaccaattttctgctcggactttctcttcgcaccaaaacagcaccaaatactacgcctacgcgtccgccgtggacaaagcgctcaagtcgttcgagtcgaccaccgaatgagccgatctgatcgcagctttgggaaaactaggcaaagtttgttggcgcttttttgggctgagattaccgattttctaattaaataaa

SEQ ID NO: 82530 - DNA, 935 bp, Heterodera glycines
atgattagaagaggtacaacagagattagaagaggtgaaacagtgattagaagaggtgcaacaatgattagaagaggtacaacagagattggaagaggtacaaagattgtaggaatggtacaataatagtttaaaagggtaaaatcatggtttaaaaattaaataaataagtaaatggttttataaaaaaatataattaaaaattgaatgtgttaataatttttaataattataaaataaattccttctttaatttaaaaataaataagaaattaattttatattaaaacatttattcatcaaaaaataatttaatataaattaaacaaacaatattaaattaattaaaataaataaataattaattttaaaacaaaacatttatttataaaaaaaatttaattcaaataagaaaatttaatttattttaataaaataaaaaatattttcaattaattaaaatatgtaaaaacagcaaaaaatacaaagaaaataatttacaccgtccggactcgaacttcgccccccccccccaaaaaaagatgcctcagaatccccaatcacacagggattctgaggtcttaacgatgtcaaaagtaaaatctgatcacgtattcgtgatcagcggcccaaataacgactaaagacatgtttttggaagatttttgacgaaaaatttttttcactcaaaaaccatgtgcacccccctttggtcccgaatcccaaaatcggttttatttttgtaacaattcgtaagaaagtgataaaaatgtaaaataagatttatattttaaagaaaaaaattgcggatttttgtagtattttaattttcaaaaatttcttttcagaagggggttatgaatttttttctgaaaaatcgaaaattttcagaaattctggaataactttttttctttttaagatagaaatcccaa

SEQ ID NO: 82531 - DNA, 64 bp, Heterodera glycines; identical to SEQ ID NO: 59455

SEQ ID NO: 82532 - DNA, 604 bp, Heterodera glycines
atgaagcactatccactcggattgttgggcagcgtacaatcaggtgttagttcaattgttcgggtatatgattaattgtgcagatcgctgctggaggccaattcaacctcttgcgtgttaatcatcggctgaactttgtggatccccaaacaggagcgcatacccaaaacattgagcgtctgtggcgttccgcaaaacgtcgaaacaaggagcagagtggcacgcatcggcagatgctggaaagttacttctgcgagtttttatggcgtcattccgtcaaacgaagagatgtgatgcattcgaagaccatttgcaaaacatcgttgcttatatgccaccaaattaatatgatttctttcgatgataataatttttaggagaaaaaatgaaaaaaaaaattgaatttagataattgttcgaatccggcgaaatgggtcgaaatggacatcatattcgggttctacgaccccgaaaacccatagaaacgactttttattaatttcaaatcaatttaacaaagagaaaaattttgttgacacaaaacccgaaagtacccgtaattataacaggaaacttaaaggagaataaatttggagaaaataaa

SEQ ID NO: 82533 - DNA, 2293 bp, Heterodera glycines
atggtcatagtcacgaactggagctgcagcatgtcgcatcacgtagttttggatgataaaatttttgtactaatcgaacttgtgtgtaagatgggtctaaaaaaagagataataacagcaatagttagggcttcttttttttaggcaaatgcctaaaatttttgcgcactttatacgcacaattaagacgaaaaacgagttttccggttggtttggcgtgtctacgatggcttttataatgcctatttttgcctatttcggggtttttgtgcttaatgcctatttttgtgcctatttcgccctttttggcgcctttttcaggattttcggaaaaatccttaacaaaaatgtagtaaaaaaaatacaccccctaagaatcgacccgaaaaaatttcgaaaatatacccataagaatttaaaaattttctcaaaaattgatcgccaaaattcgatatttttttccttgaaagttttggtttaaatttgtccttactcaaaaaaaaacttctaaaaaagaagccctagcaatagtaaatctcacaaatcagaatcacttaaataaaaaaattattatttaatattggctaaatatatttcttctattttaaattcaaaaatcatcaaatatattgggcgagaatgagggtcccgttctctcgcttttgcttgaatgtacagttttgttcggaaacgaataatgcgggatttccgcaggggatccccttaccgcgatttcttaattccattttccgcttctgcatacgtttttaatttattccagcttcttttcttgaaaagcagtcaatgaatttgcgcaagaagcctaaggtttaaggatgttctttttatttaaatagcttacaatttgttatccaatttttaggtcgaaccaatagaagatgagattcctgagaatgagcagcaaataaacatctctacccgttcacataactcttcttataacgcaagttacatctttttaactttacgatttaatatttacagtctgatcgtgtcaatgaaaatgatttggttaaatcgctgtctcaatgtcttctggcaaagtatgagttgcttaaacgcacttcatttaaaaaagaattcagcgtttctaaacgagggtttgttcgtgatgccgacattggagaaatgttctcagaccgaagagaacgcgagttgcgagcgaatgttctgaagaagagtgagaaattgctgatggatgttcttggataccgagtcagaggaggaatttctgaccgttttttattcttttttagttagatcgagatgaggaagggaagcgtttttacctctcgacaaatttatgtaaaggcattgcaatggctatggtgagtgattcttttataatcatgtggtgacgccagtttttccattttaaaaaaatggaaattataaaattgtaaatcagaaaaagcactcaaaatattttgaaaatatatgatactaatttaaaaaaaaagaaacatttgaaaattgttttgcacgctcttttattacatttttaaattttgaggtcaaggcacaaaacaaaagtaccctattccgaattcctgacccaaaatccgaccaaaataaattctcttaattttagttgtgactttttgtttgggacatgttttcgactaattaagtagctcaaaaatatttaggagatatctgacgacacacaccgaggacttaacgaatttgcagatgaagatgcgtttgaggaagaatcaactgtaaattcagccggggaggagaactaatgaaacatttaatttacctaaatatttcagcaaactgaacaatttacaaattgtcttcttgaaatggcgttaatgttcattttcatgtcgaagcgacacatttcaaataaaactgaaacagaaaaaggagtggaccaaatgctcctaaagagtttcttggttaggtctttattttttaaaggatttctgctgacagtaatgggctattttttgattttaggatgatttattcgatgcttttgaacggagacctctgtcaagtaaacagttcggcgaattgtttggtcccgctaaatcagccgaatttattgctcacgttagcgctctaaaatttacatgttaattcgataatgaccaattaagggttggttgcgttgcgacattcaaagagacactgtaaccggaagtgaacaagttttgtatcactgggggcctcgatcagaaacggtcgtcagcaaaaaagtgaataacgattatatttacaattagacttgaaaaagatatttgcaaatccatttccccta

SEQ ID NO: 82534 - DNA, 1596 bp, Heterodera glycines
  unsure (1)..(1596): unsure at all n locations
gaaaagaagctggaataaattaaaaacgtatgcagaagcggaaaatggaattaagaaatcgcggtaaggggatcccctgcggaaatcccgcattattcgtttccgaacaaaactgtacattcaagcaaaagcgagagaacgggaccctcattctcgcccaatatatttgatgatttttgaatttaaaatagaagaaatatatttagccaatattaaataataatttttttatttaagtgattctgatttgtgagatttactattgctagggcttcttttttagaagtttttttttgagtaaggacaaatttaaaccaaaactttcaaggaaaaaaatatcgaattttggcgatcaatttttgagaaaatttttaaattcttatgggtatattttcgaaattttttcgggtcgattcttagggggtgtattttttttactacatttttgttaaggatttttccgaaaatcctgaaaaaggcgccaaaaagggcgaaataggcacaaaaataggcattaagcacaaaaaccccgaaataggcaaaaataggcattataaaagccatcgtagacacgccaaaccaaccggaaaactcgtttttcgtcttaattgtgcgtataaagtgcgcaaaaattttaggcatttgcctaaaaaaaagaagccctaactattgctgttattatctctttttttagacccatcttacacacaagttcgattagtacaaaaattttatcatccaaaactacgtgatgcgacatgctgcagctccagttcgtgactatgaccatttgttcaaggtgtacaatggcattgtttctcggaatcccttaattttaatagttgctcataattggcgatagtggagtgggcaaaagcagtttgctccttcgcttttcggacaacactttctccagtgagtttataacctttttctttattaaattgataattttaatttttagccagttacatcacaacaattggtgtggatttcaaaatacggacgattaccgtgatgggcaaaaagattaaacttcaggtggagtatcgacatttgttttgtgggcggggaggggggctaaatgggtacatatattggctctattgccgttacacggtcataaaaaatttaacaatcacaaaataacacgactctgcactttgagtccatcgacatttatgagtccaatggcaccttatgagtcaaatcaattttttataagcccaatcttttccaattaattaaatcaaattttaagcacattatttttatttaaaactatcaccaatctaaatcacaaaaaataaatacaactaatctcaattatagttgtcgaatttctccgagaatccttttaagccctggcgctgctgaacatttttaaaaatatcactaaaaaaatttttggcccgatgagcaaaaaatttaaaaaatccataagcggcccatcccatccctcgtttataacaattaagttagctntaactttagatttgggacacagccggtcaagagcgattccgaacaatcacttccacttattaccggggcactcatggtgttatcgttgtgttcgacgtgaccagcattgag

SEQ ID NO: 82535 - DNA, 248 bp, Heterodera glycines
atgggttcgtctgcattaaaacaaaaaacaaatgggtctcaaccactccggaactctgtcttttggctgttcctggcattttgtatggttttagaggtttgttgtttttgggcggtagttccgcagaatttccattgctttcgttgccggggttcaaattccgatggcattaactggcaaaggtaaagattattggtcccgaaaaattttttttaaataagttttgagaaaattattttcaggggtaa

SEQ ID NO: 82536 - DNA, 1242 bp, Heterodera glycines
tgtcgatcggtgggggagggagtgcgaagtgtgcacgttgcattcccttcatcccctgcttcacgccgcagtgtcgcctatgctactcctgcaagaaccccaaaaccaatctgtgccaaaaaatacggtttgagtcatttcattggcagcggagtttgaccgtttgttttccgtcagtgccacccaagggaaaggactgatgccggacggaaccagccgtttcacgtgccgtggccaacaaatcgcccactttatgggctgcagcactttcagcgaattcaccgtctgtgccgagatttcccttgccaaggcattcatttgtccccctcccccccccccccctaatttgccacccttttccatgttgacaaatcggctctccttgacaaagtgtgtctgctcggctgcggcgtctccaccggttacggcgccgtgttgaacaattgtcgggttgagcctggcagcaccgtcgccgtgtgggggttgggcaccgtcggattggccgtagtaatgggcgccaaaaaggcgggcgcctctaaaattgtcggcattgacttggaaaccgccaaattcgagaaaggtgttgcggtcgtctgcttggttttgtccaacagcgtcattcatttcaagcgaagcatttcggagccacagaatttgtgaatcccaaagaagtgccagcggaacagactttgcaggcatttctgatggacaaattcgacggaggtttcgactacactttcggtgggcactttcttttccattttccaatttacctctccgtcactttgcagaatgttgtggaaatgtacaaacaatggtggacattcccttggtttttgtttctttcatttttctgacttttagcgccaagccctcgaggcagcccacaaagggtggggtgtttcgtgtgttatcggagttgcgggggccggggaagagatcaaaacgcggcccttccaattggtgacgggtcgaacatggaagggcagctcattcggaggttttgtatcagtgatacgtgaaatcacttatgaaaaagtttttgtaatttttattgaataggtttcttaagggtggaaaagtcgcgaccaaattccatcgctcgtcaaggaacatttggacgggaaattggaccttgacaagtttatcacgcacaaattcgccttttccgacattaacaaagcattcgaatgcatgacaaagggcgaaaggtaatcagaaatgaccaaaaaggaaaaggcg

SEQ ID NO: 82537 - DNA, 297 bp, Heterodera glycines
  unsure (1)..(297): unsure at all n locations
atntcgccatcaatggttttgcgtggcaccgagtacanttttcacatgcgagtcgatctgccaaatcaaatcgatcgaaaacgcgtaaatcgatcaaatttttccatttgttaattttggagaaacaccgccctcttgcagggagccatcgtcagaaacagcacaacggacggagtttggcaaagcgaagagagacaattgggccgttttccgttcactttgggcgccacttcggacctcaaaattgctgctgttgcgcaagggtttaaggcattcatttcactcccattccattga

SEQ ID NO: 82538 - DNA, 1875 bp, Heterodera glycines
atggtttcggaatattccgccagcaccaaaagtgacggaagcggtggtgcaacagcggcagcaacagaaaaccaaaatggaacggcacaacgccaacaacaacagcagcagcaacagcagcgtcgccaatcagtaaccacgctgaactgctcggcaaacggcggaggaagtgccaatggcggcaacaataaaatgccaaacggagggcggcaagtgtgccaaaatgggacaatgccaaagttgacggacaacaaccacaatggcatcatcaagaataatggcaacagaaactcacacagcagttgcggcacaacaatttcggcactttccggactgcaagataccggggcgtcgaagctgtacagcattaatcagcagcaggagatgaacatcggcagcaccgtggcgacgatgaagcataacggggagaagcagccaaacggcaatacaattcgtgtcggcagaggaccaccaaatgcagcaacaattgagacaagcggaggaaaagtaagcgaaattaaaattaattatagaaacaaaaaattttttaatgttactgggcaattcctcaaatttaaagcaaattctcattttttttgtaaactaataaatttctaagcaatgaacaatttcaaagaatttacacaaaattgtgtaaaattttttgtttcaacttcgtagtgaactgtttctgtaattaggtggttcagggagcagtaaaaatacaaacactaaactgcccaatttagtccaataattatatttaaaattatttgatcagtgaaaaatagaataacaaaacggggatcataaccaatacaccttcatgaggatttaatttttattctatttacatttttcaaaccacaattcctaaagaggggaatgaattatttgtcattggatggcaaactttgttcctgggggggggggggattatgatcgaaattttattttacaagaatacccttaggtttgaccaagattcaaagacaggaggcggtaattggtccaaaaagtgaggttgagaccaaaaccaagaaatttctcgactcgagaatctcgagcagccctaataataatgtccaatctttacccgcgccgaaacgatttgaaatgattatgtattgtgaatgaaataatagggccaatcctgggaatatttgccaacatttttcaggctactactttttattttatttgtccgttcttcatgtattttttgaattctaccaatattctaatttttttatgcggcaactattgccaaatttggtttatttttttaaatttaaaattttttaaatcactcaaaaactgcaattttttaacaaaaaaaagaaccattgtcatgacaactccgctttatgcagaagctatcgaagaagcgaaggaacagcaaaagctcacacaattacctactttttaagtttgtatttttttttaatttggcgttttgttagcactcttttaaaaataagttgccattatgctacgtggaggaaaagacaaaacgtagaaaagcgagaatgaacaattagctgtttggtctggctgatgctcgcatataaatttagctcccgactctacaatttgggagtaaacccacggaattattttttttttgaccgtgattgttattaatgttaatggaatgcaatttttaaaatttttgataacaaacaaatatgtacattttttagtttaaaaattgctaatccgcttaacatttttctattctatgttccgttccgataacttgtgataactgattaaatgatatatttgtttttggccctttccttttctaaatcgccttaatcctatgcttaatgtttgctctcatgtttaaaatcaattcattcaaaaaaaaca

SEQ ID NO: 82539 - DNA, 1471 bp, Heterodera glycines
tggaaagtctttcgtcagcggaaaatgcctttggctacgaatttcgcgtttggacagtttcgctggtgaacggtaagcaaatttaggcaatttaacgcgagtttggcattccgtcttatttgtaggtctgcgctcggccgtcccttctgcggtttctgagccgatccgacttcactccgattggccaatttctgctgatcagattcatactgcggcaagcagacggcccccggaaagaccatcggcccctgaatatcttggtaaatcagggattagtagggattgtcgactcatttctttgagtttcgacaacatcaccttaccttacgcatttttcagaatacaacggtggcaccagtctgaccctctgttggttgccggccaaaagtgttcttcctgtccaggggtacgaagtcgaattccgtgacattatgcaggacgccacgcattggtaccgtatgactgatcagttggtgcgcgcgtgcaaaaccaccgtcggctatttgctcaacggacatcaataccaattccgaatcatcacaaaaaacgcggccggcctttctgagccgagcgatccgtcgccactgatcacaatcgacgtggaggacagcggcgtccggtcggctgagcaacaaatgtcgacattggacagacaaattggggtgccattggcagacgaaatggtcagagagtcgccgccactcccggacagagacggtgagtgccggaaggcatttccaagtgatttgcatatggacaattcccgatcagattcaccgccaccgatctatcgccaaaccgagtccagcctccagtggagagacccgacactgaaggaagtgattgactacctgaagagtcctgaccagacactggtgctggacgcttccggctatcttcagcatttgaccttcaataacgatttgatcaaggaggagacgcggaattacggtaggtcgggatacagtggtcttttccaaactcgggttacggtagagtgggacccgtctcttcctcagaatgcccttttctgactcattcttcaccatttgaggtggcattgaatgtctcgtttctctgctgcacttcccaaaccccgaaatccttcgcaatgtttgtggctgcctcaaaaatttggcttttgggcgtgccaacgacgtgaacaaacggctgatcaacacaaagggcggcgtcaaagcactgacccaactgctcagacaaacgaatgtgcctttgacggtgcaggaggaagcgactgggggtcggttttggcattttgcttttcctctgccactgtttttgggaacgaacttttaagggaatgtaaaatgaaaataattatatcattattataaattatgtgattgccttttgttaaattgcagcactttggaacatttcttcggctgacgaactgaaggaatcggtgctgaaccaagctgccgaaactgtggtcacgcacattgtgtga

SEQ ID NO: 82540 - DNA, 674 bp, Heterodera glycines
atgccaattttccgttccttctgctcctcctccgccattctcttaactgttctcgatgtttttctgttcactgcacaattcgccaattcgtcggcaccggcggacgattcattcgtttggcccatggaacaagtacagtaaacatctttcttttttgtctaccgtaacaaattgccgcccccctccttttacagtatgcttatgacccgatcagtgacacaatgctccgatcattgctcggatatgacgccaaaagtaagcagaacattcgcccatttcgaatttttctcgcggcacagccaccaaaagaaattgtaagaaaaggaaaaggaaaaatggggaaaaaattaaaattaattaattaagcgaatggaaaatgagaaaggaggagaagaaggagcgaaagaaagaattgtaatggcgaagagaaaaaatgccgaattggtcaaccacattttgaagaactttgcctcactgaaccgactcggagacgcggggaaaaagtgaaaaggcgacggaaaagcggaggaggaaagaacgaaagaaaagaaaagtgatcagaaagaggaaaaggaaagtgatcagacagaaagaggtgatcagccgaagcaccggtggcacatgccaagccagccattatgaaattatttttgaaattgtatttaatgaataaa

SEQ ID NO: 82541 - DNA, 821 bp, Heterodera glycines
atgcgcattgtggggaagtcagtcctgatacctagcattgttcaaactcgggccaattgcaactcgtacaaaagacaattcgtacaaaaagcaactcgtagaatagtcaaccccgtacaaagtcaaaaggtacagttttattagtccaatcgactttcatgaaatccaaaggtatttatttatgtttccaatcaattgataatacttggggtttttatacaataatattgttcatcttcgaacaaatcgtatctttttgatgacattcgaaagcatataaagtctatcgaaactaaactatataaaatctcagcgtttaggcaatatccaaaaaggatgtgtttgattaaataattgttgattattttcgtttgtaacttttttttaaatgtttgcattctcttatttatcgtattaaataccttgttcagactttgtgctttcgaatgataccaaaaattagggttggttcaaacatgaacaaagttactgtattaaaaccagaggtattattatttgattggactcatattatctttggactcataaaagtcgattcgactcataaagtgcaatatgtagagcccaatgtactgtaataaattttacaaaaataagcctaagcctaggctcaagcaggctagtttaagcatatgtacgagttgtctttgtacaagttgtcatgacatcggcttcaatatcagcgccggactaagccgggtgcctaccccggcgaatggcaccgtctcggggtttcagacctaacttttaaaaacaactatttgtcccatttatgcagccgtcgccgagcccggctaaca

SEQ ID NO: 82542 - DNA, 59 bp, Heterodera glycines
gcgcccaggccgcgtgtcgtccagtgtgccagtgccaagaaccgtcactgaattgccaa

SEQ ID NO: 82543 - DNA, 576 bp, Heterodera glycines
atgataactcctgtgagtaggctttttaaaatataatttaaattattttcataatggtttttcttggtattttctcattttttaattttcaggaacaacaccaaaagcggctcgaatttataaaaaggaaaaaaatgaatagcgtcggctgttacggctttgaggtgtgttgtaaattttttgttttttattttaatttgattttgtgggttgtgatcttgtttctgttttaattgttgctttggatcagttcccctcaatgcagaggttttcttctaattttcaaaattttcctttttggatggaaattcaatataaatttattaattaaaattgcaaaaattgattatttgagtttaaaaaatttccctgccggcgcctatcggcaccgccggagctaaaaaaattcctttgatttttaaattgactcaaaaatcccgagaatattagaactgacagaatttttcgaatttataaaaaatggcccagctctgatcggcgccactgacgatgcaacagtgaaaaattcaatttacggagagaaaaacaactttttttttaatttttggaaagtga

SEQ ID NO: 82544 - DNA, 548 bp, Heterodera glycines
atgacaagcggtcttttttgcacttatttgttagaaaggtttgtgctttttcatggcctaaaaacttatataagattttattcaaagatttcaaaaaaaaattttaaaaaattgatgatcaagtgtcaagagttttgcccaactgtttttcgatcagtctaaaaatcttgaattaaccaaatttaatttaaggattggaaatgcaacaaatgtcccaaggcttttgaaacggctatagggcttcacaatcataaaagagtacacaggtagattagcattaaatcaaatttaaataattataaatttttaattttaaacaaaaaaataatttatctcgaatagtagcgcaaaactttcaccagtccgccggccatcgactcccaccattgacttaacggggggaacacctgaaccagaaaaggtaagtcatgcgtataaaaagataaaaaaatttttaaattaaaaaaaacactcaaaatgttttctgaggaattttttcgaacacactcttttttgcggtggcttttcagaattagtgctatttgtta

SEQ ID NO: 82545 - DNA, 1276 bp, Heterodera glycines
atggacccgtcgaagcggaagtacgatgtattccggccatgatctcgcgcagagggatttttccaaagaagggaggtgttggataagggaacaacccattattgattatgttttccctttctctccctctctcattgtctctcgccccgccccttgaccagctccataaatatgtctccctttcccccactcagggcattctcccattcattccaccatttcattattttattttattattatttatttcctgctgtcctcctcctcatttatttgtttaataaattatttatttatttattggacaacatttgttttggttaaaaaccaaacatttttattgttgtagcaaatacacaacaatttggcgcagtcacaaacaaaggacctgctctacatcttcgggtgagaaaaggcatcaaattttgttttaaggaccaaaagccgagacggcaaaacaactcatcaaaaagccgggattggctctgagttttgttaaagccgagtcggccatttttcaaaaagcagtaaaagaaactgttagcgtctaaagccgagtcggctcatcaaaattcgtcaaaagccgggtcggctcagcaaaaattcgacaaaagccgggttggctcgtcaattttgtcaaaaaaaaacaggcaaaagaactgcttattcttctaaagccgggtcggctcgacaaaattcaacaaaagccgggtcggctcgacaagttcttcaaaagccggttggctaaacaaatttgatggaccccaatcagcttaaactgattttggaggctgttttgaaggcatcggcgggacaagtcaacaattctgcggcattggcgacatcaatcgatgcgcgcctttcgacatttgagtatgaccctgagttagggcatacatacgacgtttggctcaagcgctatgggcagaccatcgcccaggacggacacgcactcagcgaccagtccaaagtgcagctattgattggcaaattgggcgaagcggagtacaagcggtacatcgacagcatcgcacctaagtcgcaaaacgacttcaactgggacgagacgactgcaaaattgaaacatttgttcggagaaacccgatcattgtttctccgccgtttcgactgcttccaaattcgtcaagacgcgcatcaggacgtacaaagtttgatcgcattgatcaactcgtcctgcgaaaatgccgatctttcgctgagcaaagaggagctcaaatgcatgatactgatcattgcaacgaattcacagatctga

SEQ ID NO: 82546 - DNA, 1014 bp, Heterodera glycines
atgcaaatgccaagagagaaagaaagaaatgccaatgccaagagagaaagaaagaaatgccaatgccaagagagaaagaaagaaatgccaatgccaagagagaaagaaagaaatgccaatgccaagagagaaagaaagaaatgccaatgccaagagagaaagaaagaaatgccaagagagaaagaaagaaatgccaatgccaagagagaaagaaagaaatgcccatgccaagggatcgaaaagaggggccgattttcaaaagaccattttgactctatcaaaaccctgaaaatagcaacaaaagttaagcaataggcgcaaaaaaatccaaaaaaaatcatcgaaagatcaaaccaagcgaaatacatcaatttccagttttaatttgattcatttaggtgcattatttattttcactgctcgacttggaaagggcatatgtcaccgaaaggggccgtcttgtcggagtcgtggcactgagagacgtaagtcggcattttaataggctttttgatgataaatccttcgctattttttgtttagcttcgcatggcaattcaaagtgcacaaaatggcatttcccttcggcataatttgtacgattccgctgattcgtcatcgactggcactgaaaatagcttagacgaattcctttccattgatgtggaaaaagggatggcacagaaaaacgacgaaatgccacaaatgacactgaccgaatgtgacgaaaagcgaacggcacaaaaattggcaaatcaaacggaccgaaacttcggcgcaaatgcttttactgtccaaaattcagtgccgcttcaaataatcgaggcggaaaataaattgcaccaacgaaacagaagccaatcgacgcgaaaccgatggaaggaaggggaagaaagcgaagcggcacgagcaatggcatatttaagacgcaaatcagtggcattggaggatttgaaagcgttggaggaaacgccacttccaacgacggcagcggagaaagaaagggaaaaataa

SEQ ID NO: 82547 - DNA, 330 bp, Heterodera glycines
ttggtacgcaattggaagccctggagcagtgtctgttaagaattcgtttgttcgcgcgacgtttcacctgcagtgttcatttgtcgcgtatttggttcgatcttgacgagatcgaagagcgacaagttcgagaattgttggatcagcacttgtgtgcgcatggcatcaacgtgtacatttacaaattgcggaggtctgaggggaaatcggcggctgcggagaaaatggagaattgaggagtaaaaacgatcacaaataaataaacccacgaactaacgtaataatgcatgagaattaactcaaacttttgttctgatgacctcacttctc

SEQ ID NO: 82548 - DNA, 1160 bp, Heterodera glycines
atgggtgaacaacgggatgaactcgtccaacgtgccaagctggcggagcaagccgaacgctacgacgacatggcaagggcgatgaagaaggtggggggggggggggggaaagaggtcgctggcacgcctaaccaaaatgtaattttttgtttttttcagctggtcgaaatggacgccaagttggacgaagaagagcgcaatttgttgtccattgcatacagaaaggcggtcggtgctcgtcggacttcacgacgtatcattacctcaacacaacagaggccgacactgacgaagaaacagaagcaaattgccaacgagttgaagaagaaggtggagcacgacatggaacagaagggccgcgaggcgttggtcggtggcattggcaaattgcgcactttggcaatctttcaaaaaatgaaatctccgtcattttgaacagttaaaaggatggtcaaagtgttcaattagttcgtgtggcattttctccgttcaccttaaaattgtttttgctgtttcaggacttgctggacaaaatcctcatcccgaaggttgacgagcccgtggcaaaagtgacctacttgcgaatgaaagccgacctccaccgctatatggctgagatcaaagaggccgaaaatgacggtaaaaagcgatcaaaccaaaacggtttttggatttgtaaggtcatctcccactttttcagatccccagaaggcaaagcagtcgtacgaggacgcgtggaatattgcgcagcagaaaatacggccatcgcatccgattcgccttggagtggcgctcaattttgccgttttcctccacgaattcatgaaaatgccagaagagggtcgcaaattggctcaaaaggtggtggacgcagccgaacaaatcgcattttaaccaccaatgtatttacatatcccaattttttgcaggctcatgacgacggaaatgctgatctgctggcggacacgagcggcggcgattcgtacttggagtccatcggaatcctcgagaagctggacgagaacatgcggatttgggcatcaacgcaagaacgggacggatcatcagaacgaggaaacttctaggatatgccgtcccttgtcacacatgtacaaatattgtaaagtaggcatttgtatcccatgtctgtatatattgta

SEQ ID NO: 82549 - DNA, 118 bp, Heterodera glycines
cttgtaatcagaataatctacagaaaacttttgtctcacattgtgccaaagccagtgtgtatggttctgcgacaaatattcctacggttttggtgataccgtaggaattggcgtcaat

SEQ ID NO: 82550 - DNA, 893 bp, Heterodera glycines
atgtcgtcttcatcagcgaataattgtgatgaagcaaataatcaacaaaatttacataacgtgccaattgcaacaccatctgtcgctcaagtcactgaagctgaacaatgtcttatcaaggtttttaagtaaaaagattaatttatggagacaattaagattatcaattccgacaactattgtttgttttatgcaatgcaagcaacaatggtccgcgcagtaggcggtttgaaccgacaaaggtttcatgattatcttcgaggagtgggaggaaggctcaaaaaagaaacattcgaaatgatgaacgctcttaatgtttcatttggacaacaaaattacgatgctgagttttacgtgccaaggatcattgattggtggaatggcacaaatttcatggggatatggaaattcaaagcattcatctttgggtcaactggacactacaagccccttttcaaatatgggccggaggattacgttgtaccaattatactttactttgatgctaatcatttcaatggtgtacaacgaagcggcaacttgtttggcaaaccttattgtctaagttgtgaaaaaacatatgatcgtccaaagcagcattccaaaagctgcaaagctcgctgcataaaatggtttcaaaaaaggttcaaaatatattcccagtttttcattagctcacaaatgggtcccaccttttcgtgcaaacccattgatggatttcgtcaaaaatgcagtggatgcaacaaaatgttttataacaatgactgctaccaacatcacctcgcttcagattaaggcctaaatagtcattctcgagaatcttggtctcgactcgagaaagatctcggggttttttttggctctcggtctcgagtatcattacaaggaataaa

SEQ ID NO: 82551 - DNA, 745 bp, Heterodera glycines
  unsure (1)..(745): unsure at all n locations
atgcggtatgagtgcaaatcggtaaatttactttttaaaattctataagaattatanatgcttttatcaggcgtcacaaaaaaaagtacgtgatattctgcgacttgaacggaaaatgggtgaagaactacagactagaacaaccggaccttgatgcattgcatattgctgacaccaacgaaaatgaggagccaaatcccgaggatgccgaacttcaacaagaatttgtcttggatgaagaagaggttgatgaagacccatctgttccatgctgttcagcttcacttcaacgtcagaataccgctgttcgaagaaacgataacaaaacaggatcttcaactactgctctttcctcacctatgtaatgtttattattaaaccaaaaatttattttttattttagtcctgattatgtttttccatcgcagctttcatcagattctgacgaaaattaattcgtatgtcttagaattttgctctaatttatttatgcaaaaatattatcacgcattttgtttaaggaatctgtagtgactgcattgtttgtgtatgtgtttgggccgtggtaaagtggaactccacttcagctgttcttcgcattactctcattataacatttgttttaaaatgaatgtgttcggaccgtggtaagtggaactccacttcagcggttcgacacatatttggataagaatatattttgcaaaaaacaaccattttcattctaatttttaaatgtaataaa

SEQ ID NO: 82552 - DNA, 636 bp, Heterodera glycines
atggaacggctgaaaacgaacaacaatggcaatggccaacaacaaccattcaaattggccaagggatcggcagagattggcaaggcgacaacaacggcatcggcacagaaaaagaagaagctgaagaaaacgaagcaacaggaagagcagaaaacaacagcagaggatgaacaggggaagaaggaggaggagcaggtacagtaatattttgtatttgttgcctaaatgaatgtgtacggtattcagtttttctgcaatttttttttacaaattttgaaataatggaaaggtctgaaatttttggtctggcttaacgtattttgtttttaaattcttttcggccaactatttggattttttttgttcaaataattgttcgcccaaaaattcgagtcggaaagatcaaaaccacttattttcggggttaatgcatctcctatttacctccttaatttgccaatttccttctgctggcgggcgatcgggtggcaaaggcaattaaaagcgcggatttttccttcatttcccgcttaacaaaaagttttgttcaatgggacaaattgactccacttcagtttattttttgcttcattttccaaattttttgtataaatgcgccaaattcgttcaaataaa

SEQ ID NO: 82553 - DNA, 510 bp, Heterodera glycines
atggctttaaaattaatagtgacatttccaattaaggcaacgatcttagacaatgtcagtggcccgggacaatttgaggttgaagaggaggatgaagtggatggcaatgacgaggagatgaagcagtacaacaaggaggatgaggggaagtcgacagtggctgaaagcagcgaatttgttgaacctgtgccaacggcagcagcggaaaaaagcgaagtgccaaaatcgtcagagaagcggcgggcacgcggcaaatccggcaaagggggccgccggcgggcattgcatgaccgtcggggggaaaagccgcgcgagacatacatccaactgatcggcatggccattgaggcacaagagtcgaagcgtgccacactgaccgaaattgtgggtgattttctgatgagccaactgatgggacttgaatcgatcgatgactttttgtggcttagtggtgaaaaattgggaagccgtgggtttaaatcccactgggtggcttccatttttatctaa

SEQ ID NO: 82554 - DNA, 725 bp, Heterodera glycines
atggttgattggcttggcattatcgcaatcattttcttctatgtgttgatcttaattgtcggcatttgggctggtcgtaagacggattccaccaagacgggcgttggtgaccaaaccgaagaggtgggttagcggattatcattttaacacaaaattggttggcccacttttggccagcagatttaggggatttttacagtattcatagtatttattgaattagaacccccttgaaataaagccacccttttgagggggggggggatttaaaaataaagcccccaggggttctatttcagtaaatagcgtatgtaataattaaacatagttgttttttaagtttaatttggctaacaataagcaaatagttaattaaatcccgttacggtattgcaatacagtaatatgctttttaaatgaaataatatataaataaattggctcatttaatatatgtttagacttttttctttgaaattttcaggtgatgttagctggccgtaacattggcacgctggtcggcattttcacaatgactggtgggtgagggaggcaattaaaattattgtttggtacagttttataataatcaaaaacggaattagcaccctaccatagtgtaacatttcctttataaacctctgtcgagctaccgtaatcacaagccacaatttttgattttttttttgccctcgtcacacaaattgaatttagagcaaataaa

SEQ ID NO: 82555 - DNA, 317 bp, Heterodera glycines
atgccaaggtgtgcttcatatttttgttttgaatattcgttgaatggaatttcttggagtccattcataaatgcaagtaagtttgtcgtcgaccttatttaaaattaataaaataagtcatttaataaataataataagttctattaagtaaaaaatagatttggataatcctactaatgatcaatcccaatttttaaatattgcatcattatttaatataataaacaaattatattaagtaaaaaatagatttggataatcctactaatgatcaatcccaatttttaaatattgcatcattatttaatataataaa

SEQ ID NO: 82556 - DNA, 545 bp, Heterodera glycines
atggtggcgattcttcgggcgaaaaatatgagccaatggaacatatatggtcatgtgccaccaaatggcaatgggaaaagcccggcgtgtcaatcaaatgggacattaccgatgtaaaaaattaattggccaaattaaaatcaaaatttgaatttcaaagttaattcagacactcaccgaagcggcggtggacacggattgtccatcatggaaaagtaaattattaaatgtattttaatgcattagttaattgtttttaaaaattaaattaagaccggatgaacaattgttgttacgtgcagatgagtaagggattgataaaaatatgaatttttataaaattatctcaaaataattagcgaaaaatttaatcattttttgggtaagtttcaattaaattaaccaaaaataaattttcatcaattttggtataaacctttaaatataatctttcaattacagatgctacaacaagcaaataggacaaaagagctgcgacaacaaattttgtgaaatgtatggagtaaattaatttttttaataaa

SEQ ID NO: 82557 - DNA, 319 bp, Heterodera glycines
atggcaacaaccttgcaacaaaagtacagttgtgctcggtgagtattcggatgattgaccaaaatgcatagaccagcaatgggccaccaaagggagcagacgccttggacgagtaagtagccaattgttttaagagcacgcacaatcacttaagcggaataattaattttaaatttaaaataaattacaaaaaaaaaatataccaaaaaattagcatttttttttctatatacaatttttgttaaaattaatttttaaattgttatttgcaaagttgtaaaagacatatctatcattttttaggaatactaaatagtaa

SEQ ID NO: 82558 - DNA, 1464 bp, Heterodera glycines
atggatgatgaaggcaaagaaatttgtgaagtgctgtccaaaattgatgcttattcacaacaaattttaaacatgcatcaaaaaaattatgaaaaacaaattatcaatgaccaaatgagtaaactcacgcaattaattgagcaacattttgccaatacaaagcaaaaaattgggaatgatttggcacctgaaaagagagaaagcatagaacaatttgttgaacaattggaaaatgatggtgaaaaaatggaacagcaacaacaaaatgatgctgttatgaaaaaattggacgaacaattaaagaaaaatttgcaaaaaatcaaaaaattaaataaaaaattattgaaaaacaatgggaagggtccaactgagaaagaaattcctgaatattacgaggtataaagtaaactccaaggagaaccactaagggaaacgcgtagatcattcattaaggcattcttccattataaaatgtcataggttcgagtcccattggccgagtctccttttatatccaaaccatgtacggtaaaaaaaaaaggtaaaaatcgttgacgtaacaaaatgccacaatctttaaatataaaatgaagtgcctttttaaaaatgatgagaaagtacgcaagatgagaggaaaagtggaaaagaaacgaagagatagtgcaaagcattctctctgtagctgttcgcaattttttacgccaaccattttttgccgttttttttttaaattttttaccgtccatgtaacttggcaaggtgcgttttgcagttaatgaaccttcaaatcaagccaatcccagccaaacatccaaactaaaacaaaaacttattcagcctccaactttctggaaacaggattttctgccagaataagccccaaaagccacagtttttcattcaattttgagagtgccaaactcccaaaataaaaaatgaatcgctaattatcggaataattgaatgtattaaaattacagttgtcctaccaatgtttattaatttatgaaaaaatggctgtacatttatttccattgcaaacattggataccaccgccggagacattcctcaggttggagcagtatctgcagcacaaccatctgctgctgctgttgttgctgatggcaacaatcgccgacggcgacgaaagcgtggggttcactgctgcggtggctgttgcaactgttgtgggctggagtttggcgcaatgttccgcgcatttttcaaatttatgggcgaaatgttaagcgtgccgtggaaaggtttatatttgagttgaaattgccgaaatttaccgcaaaattttacccctaggcataaagatttttagcattattttgatcattcatttttttgccgttgagaattaatttttttttaaaggaaatacagtaacattattttccctgttctttattaaaattaagcatagaatatttgatttatacgaaactataaataaa

SEQ ID NO: 82559 - DNA, 1522 bp, Heterodera glycines
atgggaggacgatttggggaaggaatcccgggcccaggattggtggtgaaattccccaaaaagcctcgatgttattagaataatttattctctccggataaaatggtgattgaaatattccatgacgaacgactgatcgaataggcttaacgactcgactgactgacgactgactaactgatcgctgggggaaggaaaagtgtgaagcgaacggaaaaggggcggggatgaacggaataaatgagatgagaaaatgtgataataaagagtggaaattacgactgctgagggaaaataaaaattgttttttaggatggccaatcccttacagctcaccccttccataggatcgtcctcgatcctcgaagtttgtcgatgatgctggcgccagtccgagaacggtttcgcccttcggttcccaatccaaccacctgctcaccagctgctcaatttatgaacagacttggcctgaggggcttgaggaaatcaaccagagttcattccgtcccagagtggagcgaagaaacggtgcaaaagacgaagtgcggagttggaagagctgtacagggttggttgcccaaaattttgaggggtagattaaagaaagatcagccgaaaattccagtacaaaaaaaggaaattgagaagaaacaattgagaaggaacaaaagaaaaggaaaagagaaatgaggaaatcaaacagaatgatacaagaaatgtctaatttggttgactttgacaaaagttatagcaagttttttgttgaaaatttccatttgatgtataaactcccttattgatggtttttatataacgatctcagcaccaatgggtcgacgaccggcccagttccactgttttgcaaaagaaattgaatttcaaaaagttagattattttattacccaaaagaaaattaaattttactttattaaaaatttcgtaaaatcttcatatttttttttcattttacatgaaaatatataaaatcattcatatattgatgtaaattgattgattgttgcttacgtatatcttataaagatttattatattttacatattaaatattaaaataataattttttttcacttcatttcatctatcaaacatagggcaatggccctttttaatatggcattattctgaattggtgaatttttatttcagatttatttggaaaaattaatgtttaacaagaaaaaagtttaagcctctgaaatttttcattttatttattttttattttgattggagaatgcattttttcaattttagaatgaaattttttgcttttattccttcctttaaacatgttattttattgaatttctatttgggtaagttttttaattttattaaaaaatttgttttgtttttttttacttttaaattcagtaatttttgtaaatgccaacggatcaaaacaaaatcaatgtgcacaaattgagactcttgaaaacttcaataccaaatttgtgcaccaattgtatgacgagatttgtgaagcagaggttatttag

SEQ ID NO: 82560 - DNA, 594 bp, Heterodera glycines
atgtgcaccggcaatgacaaagaacttttaaccagaagcccagagaaaattttcgattttgttgagcgctcaattacattaagccttgatgttgattcattgttaggcataggattaaggtaaaaaaaaatcaataaaaatttttgtttaaaataaattccaaaacaaaaaagaataattcttttattaaaataaaaaaatctttttttttatatatcttctcgaaggatcccaaattaagcaaagtttaaaaaacgacaagtgttttctactaaagcccagaacaatcaaatatcaaattttcagacctcgtaacaaaattggaattcaaaaattttacagtatttaattttttagaagtcttttgcatgagcttgcagcaaattaatgatattatatataattaaattaaatatccttatatgactaaattttataatattttctagcccaatttaaacagaaaccaattaatttattttatttaaaattaaataattttttttcatttacagacgtcatccattagaggcatttaaagaacagaaaagcaaaattgaagtgtatttgagcatgaatcggctgttcttttgg

SEQ ID NO: 82561 - DNA, 1454 bp, Heterodera glycines
atgccaacaatgctgctcgatcggcacgattatatccataaatggcttatctgggtcacagagtatgccgaaggttggttggccaagctgatttcgttggccattcgaattggcacactgaacatggacaacgccagggaaccgtttgcctatattatttgccgtcattttgatcgtgtaaaggggaacagtgattttgatgagaattatacggtagaagacgatggtttgatgatggcagtacataaacgaaatgaaattgatgaaatggcgacaaaaagtgagcaaactcagcaacaatatttggacaaaatcgttgcacaaagtttggcgttgcgaaacattttgatgattttagcggaagaagcgaacaatgactttaccttcgaaagttctctcaaaggtgaaaaaaggagcactttttcgttatgccatcccctccccccccccaataaaaacgtcatgatcccgaaaagggaaagctcaaagaaagccatttttggttttttcgaatcgacaaaatcatatataagacaagcgcctaaaactaagcccagaaaagtgctttccctcgtcggaataatgacaattttactgggggggggggcataagggaaaagtaccaaaaaagtaattttggaattctgcctgaggcaaattgaaggcattattattttttcttttcttaattgtatccaacaaacttgatatcattcgaatccgtgggcagctttattattgagctaccgaggcaaaactgcgctttcttttatttgacagttccaataggggccgtcgtggaaacttgaaaatttgagtggaatatttattcacccaagaattggcatttttcgacaaaaccctaaaaaatctaatttttcaaaaattactgataattaaggggtaataaataaatggtataaaattttaattatttattttttcataattataaatttaaaagaacataaaataataatttaggaacaagtagttcctcaacttcttatttaactacaattatctccaaaacattgcatccgttattgatcaaaaatgtgcatagcaaccatcaacaattggtccaccatttggccacgctcattttgttttttcatcgaatttttgaaatggtcgctgtgccacaaatttggttgctcaacaaattcagcgtgggcaccgagttgaagcagttgaagcgcatttatgaaacaacgattaaggccttgcataacattgaaaatgagtgggacaaagaacagaaagcaattagtgatgatgatcatgaagatgacaccgccatttcggctaataaccgttaattagttgattggcgagaaacaaatggacgaagccgacctcaagcattgccctataaaatgcattggattttttgattgataagaatctgataattaattaggttgtcataatttgtattattttttgcacga

SEQ ID NO: 82562 - DNA, 1021 bp, Heterodera glycines
atggcccaaaattaccaaattcctcaggcggcatatgggcaacactggaggtatctgtcatttaagccataatataattgattcttttctttttttttttgcaaaaaatgtatttccatgaaaaatgtttcacgattttttttcgttttacgcgactcggtctcacttatacattgtccccaatagattttctttcctctcctcctatgacaaatgttttacacctatttgacgccaaataaattttctaaaatattattatttaaatgtttttgagtattttacgttgttcagccaaattaattaaacaatcgtaaaaatatttattaatgaatgatattaacatttttgcacatgagggcctaaccgtggttgtccgattgataacaattgcaaaactcaattattttacttttcctatgatttttatcaattttaattataaatatgttaaaatttattaaaatgatacttaaatacacattctcctaaaagttatgtagtatttcaaataaagaataattaaaatttacttaatattaaataaaatcattggctattactgtgaattttttaaattttgtggtttcaatggcgcctataaattaaaacaaagatagttattaatgtgataaaaacaatgaaactgatagtgataaaaacaagataaaaataaaaataatgataattgatagtgataaaaacaatgaaattgatattgacaaaaacaagataaaaaaaataatgataattaatagtgataaaaacaaagtgatagtgataaaacaatgataatcattaatgtgataaaaataatgaaattgatagtgataaaaacaagataaaagcaatggtaattgatattgataaaaacaaaacttggcattagattgttataataatttacagattacacaaaaatatcatcgaggctcagataagatatggacaaaaaattaggaattaaggttttgtggaatttagttatcatatctttttatatatttaagtaaaaaattta

SEQ ID NO: 82563 - DNA, 390 bp, Heterodera glycines
gcttaaaagcattgtacagcataattaaaaccgaaaataattttcgtatatttttcacaatttatttcaaaagacaaaaaaaatgattcaattttgaaacgaaatagtgcacaaaagggagggatggttagacgaaaagaggaatttttagaaaagagcgcaccccatctgatattcccatttttccgttccacaactggccaaaggcgactgtgctcattgacacgtagttgtccaataaggtacttggactttccacagtaaaatgtggtacaaaattttggaactgtcccgcctcacggcggggcttaaaagcattgtacagcataattaaaaccgaaaataattttcgtatatttttcacaatttatttcaaaagacaaaaaaaaa

SEQ ID NO: 82564 - DNA, 342 bp, Heterodera glycines
  unsure (1)..(342): unsure at all n locations
gcttaaaagcattgtacagcataattaaaaccgaaaataattttcgtatatttttcacaatttatttcaaaagacaaaaaaaatgattcaattttgaaacgaaatagtgcacaaaagggagggatggttagacgaaaagaggaatttttagaaaagagcgcaccccatctgatattcccatttttccgttccacaactggccaaaggcgactgtgctcattgacacgtagttgtccaataaggtacttggactttccacagtnaaatgtggtacaaaattttggaactgtcccgccctcacgcggggcttaaaagcattgtacagcataattaaaagctaaa

SEQ ID NO: 82565 - DNA, 420 bp, Heterodera glycines
atgacactgacttttttcagttttttgtgcccccgttcccaacaatttctcgccaaacagtaccccggtttggtgttacgacgacgacgcccaagacaaggaggcggagcaggacagaaacgggtggtggtggggagcacggtggcgccggcgacgacggcggtcaaattgacgacgccaatcgcagcggaacatcgattggagggcgaagaggaagaagaggaggaaaatggggacgacggaggaggaggaatagcgacaaaattgactacagccgacgacgacaacgacgacgaggaggtggaggaggacattttcagcgaaattgtcatcgacgagttctcgttgctgctgtttcggtcgatggacgactacaatgtatggggcagggggaaaatgtactatataaatgagagatga

SEQ ID NO: 82566 - DNA, 1167 bp, Heterodera glycines
atgtatgagcatattatacaaattgttttatcattttatgaagctgcacaagttttagcatctggaacaagaagtaaaaaattatcattatatcaaattaaaactttaattaaatttataccttgatggaactcgcgcatttatttttactgtacaatttatctttttcattttaatttaaatactaatcttaaataatatatctactattcgtttttataaataaatctaaataaaataataaattgcggctgagtcgttttataaaaacgatcaaatgaaaatttgattaacatgacattgaatattaatgaattaaactatgaatgatcattattaatcaaagaaatgaaattgaaacaaataataaatttattaagataattaaacgaatattatcaaatagattaaacttaactaataatacttttattaatttcccagaaaaaataattatttaagaataaaatattcgacggatataataaaaataaataaaattagaaacacaaataaaaattacttttacctacttctgtgtatgagatattaaattaaacttataacataccttcttaaaatgaaaattaaaatataaaattaaaacagattttcggcatcaaatttgtccaatttgacagaaatctactgaatattaaaaaagacacaaagcgattgcgaaagaattgtgtcattcgggatttcgcggaagaagtacagaaaaataagaaaaatgtaaaaaaaataaagtggtagaactatataactatcaatagtttattaatgtttaatgtaagccggctttctgtaactcgcaaaaatttaaaattaatctacatttaaataaataaactcgcaaaattaatggttataataaagtgcaactcaaataactgatatttgattaaaagacaaattttgaatttataaaagtatttaaatgctatacatatttagccaattcatattctgggcgactcgtaacaatttataacgtaaataaagaagaggaagaatcatagattcaaaataatacaatacaattttaaataatactactttgatatttttaattataaaatttttgtttaaattaaacatgctttggtataataagtatgatatgaattaacatgcttttaaatcggaattagtgataaacaacta

SEQ ID NO: 82567 - DNA, 732 bp, Heterodera glycines
atgtcggacaacccgaaagaagctgagcgaaaaatggaaaaagcgatgtgctaattaaatctcaatttaatttctaatcattttgttttttctattttcagctcatctctgccgactgttggctggcgtgttcgatttggtgcaccccgctcagcttgaccttaaattgcactgatcagccgccgatttgactgtcgagtggatttacatttcaaaacgagcaaatggacattggaccaaattgaaactctaagcaaaattggaaagaatggcgtcaagggaatgaaaattatcaattacaatgaaaaacttttacaatccctcaaaaatcgttgccgaacaaaatcatggcattcaattactttttgatcacgtaaaaattgaattaaatttgtaagggtttcctgaccatatctaattttcagctacttcgaccacaatgtgatcactttccttcgccgtttttcttgctatttttttcctttttaggcattttccagttcttcttcgtctcttgctttccagtttgataattcattttcatttaatggcattataaaattactagatttatttatttttggttttttttaatcatggcttgacaaaagtcatgactatttttttgtcaatcgaaactttgttgctttttaatttctatttcttgttgatacaccgcattattcgatcaactttgtgccagtaaatactgattttattacgataaataaa

SEQ ID NO: 82568 - DNA, 770 bp, Heterodera glycines
atgtgttgtagtaaaaataacggtgtcctctcgaaggacccacagacaaagaaccccagcctattgctattggcggatccttccactactgcgcagtgcgttgccaattttttgggtccaaaaaatcaattaacataggaattaattgatttgatataaaattattcaatgcgcaaataaattatggatcaattaaaaaaataaatattttagggaaaacaatttgaggcaaaactccctctctcttgaaataaattgaaatttaaggacaaaacctaatgtagcgaaaaataatggaaaaataaggacaaaaaaatatatataaattttaagagaaaaaataaatctaattaaaaaatttggtagaaattacattgcttaaatatttcaattaagaatgtgaaaaaaatgaaatatttgcaaaaattgtttttgttatttttttctttttggccgcatatttttgattttaataaataatcaaactttttaaaaattgtattcaaatattacgattttaattttttttattattatttaagttcgtttaaattattttttttattttaatttgaattatttaaattatgtttagaaattcaattttcttaaaatattttcaatcttggagtcttccttccacctctgccgatgcatcttcgcggtattgtcaaaaccaacactaatttcttttttagtacactcaaaagcaaagttttaattttaaacttaatctttcatgttgtaattattaacttgaatttttatta

SEQ ID NO: 82569 - DNA, 279 bp, Heterodera glycines
atgaagaaaaatgagaaaataaattataaaaaaagaattcataaaataataatccttttaatctctttttatgcatttgtttttaattgtacgtatttaattattttttttcattaattttaggcttcttgtcttgagattttttgaatattttttatattccattattttttaatttaaaatgttgggaaaagatgaaatgattgcgtcgctttaattgcttggattattatattacgaaagttagctttttctttaattttattttgttataataaa

SEQ ID NO: 82570 - DNA, 955 bp, Heterodera glycines
atgtcaggggttagtgtgcacccactgctctattaataaaaaattaaacatattgaacattaaaggcataatgaataccccttaattctccgctgactgtaaaaaatggctgcatattggagcaatgttcttgaaaaatattttgtatttaaaaaaaatttaaatatacccaatgccgttgagtctgcattcgtagtatttaattgtagggaaatatacccaatgccgttgcatctgcattcgtagtatttaattgtagggaaatatacccaatgccgttgaatctgcattcgtagtatttaattgtagggaaatatacccaatgccgttgcatctgcattcgtagtatttaattgtagggaaatatacccaatgccgttgcatctgcattcgtagtatttaattgtagggaaatatacccaatgccgttgaatctgcattcggagtattgtagggaattattgttcggcagaagtcggtcgacacattgagaaggaacaaatttcaataaatttatttaattaattttattaaaattctactcaaaaccattggttgaaaaaattaaaaacgcaacaattcgtctcttctcaaacatgtttttatggtaattaatataaaatttttggtctttcaggtgtacgtccttcaattttttatttttgcgaatttagccttggggcatatttttataacctttgatggaaacgcggaatcgtttttttgtattaaactttagtctggtatttattatgtgacacaacaaacatattattttttgtttttatacgcgtcaaacgtccttgagacattgcatgttccttaaaaattgttcatcaaattatttactaagttatcctaatgcaaaggtatgagaattaatactataacaaatatgataattattttgattagaataattatggaatttatattaaaacacaattgaaacgta

SEQ ID NO: 82571 - DNA, 519 bp, Heterodera glycines
atgtgcatgaaattcgaatatttgtaatttgtaattaattatagataattttttgtcttccttccttttcgtgtataattttttattgtaagtttttctacgctttaatatacccctcctcactccgcctcacaattttctattcttcttttcttaatttaaaactaaaatcagaggtgaaaagtcaaaatattacaccccgtataacatcattttacctttgtgtggtcaaactgacaaaaatttaaaaatatttatcataattaaacaactttatatcttcagaaattattcatggaggagcacaataaaaaatttaaatatatttgtatcgaaataattcataaaaatttaattatctgatgctaaaaccaaacacaaaataatgggttaaataattgtagaattaaatacatttaaactattcttttaaaattactttatgaattaaacaatttttataatagcgctaaactcggtgacaaaaaaaaatacactggatttataaaaaaaaataaa

SEQ ID NO: 82572 - DNA, 1337 bp, Heterodera glycines
atgccaaaaatcaaaaagaataagagttctaaaaaatccatctcggcggccccgtcacgacaaatgccactggcacaaaattatgaagacctcacatcatcgcgcgaatccgccactgtcgacaaacattcgccattaactccaacaacgaatgtcgtcgttgaccgaattttttcggatgatcctgaaatggcagatgaggatgggaagcgagtttctcgctctgaaaacgggcaacacattaaaaaaatgtctgtgaactcggccttagggccatccgtcatgattgaaaataaaagtggtggcgataatgagccaaattatgaagagagtgaggtgagaattgaggtcttggacaaaacaactaagacggccttagggtcaccagtcatgcatagcagagctaatttagctataaacaatataacaatagagaatattgaggacattaatagctttttcacaacctttgaaaattattttgctcgaacatatcagattttgggaactttgacagaccctctgttatgggctatgttacagcccaaatctctgagtgaatcagagaatagaaaatctgaaactatttcaacggatgacaaatttattgttattcaaacagggataaattggaccttggcatcacgattaactgaagtgagttcttggcctcattttttgctgatgaaaaagaaatcacaatcagatgaatattttcgattgggtgaaatcatagatataaaagaatttgtggaaaatgagtcaaattctcctaaggcttttagcaaatttgcgacagatctcaccttgcttccagaggatggttgtgggtcaattgctagaattctaaaatgcgaaagaactggtaaaataaatgccgtcgatatctgctttgatgagttagtgcaacggttctattcacaccaatttggttcagatgtcgatgtttcagaaattgttgctgatgcttatgtagaggttattaccttaggttttcgaattcaaggctttgaaaacagtctgtctactttaactggtctaaataccttaagcgatgaaccaatccaaatagtatctcaacccaatattggaaccagcatcgatttagtaatcaagattgtcagacaaattgatccagtagaggaggattaccgtcaatggtgtgagtttctcgtaaaacaacggtctacttccaaccatgatcaagactaccatcaccgaaggtagaattatattgagaacaaaagtaccctcgggtcaccagtcatgtgattttttccctaattattaaaaatttgcagcatttaaaaacttattttaaattctttcttattaaa

SEQ ID NO: 82573 - DNA, 2117 bp, Heterodera glycines
atggaatttaattattctttcacttattcatttattttttttctattaatatattttgttgtcaacagatgcaattctgaagagttgctcaaaatttgcataaaatatgaacagaatcattcaacggacgacacgcaacggaaaattacggttaatttgagtgcaatttacctgaacatgaatttgatgagcaaagatgttcaacaaaatgtgcaaattggggacaaattggacattccaatgccaacaaatgttcgtgaatttgacgaattcaaatttgttttttgcatttttgtgaaaccattggacaatgagtaccagtcgggtggatttgacgaggacccatcggacgatcagccgtttgaaggtggatttggcattttgggtaatttgacataagaacatccgtttccggtcggagctcgccccgagagaagaattaaatcattatcatttattcgactataagatataatacatgatcaggtatcagctcttgagaatttatatttaaatccgattttggacataggcgcaaatgtccgaggcgcatgtccggggctcaaatgtctggggcgcaaatgtctgggcaaggctcggtttagactcccggaagaattgaattcaatcacatgcacctaaattttttgacgatattcttcccggggcgttttccaaaaatagcatttcttaatcaaaatgccttagctaatcggtggatatgtcaaaactttcacaattcaagaccagtattaccaacttcaaatggacgacattcgatcaatggtccgatctgtcggtttcgttttgtatgagcccaattttgcaaagcgttacacatttaacttgggccaaattgacccgcgcggactcttttggaagcgacgaatttttctcgacacaaaaaacggcggcccgggcaatttttatggctttttatatgccaccgtgaacaaaaatcaaagaaatttgccaatgttggatgaaaaaattttgctgggacacgcgccactcactgcggcaaaaaatcatagaaatgaattgactacgaacagagaacaatcggcaaaattaaatttaatggtaaattatattgaaaaaaaaattaaaaatattcccaaattttttttaaatttttattttttttttaaattgttggtaaataataatgtattaatttgttttagcgctcaaatcatttacacggagaagcatcaacttcgcaacaacacgtaaaattatttataatttgaacctttttaatgttaaattcagttaaatgagtacaatttatcaattgaaattgatgatgtacaacgcttttttaaacacaaaattttgaatcttcaattgaaaatttattattttgatgaggtaaagattcttcagcgaaataaaattgaataattaaatttagggaaataaaataaatgatgatttaattattgaaaattcaatcaacgacaaaaagcaaaaaagtgatcgtaataatgatgacgaagaagatgaatgcccaatttgttttgagtcattaaatggcgaaaaacagacaatcaaatttcatgaagattacaacgaaaactcaaaggcatatttttatttaataaaacaatttatatggaaagcttatggaattcggtcaaattagcgtgtaaatagcttttggagaaaatgccaaaaatgattttcttagcctatcttcaaaatgtaatttttaaattttcttttcaagaatttattaatatatgtttcattaaaaaaagaattaaaaatgaattaattgtatacattaaaactattccagcacatttttcacaagcattgtatcataaattggtgagaattaattgaatggtttttaaattttaattttaaataaggatcgctgctcaaggaaaaggtttttgccctttgtgtaaaagggaaatagaaagcataaaggtataaaaattgctttttattttttattaaatcattaaaaatactttcaaagtttttagttttcaattttacttccaatattcaacagtaggaaagaccaattgaatttgtttatttttcttaacccaatcgcccatttatttaaaattgccaatggaaagactgaagaaaataaa

SEQ ID NO: 82574 - DNA, 142 bp, Heterodera glycines
taaaaacaaatgagtctaatttaggatttttagggtcttcggggtcgctgaatacgaatataccctttatattaccccttgcctaaccttaggcccatctgaataataaaaaactcaaattcgagacttggacattttgtgg

SEQ ID NO: 82575 - DNA, 1140 bp, Heterodera glycines
atgccaaaaaagaaggaaagtgaaaaggaaattaaaaggaggcaagcgatccggtggtcaagtagttagtgtgccttcctttggtgctggcttcccatgggttagagtcccatttcttctgattattttaaagcaaatattatattgaaattattctaatttttgttttttttaatttattttttttattaattaactttatggtattttaaattaatgataatgattttttgaattaataaaataataaatatttttaattaatagaataataaagtctaaattaaatattaaaattaatcgaataaaaattaaaaataaacaaatattaataaaaatttaaataatttataaatctcaaaatgagttaattttaggattagacgaatccgggtatttgggcaaaactgggtccggatatttccgggtccagcaaagccgggtccgggtccaagtttttaaaccgggtacgggaggaacagaaagtggaagaggaacagaaagtggaagagaaagtggaagaggaacaaaagtggaagaggaaaagaaagtggaagaggaacaaaagtggaagaggaaaagaaagtagaagaggacagaacgtggaagagaaacagaacgtggaagagaaagtggaagaggaacagaaagtggaagagaagaagaggaacagaaagtggaagagaaacagaaagtggaagagaaacagaaagtggaagaggaacagaaagcggaagagaagaagaggaacagaaagtggaagagaaacagaaagtggaagagaaacagaaagtggaagagaaagtggaagaggaacagaaagtggaagagaaagtggaagaggaacagaacgtggaagagaaacagaaagtggaagagaaacagaaagtggaagagaaagtggaagaggaacgaaagtggaagaggaaaagaaagtggaagaggacagaacgtggaagaggaacagaaagcggaagagaagaagaggaacagaaagtggaagagaaacagaaagtggaagagaaacagaaagtggaagagaaagtggaagaggaacagaaagtggaagagaaagtggaagaggaacagaacgtggaaaagaaacagaaagtggaagagaaacagaaagtggaagagaaa

SEQ ID NO: 82576 - DNA, 1842 bp, Heterodera glycines
atggcgatcaattattatattttctttacgatttgtctattttttacgaaatttgcaatgactattaatggtaataaattttgttgaatatttttttacaaaattatttttcaaaattaggagggccaagttcgacaaataaccaaaagccaagaacgatcaatcgaattgcacatccaagaaacattgaaggacaattagctgctggtgatcatattccgcacacaaatcagccaacaaacaatgccacgaatggccaccaaaatgatcaaaatgccaattcagaaaattcagatttgttggacaacagtgcaacagaacagcattcaagtgttcatgaggggaataacggtataagaaagtttactgttttatttttttaatataattaagcaaataaattattgtatttttaaaattattttctgagtttggaatagttggggatttccgatatcctgatctttaaaaaaaaacccaagcctggatttttttttggacacagctccaggtatcaggggctatttttgacaacctggatttcctggaattttgtcagggaaaatgctggtccaggtccaggcttttttgggaattccaataacgtgatctttcaaaaaaaacaacacaggaaggagcctggtaaatgttagcctgatcctgatacactaatccagggacatcataattttgcggccatgacatttttcatcagatgccagatgcaaaaatgatggttaaccctaatttataactaattatcatcattatttttaatttttcctccattttataacgaaatttcgtcttttttttgtagctggtcgtccaaccgaaaatttgatcatcgaaaatgaacatcgagctcatttctttgatcaaggcaaaagcattgataccacgtcgccgtcgggatattcaaatgcaaatgcaacaaaattggacgaaacaaatgatcatcagcaattggtgagcgaaggtgggaacgacgacgacgacgacgagcgcaaaatgaatgacatggaagaaggttttttgtaaatttaaaaaataaataaataaaacaattttaattagataaaaatataattatggttatttaatattttatgaatcaaaaatcgccaatgttttcgaaaattttttagtgcttaaaaatagggttaagccccgaccctcggggagaaaaatgtcggggaacggggaggaaattccccgaaagaatttgtcggggatggctggagaaattccccgaaacatgtcggggcttaaccctacttaaaaactcccaaagtataacgaaaatattagtccattactaattaaaaatatttctagagttaaaagaaaaattcactgtatttaaaatagtgatttaaagctaaaattcatttgttaattttttaatttcaattttttaatgtatgttaaaaaaattttgttttctgattttaatttcgttttcgttaaaaataaatatttcgtttcgttttgtgatcagattgatcggagatacatacgaacatagtctctcgattagaaaatacgaacaaaatgaataagaaataaaataaaattatttttggagataaattattatttattaaaattcatttattaagaagacagcaataatgatccggtggtctcagaatgttgtccaatttgcttgcagccattcacagaagcatcaaacaaaaaagtgcttaacaaatgtggtgtaagaaaatttgtttatttttttaaaattttatttaatcttttttagcatcaatttgatgtgaattgcatcgatcaatggcaaacaatttgaattaattaaatggattaattaatattaaa

SEQ ID NO: 82577 - DNA, 625 bp, Heterodera glycines
atgtttttaaaatttgtgttttttcctttcttctcaatttcattggcaattgctcaacaaattctgccgatgacaaatgatgaaattgaaatgatcaaaaatataatgggctcaattgaacagaatttgattatggtggaagcgaattgttgcgcaattgatcatgaaaattttgatcaattcaaaaaggcggtcccgaaaatgttcgagaaaatcaaccaaaaaataatgattgaaaacgaaacgccaaaatttgcggattttcaagaatttttcgcggaaatttatgcatttttggacaaagtgcacatcgagatggaaatttttgtcaaaaatttgtccccatattgtgaacaaaatgagcaaaaagcgttgacacgctttgaaatggccatgcaaatggaaaaggaatttttgatggacaatttggtaataattgaagagccaaatgcgaaaatcaaacggtaaattgaagaattaattaaatggaaaattaataatttaagattttttgaaaaatttgactcctcattgtttgcaaaattaaccttaacaattgttgatatgctaacaatggattcattgctaaaggatgagagaaaccggcactttagtaaattgtttg

SEQ ID NO: 82578 - DNA, 245 bp, Heterodera glycines
aaatgctgtctcagttgcggttgtgttgtgatgtcaccgtggatgctttttgtggcaatcattggcactccaattggcattgtttgcgaaggtgccaatgctgtgcgacgctgcgctaacccaacgccaaaagagatgccgtcaaaaattgcatcgaaaactagcggcacatcaaaaacaacatcaaaaacggcgtcaaaaacaaactcaaaaaatggagagaaaaagaaaaataattaagccaa

SEQ ID NO: 82579 - DNA, 993 bp, Heterodera glycines
atggtgaacggatttttaaaatggtgtttatacatcaattatcacaaagtaatttggtctatctgtggcctaatggttagtgtgtttggttctttcggagagggggtaaaaagttcgatcccgacaccatgtgattggattttgaaatgaattatttaatcagaaataaaatgctcagcacaaatacatatcagtggcataatggatagtgtgttgggcttttttcggcacaacctgggttcagttccgcgcggagttagcagattaaatttaaggacaaatggtcgaaaagggacaaaaggtcaacctgggataaatgatccaaaacggacaaatggtcgacaaagggacaataggtcaaccatggggacaaatggccgtttgagtaccagaaaggccgtttcagtgccaggactctggtactgaaacgtgtcagaaaatctgggactgaaatgtccggtactgaaccgtacagggaatcgtggtcttacactactaatgtttaggactattgaatgatagcaaatcgtattaattaccgtactgtacttgataccgtaaatttaattttgtgaacttactttaaaatatatatttttaaggatgaaagagtaaaaagtataataattttcatatacctttaattaacactggtaggtgaaatttgtttggcagcgaataatttaatcaaaaatgagggtaattattaatatcaggctgcctggtaaagaattgaaacggctaaattgcaataatatatagcaaattagttttgaaaattttatgagactgaaagtgcaattagaattatttaataattgtcgcaattttttgggaatcatgcaacggtttgaaattgtaaattatctaatcaaaaatgaatataattattaatatcaggctgtctggtcgagaattgaaacggctaaacaatagtgttttagaacttttttaggaaaattttttataccatatattaattataaaattaaa

SEQ ID NO: 82580 - DNA, 3725 bp, Heterodera glycines
atgtacgattttagtccatacattcgtgagaactcggagtttttcacgaaattagctgccacaaaatcggacaaaaagaaaaacgatttgctcaagggtgcttcagcagagcaaattctgggattagtggaaatctgcgcaaatatattaaaatttaatttccgtctaaacagacgacagagacggcgactggctttgtacgctgactactatcgagcaattgcacgttcacgcagtgagcgtacagcacgacatagactacaacagggcagcggaattgctttaggcgctattttggcgcctattctcagcgttctggccgaacagctgctacaaaaggttgttgcgaaatgaagcacactaaaaagatgatgttggttccagagagcgaatatttagcgttaataaatctgttgaaaggaggtgtaggcgacggagcagactcccttcaaaatgaaaaagcgttgctcgacgcacggattcaaaggaaccttaatgatcacaagatggatgctgatgttaaaatgaagcgacactcatggttgtacaaacagaggcatcagattaaagatatgatcgataataaaccacaaaaagtcattgtggaaaacgcgtctggttcaacgccgcctaatattgcaccgtatatgggcatacagaaggcggcaacaccgaataagcatctgctagatgaagttgaagatggcagaaaaacaagtcctcttaaaaaacggcggcgatcaatgaaaacacataaccgtgtcgtcgccacaaacacttccaacggagcgagctattgtgaagaaactgatgcttatacgtctgcgccagagaccgatttgctgctaagcaaaaaaagagagcaaaaatttctgaagcttaaaacagacccggtgcattacgataaattgcagagcataatagaacgaaaccccgccaaatacggagtcgataaagcgtcaggggaaattctaacaaacttcaaaaagccggttgttaagtcaaattacattgattctttgatgtatttgacagggcagagggcagacgcgcctaaaggccacagattttttgtccaaaaaattggcaatgatccagaaattatgacattttttcatgcccaacagggagagggtggtaataagcggcgaaagcgcaaaaggatagtccttgttaaggccaatgctataaaaacaattggactcaaccgcattgggcaaactaaattttttaaaccgctcctatgggcaaagctgtagaacaaaaattattagaacaggtctattatgatcttaggtcgccggcaagctacgccggaattcaaaaagtgttggcggaagcgcagagacgaaatcccagcatcacccttcgtgatgttcatcaatttctgcataaacagcgtacctacacgttgtttaaaccgcgaaaaaaccgcttccgcaggctaaaaactgtgcctagtggactacacacggactggcaatgcgacttgtgcatcatggatgcgctaaaagagcataatgacggatttcgttacatcctagtgtgtattgatgtgttgagccgtaaaatatttactgcagaggctgagtctaaaaaaagtgagcacatgattgcggcatttgagaagattttcaaaaaggccggtgtgctgcccaacaagctttacagcgatgcagggcttgagtttcaggcaaagaaaatgactgactattggaaacaaaaggatatcatcaaacacgtgatgtacagtccacatttgcacgcaggagtcgttgaacgcgcaaaccgtacattgaaggagcggctttacaaatattttagcgaaaagaacacaaagcggtggatcgatgtgttggacagcattgtgcgtaacctgaacagctccgcgaatcgaacaaccggactaaagccagtggacgtcaacttcaaaaatgccgatgctctacggaatcgactatataagcaaggtgaattgagctcaaaaacaccaaattttaaagcgggagacatagtacgaataagcaaagaaaagggtgacttttccaaaggttattttccgaattttacggacgaactgtttaagatttctaaagtgaatccgacagatccaccttcctacaggatccgtgaccaagacggagaagacattaaagggattttttacgagcaagaactggtaaaaactgttgcagaaacaacgcatagagcagaagtgttgaagactcggcgtagaaagggcgtgaaagaacactttgtgaggtggattggctactcagacaaacacaatcgttggattcgagacgaggatcttgtcaagaattagaacaatggatgaattttaccttgtacttccttccaacacaccaggcacagataatacgacatcaaattttacggttaggcttccacacacgttggagttggactcaaattggactgtcgctctagcatctataatctacccatattcatttccttcagtaggaattgatgaagatgacatcattagcattaaacttgttaatccaagctacagatttttggatgacaaaaaatttttgcacattgaactaaagattccaagcatgcaattttcaagtgtggaacatttgcggctgactctaaataacctaattactgaagcgtatcagcaacaaatttcttcgtaccttgacgacgatgccaaaaggacgaaacgacaagaaaatgtcactgatctttttttccatgaaaatccggtggattattgggaaaagattggcgaactccgtgcaaaatatgaacagctagaaaaggaactgacagaagaggagagtgaacttagcgccaacaccacggatgccgagaggagaaaagtgttagaaagcgagcttccacttaaacggcttcgtacacggaggaaaaaggaggaattggaagagctggaacgtgctgctgaacgacgtgatcaagaaagtcctgaagctgagcaaaaaaagattggcgaattcttccaccaccatcccgaagattataatagaaagctgaacgaggcaagactgatattcacacaccatctctcaggattacaagcggtgatgcgcaagtacatcgatgaaaaagacgcaaacaaaattcggcagcttgagtcggaggttgaaaagttgcgtctgaagatcaaacgcctacagcgtaatttaaccatcttcgaaaatgctacgctccagcgtgaccaccaaaaatctttgtcgcaatatgaggagctcagccaccagcagaacagtgcgtatgtcaaagaattttttcaaaaacacccaacaaattactggcaaataattcacaacaattatagaggtcttacagaacattttcagaagattgaagaactgcgagcaaaggcggtaggattaaaggataatgcctctttccagcaacaaattgaacgcgcaaaacaactgattgaatacagaagaaagaggtttgctgcgctagaattcgaggcaaaaaagcttgatgaatcgtcaatacggatggtggtgatcatgatcaagcagatgagggtccccaagcaacaacaactccgggagaagcattaagagataaactgctgcaaaaaccaaagcaatctgatcatgatgctgatgataaaccagatgagggtacacaaacgacaacaaaaacgcatggggatgcattaaaggaagagatattgcaaaaacaaaagcatgctgataatgatgaca

SEQ ID NO: 82581 - DNA, 594 bp, Heterodera glycines
atgacgcatggtcaaacgctaattgcccgacttaaacagagcgaggagcagaaaaaagaatgggtagcagtgccccaagatgatgatgatgatgacaggccagcgctaaaacatggagatatgctgtggaaactgttacggtcaacgacaccgcataaccagaagcaaacggcgggcgatgtcatccaccgccaatttgcagatgctgaacatactcgtggacaggtaatgatggaactgttgaaaaacatcttagaagaaaaatctgacgctgctgatgcgcaccgtcaacaacagcaaaattatcctcgtcagaaatctgcacaagttcttcggacaaaaagcagaggtgaagcgttgaaggaactgatcaaaaaaacgcaaaatgagcagctgccacaatcttctgctaaaacgcgaggagaaattttaaagttgatgttggaaaatatgaagttttcccgggaggaggaagtaagctttgaaaaacttgtcgctaagcagaaaaccgagcaaaccgctgccgaatttgtgttcaacgatcttgcacaacggttcgtcatgaaaaccggtgcgggcgtcctgcatgtggat

SEQ ID NO: 82582 - DNA, 1003 bp, Heterodera glycines
atgcattttcattataaacttttggttttttttttttggaattttctgacatttttcattttcaagctaaatttgaattccaagaaaaatgccaaaaaataaacgggttccatcggcgaaaaggaattgaaatccgacagaaattttcctcaaaattgttgagaagataagggaattttcaattaaaacatcaagaaaaattgaacatacttttaaaatgttaatttttagtgtgcatttcagaaaattgtttttaaatttttaatttattaattttattaatcaaaaaacgcttccttttttcattaaaaaattgcttaaacagaaatattcatttttaaatttagacattcaagaaatttgtaattatgggagagatggcacggtggaaaaagtcagcatatggacggcatttatacaaaaaattaagccgaagccaatgccatacgaccaaatacatcttgaaaaagtcatcggccgtttattttcaatttacatccaggatgtacaaaatccgatgcttgtaaaacatcccaacaggatgaagcagttactggtgaaggacccgtgtgatgaagccaaactaaaagtgaagcaaattgaaggggtaggggaagacgacgaaaatgatcagtgatcaaagaccaacaatcagtgatcaacgtcgaacaatttttattttgaaattgcaaatttttatgcaaaattcaccacaatcattatttttttactccgtttcttcatatttgttgcgtagcgtaaattgattgcctaattgaaaattaattgtcattcatcacaggcatttttgacaacttttttccccaaaattaagacctaaattttaaaacaatgcttaaaattttttaaaaactaaaaagcatgataaagaatttaaggcttcaagatccaacttttcatgcttaattattgctgaaattgggattttctacttaatgattagtagggttgctactgctgctaaaaatggataaatatagaa

SEQ ID NO: 82583 - DNA, 775 bp, Heterodera glycines
atggcgttcatcacctatgtgctggtgtctggttttgtcttcggagttcagaaaaggtatatatatataggtatgtatatatatatatttttttttgcaattcggtttcgtttaaatttgttaattttgaaaataaaaaaaaaatttctggtcaattggcgaaatcgcggggatacacccatcactttttgccacaaagatctgtacattgaacatttttaaatcaaatgttgcgattttcattgaaatcggtgctcaagcgattgcgcaaatttttcattataaaaaattaaaagaaaattacggttttttcaaaaaaaaaaaaaaaattcggacatgaaacgataaagggggacaaacgtagtgcacccaggcgttatatcgatagacatgggaaaaattttttttttaaacttaaacaaaaattgataaaatttaaaaaaacgatatattttcatcttcaaacatgtttcatttcatggcgacatatagtaaattattttagattccctaaatttataaagcatatctaaccaattaccacaaccaaaagtttttttttcaaaaaaaattttctctttttttttgcaggttcagccccgaaaagcttggcatgctgaccacaaatgcgttgttctatttgttcctggagaatggcattgtgttcgtgatgaaatacgcgttgaacatttcgcagagtttgaacatttggcacgcattgtcctacagttcctacaaattcaccgggtctgattttttggcatttttaaaataa

SEQ ID NO: 82584 - DNA, 839 bp, Heterodera glycines
atgttttgtgaaattagggggcagcagcaactgacgccgtttgcaactatgcaaagaaaggatgggaaatggaatattgaaaaacagaagaaaggatgtggaagggtggaggggatggggccaaattttggggccggatattgggccttatactactcccatttgggattttgtccccagagaattacattaattaatccatcttttcttcttaatgagtgcgtccgtcccgcgaattctttattgactatgaaagtgactatttaaaattgcgaattttgccaattaaaaaaggattaggataaaaggaaaaagccctataaacaaaggatgcaaaaggatcaaatgcccaattttggtcagttgcaactcatacaaagttcaaaagcataatatgtacacaattttattatttcttttcataaattatctttgttaaaagttagaaaaaaatttttttcagttttttttcagaaaaaatcatacagtggactcgcttcatcgcgcaagtttccactttgtatcggcgccgtcttcgttattttgctgcggattaagtgctggacgaaaacattgatcagagcaacccgaaaaatgatgaaacccaaaaattttcaaaagttaaactcaaaaaagcgaaattgtccaaacattcaaaaccaaattaggaaaaacattttaaaaaccgggacaaaaaaaaagaattcatttgggtcgactaaactttccgcgacccatcaatggtaatgaaaccaagcgtttcgatcaattactcttcacgctgatcagaccatcaaaaaataataattttccgatggtcatttgggaattaaaataaa

SEQ ID NO: 82585 - DNA, 168 bp, Heterodera glycines
agcttaaaaagaatgaaaaaagcttatttaggtagaaaattttttactttgaaccatcacaaagtaaatttttatgcaaaaaattcgtggaaacgttgtaaacaaaaaataaaatgactagtattaagctgcttttagaagttatgcatgttaaggacataccgaaag

SEQ ID NO: 82586 - DNA, 1220 bp, Heterodera glycines
ttacaaaaattgaaatttgttccagaccacggctcgttggggttccaggaaaagtcactgattttggctgtgtgcccgccatggatgaacaacagttctttaaaaggatccattttagtccgttttgcctccactcacccggtggtccgtcctccgcgtcctctggcgactgttcgtcgccaattttgctcaggtcccaaatgtgcagacggcgatcggtgcccgagctggccaatgttagttctcgcgcctcccatccgtccatttcggcacctcaatctcttcgtccgatttgaattcgtccgcatcttccggctcctcccaaagtctgtcaaaataaaatgcagaaacatttcacaaattgtgggccaccttttctcggccaaacggtcgacggccggtgatttgggcactccgacgccgccaagtgccccaatagggcggccgataattgtcgtgaaaatgataatactttggctttaaaagtccaattttatgccataggctttgaattttgaattctcggcattagtttttggcgccaaattggagttaatattcgttcgcgcgaaccgtgccataaatccccaatttggtgcagatcgcgatcggctttatcaaatttgaatttcggcatttgatttaaacgcaaagccaaaatacgcggtattttgggtattttgattttaaattttttgttaaaaaacattctaaaattgcaatcgtcgtacatagatttttggcttttcagcaattttgcactacaatgggtagcgagggcaaaattttgactggaaatattaatggggaaacagaaagcaaagaagtgaattcggatgaaatgaattatttgcggcaagtgggtgagattttgagtcgcggaacggtgcgcactgacagaaccggcacaggaacaatttccatttttggcatgcaaacgcgctatagcctccggggaggtcaatcgaaaaaaatgaaattgtttaaaaaatggcggggttaagggaccattccattgctcaccaccaaaaaagtgttctggaagggcattgttgaggaggtacaacaacacacacttaagaaattaataaagttttcattttttagctgctttggtttattcgcgcagaaacgaatgccaaaacgctttcttcgagaggagtcaaaatttggggtaccaaaattatttttaaatctatttttgtattacctacatttat

SEQ ID NO: 82587 - DNA, 134 bp, Heterodera glycines
ttacaacacttttttatcaacaatgagacaacattttaggccacttaaaacacgcgaaaaaagatcatggtcggcggaggcattctattacatcggcaatattggcaaactcaggctggtgaacatgctgatct

SEQ ID NO: 82588 - DNA, 433 bp, Heterodera glycines
atggatgagggacaattttggagttgtgccttgggcgaatgggttaagtaagtttttttttcattttttaaatattcgattaattaatttggcattttattttattttatttcatttaaaatgtttaacatggcgaagaattggttatttttgagagttttttattgcttttttgcaaaaaaaaaaactgcctcaaaaattgggcgcttttctatacaaataataaatttggcattttaaaattcacatttgcagggattgtgtttgtggcacatctgctgctgatccgtggccaatcctcgacccaagccaatggccaattgtgccgagtcttcagcttcgctatgccgaactttgtgacggcgtggcgctgaacctcgtcctgtgctatatgtatgcttttcccagcgatcaatgaatgctttttattaaa

SEQ ID NO: 82589 - DNA, 370 bp, Heterodera glycines
atggggggatgggacaagtcagtctcgtccgataaaaaagtatgggacaactcagtcccgtacaacaaaaagttactttttgctggattcgtaagtagagaaattgtaagtcgtggcacatacatgtaggagtttaatccatattaagtttgggattgcaaagcagtacccgcaaatcccgaaatttggagatttgtaagttggggacccggcattgagggatttgggacaaaacgacatttgtggatccgactctgacttttagcgactcgttccactttcaaaaattctattagaaagttttttaaaaaaatttaaagtatttcaggtcctgtgctattcttgtctgataaaaaagtccttggattag

SEQ ID NO: 82590 - DNA, 426 bp, Heterodera glycines
atgaaagtattcttaatgatttctttatttgtgtttttgatcatcattttaattaatattaattatgttggatcagaaaagaaaaaaatggaacaaaaaacatttgacgaaatatttggagaaaaatgggaagaaaaaagaaacgaaggacagaaaaaaagagaaataattggaaaatttaataaaataaaagagaaaattaagcaaaaaggaagaaaatattcagcaaaagaacggagtaaaattgaaggaaaaatagcaaaaaaattgggcacaaatcgcaaaaatattcaaaaatggatcaaagaattaaaattaaataaattcaaatcaataaatgaccaacgaaaatttgaaattgttcaaaaattcattgaaatgtcaaatgaatacaaacaaaaaggaacatattcgaaaaaagaatag

SEQ ID NO: 82591 - DNA, 394 bp, Heterodera glycines
atgtcagcaaaatcagttgggaatggagaagtgaagtgaaattacgagaaatgtgcacccgttagatgagtacaaaagctcaaaacttggagagaatttacattattttcataacaatctagaaaaatgggcaaaatcatattcggtttttgaaaactttttcgatggcgtttatcggtgcaccacggacccgggtatggtaattccaaaactatattagaatatgagctaaattgaatacatacataaaagtagagtgccacgggaccgggatctggtagcggacaactgagtacaattgagtaccaaggtcccggttttgaccgggaccgggactagtctcggttttttttttgcttgtcaacaaaaaacttgttatgtaaaactcaataaa

SEQ ID NO: 82592 - DNA, 530 bp, Heterodera glycines
atgcattttcaaattgtctcatttttggttttttgcattttccataattttccatcgttcgcgcggtattgtgggggaaaagcaatcagttcgtttaaaaagaagctgaagtatgaaccggatcaagaaggagcgccgcttgaagttaaaagggagagccgaaacagttttgtgggaggaaacggaaaagtgaaagcgaaaataaacaacaaaaaaaaagagaaataattaaaaataattaattactaattgcatgtccacaggtgtatattggctatgtgaagaaaagcccaacttacgaaggatgcgtagcgataaaaatattcaacccaaatttttacgctatttatgagaattcgaaagattttatgcaaaagattcaaagcattcttccgcctgacgagcgaaagcatttaatcacaatggttgacgcgtaagaaatttatttaaaacaattttaatattattatttaaaattatttttggatttttatattaaaaattcaatagcggaaaattaaagaaacaga

SEQ ID NO: 82593 - DNA, 1039 bp, Heterodera glycines
atgtctattccaaaaactactcaaaaacccaaatttattaatattcgacggttcaccccgtcgaatgtgtctcttttaaatacggttatttcatctagaattagcaccttatctcagggtcatttcagtgtaaatgaaaaatataacgcctttaataaaacactgctagaaaccttaaacgagtgtattccgataaaaagacttaccaaaaaagagttagcccctaaatatccaacgcatttattggcatccattaaagaaaaggccaaactatataagctgtgtaaaatcgacccaacaaaaagggcactttatgatagcattagtttacacataaaaatacaaacaaaaaaatttcattctcaacttgaacaaaaggctatttcaaagggaaaaaattcaatttttaaatatatacaaaaatatgatgttaatccctttgaaatatcgaatttggtttctgaaaacaaatgctatcataatgaccaagaaaaatgtgaattatttgccaatttatttgtaaattcgtttaacaattctgaagttgatccaggctttctaagcttggacaacacttttgttaatcaaagctttatatcagatatagaatttaacatcattgagacccaaaaacttttaagaaaacttccgaataaaaatggaacttctccggataatattagctataaaacattgaaaaattgccatccttcattagcaactgttattactgaccttttcaggatttcattagactctggttctcttccagatatctggaaggaatcaattgtttttcctcttttcaaaaaaggggacaaatttaatcctgaaaattataggcctatttctctaacctgctcactttgcagggttatggaaagaattcttagccaaaatatttacaactttctcctaaaaaacaataaaatttcggaataccaatttggttttgttagaaataggtctacaacaagtcaattaataacagttgtggaagattggtatgatgcaattattaatggaaaaaatgcggact

SEQ ID NO: 82594 - DNA, 1195 bp, Heterodera glycines
taattaaatccattccttcgggggaccgtgccgggtgccgcggggtaagcagtgctggttcgtttcatcacggcaccgaaccttttggctagtcagcaatcgttgcttaacttgccagatcggacgggtgcgcatgattccactgttccaagcaccccaccaaaagcaaaacgatataaccaaaatataaggaaaaattttttaaaaaattttttctccatcttcctttttgatactaaagcatcagagtgctaaaattaagttgtaaataaaatttggtgcgctttagagcactttctgaaaaaaatatttatgaaacaaaaaaatcgattttttcaagtgtccgtttggggtactcaaacaattatggggagcaaaaatccaacgcagaattaaagtacaggctatagggaagctattcccgaaggattcggtctccccataaatctgggcgcatcggttcggggggactgccccgaaaacaaaaaaatcgattttttcaagtgtccgtttggggtactcaaacaattatggggagcaaaaatccaacgcagaattaaagtacaggctatagggaagctattcccgaaggattcggtctccccataaatctgggcgcatcggttcggggggactgccccgaaaacaaaaaaatcgattttttcaagtgtccgtttggggtactcaaacaattatggggagcaaaaatccaacgcagaattaaagtacaggctatagggaagctattcccgaaggattcggtctccccataaatctgggcgcatcggttcggggggactgccccgaaaacaaaaataaatcgattttttcaagtgtccgtttggggtactcaaacaattatggggagcaaaaatccaacgcagaattaaagtacaggctatagtgaagctattccggaaggattcggtctccccataaatctgggcgcatcggttcagggggactgccccgaaaacccaaaaaaaaattttttggataaaaattatttaaatgaactgactagataatatttaaaataggttatttctcttcctttcagtatccctgcaaagtttggtgcgcttctgatcggttttctgaaaaaaagagttaagcctaaactttttggcctgtttaaaaaggaattaaaaattgttaaaaattttattcatctccctttttgatagaaaaagcc

SEQ ID NO: 82595 - DNA, 1128 bp, Heterodera glycines
atgtcgggatttttgcgtacaaaaatcgcaatagagctaaaggctcttgagaaggcgaaaacggcaacagaattgtatgctgagccggaccaaactctgacctcattggaaaatgcaattctcctggaaagcgcggcagagagaataaagtcagaggtggaggcagtgaatgccaaaatcgagcaaatttggataaccgcaagcaaatggcatgacgtcatacaaaaaatggacaaggacgaaagaaaaagtgagcagacagcgtatgaacaatttcaaacaacggagaaactgaacacaaaaatggaagcagccaacacaaagctaacagagcttaaggacctggagatgaaggtggaagcaggagcaaagctgcaacgctccaaagcggacagagacgcgcgagtggagcaaagagaacatgcaaaagcaatgtcgaagtcgaatgcagaagcagacaaagggaataaccgtgcgagaggcaatgaaatgactgccgcattgtaccaattgccaacactaagaattaagccgtttgggggagacaaacgggaatggcccatgtttgaagaagcatttaaagtggctgtggaccaaaagccaggaagcaaaacggagaagctaaatttgctgaaatcgctggttgagcgagaggccgcattgctcatcggaggtctacgcttggaagagaaaaattacgaaattgccatgaagctgttaaaggacacctatggagacaaaggcgaatatgtaaggaggttgcacacggagttgtcgaacctcaagagatgcttttcggtggaagacacaaagcatttttgcatggaattggaacgcctggcaagagaattggaagcagcggaagaagacattgaagggccgccaatttatttaatgcttgagaagaagctatacaagcctttcctgcgtgaaattctggaagagaaagcaaaaaatccagacttttgggacacgtcatccctccgaaaggctttaggaagtgcattgagcaaagagctagcaatcaaagaagtcatgagggagtatggcttcgaaggcaaagaggcaaatccagagcatggattcaaacgacaattaaggcggaacagattcggaggctcagtcaat

SEQ ID NO: 82596 - DNA, 380 bp, Heterodera glycines
atggccgtgacattggaccgttttgtggatatggcggaccccggcattcgcgaagttttcccgggaatcgtcgggcacataaaactgcgcgagaacagtgagaacataaaagtcatcctcggcacttccatttgtgaatttcagacgaaacactgctcaacaaagtgttggcacctttcgaatgttcgggtggacagattttccgcgtttacacccgcgaaacaatgccacggcgataccagtgggaaatggcacaatcaaaagatgatcgttgctttttatccgactttcgttcagctacgcccgtagtggacgcattggcgaattggtcatcgactcggcagtgggcaccaaactgttcaaaacggccgagaagatga

SEQ ID NO: 82597 - DNA, 528 bp, Heterodera glycines
atgcccaattcattcacaaatatcgacattaatcctgtagaattgagtcaaaggtgtgacatttggtgattttttggtcaaaatcagttaattaattgataaaattttcaaaaaaaaaaaatttcagacggcgcctatctgcatagacggacccctattctttttcattgtttggattttatttaaatttaattcttttttccatttatatattttttcgcgatttgtgcctaataattttgcaattttcatctcaattttgttttaattttttctttgtaattttcctttttctctcaacttttctttaattgcttcaaattttctaattgtttctctttttttgttgatcatttggttccgttcctttttctccacccatttgctcaactgctgagctttcattatggtcattttgttccatttttatcatttgttcttctctgtcatttttgtcccattcgttaccaaatatttcgtcaaaatttgattggattttgccggtttcaattttatatgcaaagaaaa

SEQ ID NO: 82598 - DNA, 617 bp, Heterodera glycines
aatgtgttgcgaaagaaaaagctatctctgctccttatttgattggtcgggctgtccaattgtctgaatgccgtaaattgtatcgaggtgaccgaatttgctttcgtgggatcgcatctcaatcagtaattgttcaaataatttcctttaaataataattaattttaatgatttaaatgggaaaaataaataaaagtttaactcatccatttttgttttttaattgaattgaaattgctcatttttgttagggcgatagtggcagcgcagtattggccagcaatgggacagactatgtccaaattgccgtttcttcttatgtagaatgtatatcgtcagctcctggtgaatgaaataatggccggaaattttttagcaatattttaatcacttttttaaattaaagataagaaaaaatgcgagaaatttctttctttaattattttaactgaaaactacgaaattttttaaaaatccaattttggcaaaaaatactcaaagccaaatatgcaaaaacaactaaaaatacatccctttttaaataataaaaaaatatatttttttaaaacagaagcctcctacgccatttactctcgaatcgacgctaaatggcttga

SEQ ID NO: 82599 - DNA, 1240 bp, Heterodera glycines
atgcggcgaaataaattaaccaaaaaggtgagttaattttttaaagtgcgtcaaattaagcgaatttctcaacaacaaaaaatattaaattatcaaaaactttgcattgcattttgtgaaaatttcagctaaaaaaaacaatcatcattaagttcatttcgtatgctatgacgttagtcaaaaaaaccagcaaattaaagtattttttgaaataacttttctcaaaagaaactaaatttttaattattgaaattaggattgctccccgtccccgagctccccggtccccgaccccgatccccgacatttctgggccaattccccgctacgacccccgacatgtcgctccccgaggtccccagcccccgactttttgcccccccccccgactccccgacactaattcggggaatcagggaccccgagcattgttaaaatttaaaaagttaattcaacaaagaagaggggaaaggttgaaaatttatgaaattttgaacaattttcttaatattaattattaaaaattccgaaaaacttttcagcgccgcctatcggcaccgccggttcaaaaaatgtcccaaaattgcaaaaattggtatttttaggaaaaatctgttaacaaatttcaaattttcaaaaaaaattttcctcgcggctcctaacaccaccgccctcatcacccctttgttccccaaaagtttttctgaaaaagagcgccgcaaaaaatggtggtcaaattcgatgttgagacgggttcgcaaaaatttcagtttaaccccactcctttctacatatttttaaaccagggcttccatcgaaatttttcaaaatataaacaccaagtccaaaataagattttagtgtcaaaaatatgaacatttagcaacatttttccaatcagttatttttctaatttattcgatcaaattttatatttttagtctcctattatcaattttgataattttggggaggaaaaagcaaaattgtaaatttcagtaattcgggatcaaaagatcaaaaaaattttgcggtagaccttaaaatttcttgaaaaattgtgacattatgccataaaatttcaaaactataagtatatttaagaaatcagaataattttagtcgctaccccccccccccccccaaaatcagaatattcttataaataagaacaaatggaaaccccatgtttaaaggccaacttggactcactcatactggcgctaacgaaatcagatga

SEQ ID NO: 82600 - DNA, 812 bp, Heterodera glycines
atggacatcaaccttatgccgtggactgtgtattataagataaaaggtggcggccattgctctggctcactcatttcatcggaattcgttttgcttgctgcacattgtgttaatgaagttaaagatggagccaaaattattttaggtaaatttaaaaaaaaaagttttcttcaaattttaatttaattcgaggaggctttaatttttatttttcaaatccgtggtaagtcgaaacaattattataagcagagggccatggatttaaatggactaagaaattccaaaatatggaagaaatattgacaaaaagtgctaattacagcaataatactcctaataatctaaaagactgtgttctcttaatttaattctgtttaggctatcagggcttaaaaaaacttaaacttgaatagatttttggcatagaagcaaatgtcggggttttctgaataaaatacagtatccaattccatgaaatacagtatgagttgattgtttttaagggttcaatagttctgaacgcattaggactggaaagccgtacaatggaattcagttgcatttgcacaaaaacccatcaaatgtgttcatccatccaggctttgtcaagaaagaaaatttgaacacaacgggatggaacgatttggcattgataaaggcattaatcaaaaacaataataaatttaatacagggttttgccattcgaactttatcaccccttaatgcaaggaaattttcagcacggcagtgccgataggcagcgtggagaaaaaaaattggggttttgaatgtgttttttcaaaaaataaa

SEQ ID NO: 82601 - DNA, 2391 bp, Heterodera glycines
atgtttttggctaattttattttctgcatttttttgtttgttttttccgaactttttgccggattaaatggaaagtaagcaatacaatttgtctaattatattctcaaaaaatggatgataaaataaattcctaaacaagtaagttaaacactaatctgatattatttttctaaaatctgacattctaatttggaattctaaaaatttgaaattaaaatttttgtggctcaaaattctaatttcaaatactatggggtcaatgatacaactcaattgacataataaaaatttttgttcaagttccgaatattcagggttaataatttgatgaaatgatccttcattttccaaaaaattttttgattaattaaataatttataaatatttataataaatagaaaaatttctttaacattaatttttaaaacattaagcactcttacgttgcaagtgtctaaagccaatccgtggccaatccaagtgttttaccgtagtaagaaatgctcaaggtaatttggtcatatgcttaattgcttaatttaattggttaattaattaagcttttggctctgctacaaccgcacaatgaccgacaaaggctttccgtggaaactgaaaaaagggtttcgtttcgatcaattgttcaacgtcagcagtgagccatcgatcagtgatcagtgtgggccaaatgccaggaaaattcacttttcaattgccaacgaaactctgaccatcggaaatgaattgatcaccaagtcagtctgtttgggttattagtatatatagtacgcaaatttacatcaaagaagtgccgactttagaaaataaaaagtcggttttttcattttttaacgtaattttggccaaaaattcaaatttttaggagacacattttattatgaaaatatcgttttgaggggttaacctatcaaaagcatcggaaccatttcccattgggattgaactgttcggcgtttaaaaggcaccgaagatgtcgtaaatggtctaattttcattgaaaatggtaaatttcatggaaaacaattcccgcgggtgtccttactcccgccgtcttcgggcctacatttctgtttttggcatttttttaaaatttttttaacaaaatacagtaaaacaaaaaatatatcctttaaaatattttaattaaatgaaataaataatcttatattgtagcaatgcaaagccaaacgacacaaacattgaattgaaatttgactcattttgtggcaatgttgtccttttaaacaatggtaattattaataacaatcacttgcattgaatttattttccaaataccgtgtttactaaattagaacccccctgaaataaagccagcctttcgaatggagttgaaaaatagagcccccgggggctctaattcaggaaatacagtcgataatggtaatcattaaatggatatattccagtgtatacgtttaatcagtgattttcctcagtttcataggcaataactttgtttttacttggtcaatgcgtaattcttgatatcaaatgaaattatgtctatagtagaacataaaagctaactcgcccgatgggactcgaacccacggcctttcctcaccatggaatgcttgaaaacgactgagctaagggtgatccctttagattattaggtgatccctttgattattctttaatatactctcaaaaaactgaattaaggaaagttcgctgattagatgtgtaaaccaaagtagagccaattaaactaatgacgtattaagatggacaggaacagttgaatgattttggcaaggaattttttgcccactccaattttggcccatttttggctgattatgcgggactttggctgttaccgctggatattgtgtcaaaattgggcggcgtcatgtcggatttaatttcggtggtgccggatgagtgtaaattcgaatggagactaattgatccaccaaaacaatgcatgccatttgattttgaggcagcccaaaagcgtcgcagcgcaagacgaatcaatccgctcgtaagaaaaaaaatgttggggatgtttaatgattgaaaccaatttgccaatttttcttgattagctttaaaatccgagggattaaattttacgcgtcaaatgattcattttagggttcaaagaattttttcattcatttaaaattataaaaaagccttgaataattcgaaaaaagatttttttttgtatgtcaaaaaattagataaatgcaaaattttatagaaaaatatttttggcattttgattttactcccatcagctggaaaaagctccaattttcaagaacatggatgctcgtagttttctaaagaggcatagtccatttccagaatttattttgcataaatgacaataaa

SEQ ID NO: 82602 - DNA, 508 bp, Heterodera glycines
atgattcaccataatgcaacgataaatgatagaatgatgataattcattgggaaaatggtaaaatatttatgttaatcatttttaatggttttgtgaaaaagagcataaattatagttttggttagatttattaatgaaaatataaaaatgtgcaagaaaaataaattaaaaattgaacaattattgaataattatttgtttttagataatactattataatcagtgattggactcgtatttgaatggaaaagtacgtacttgaaaatcatgcgggaaaatttgaaatttgcttacctttaagattgattgtacttgaaaatagcaatttaaaaatttaaaatttttttgaaattttgtaccaataattttaatttttttttgtcacttttgattatatgtattctgatcattttgcatttgttcacttgatccactacgattttcttcactttaattttgtccaatccattgccatatatttcgtcaaaatttgtgaaacccaaata

SEQ ID NO: 82603 - DNA, 825 bp, Heterodera glycines
atgtacaaaatggattttgctccattcaaattacttctccttttatgccagaatgccgagaggccccggtggcccggtgagcccgggcgcgccaggcagccctgccacacccttgggacctggcattccaggcagacctggatttcctgaaaaaattggaatctgtagtttaacgaccaattaatttcgaaataattttagtttcatctatggtagcaatcggaaatcgatgcctattcttgagtatataaatatgtacgaattttttcgtattttcataattttcaaaaaacaattacctgtaactccttgctatccagccattcctggcggtcctgcgaggcccttctgtctggaaaattccatgttcgaacttttgtccatttattcctagaatgcctgataaacgatcataccttcttaaattcaaaaaatattaaatttttttcttgaaaattcaaaataccatgcccaatggtacctaaattgcttaaatttttaaaaaatcatctcagcgcctgtcttatgcaaattcattgcattaattttgttcgcttcttaatattaatcttaattttattatttgtattttcttttaacaaaactttgccaacagtaaaattgtacaatcaatttttcactatgatttaaaaatattcttaaaaagtatcagttaatatgtatgtaagaattattatttattgtgaaatgttgttaatatttttattaggatgtgtgtaatagggctgttcgaatctccgatttctgtcatttcgtctcgactaaccgagacttttttacacccttaaagattgagttttttaa

SEQ ID NO: 82604 - DNA, 1375 bp, Heterodera glycines
atgctacaacaaaccgctaattacccggctgctaccggtactggtaacgctcaactcaacgaaggatacaacggtaggggggtcagttctgtgtggccgcttcggtctcgccagttccgacttagtacttaaaggccgattccgtcttaaatatattggaccaaaaaatatacttctttttttccatgtgtcctactggaaataaaagtcggtacaccccaaaacgtcgccgccgaaacttcgccgggacagaaaatcgcagcaaaaaaaaaaaatttccaaaaaacttttaagaaaaattttatttttttacaggaacttcaagcaattatcaaatcaaagcgtgcgacccaaaactgaacagaacaaaagaaaattcaaaattcttatttttcccttaagacgaaaatagttttttacaaagcaaatgtaaatttgaaaagaaaaggtggaattttctttaaaaaatttgttaaattttaatttcttaatttgttaaattgatcaaatgggaaaaaataaataaaaaccgtaatttcacatcaatttgatcgaatcgagtttcataaaaccaaaaaacgaagcagaagtcacagataatgaatgctaaggccatataataatggacaaaatatattaatttaaatacctttattttatttaaaaaactcaatctttaagggtgtaaaaaagtctcggttagtcgagacgaaatgacagaaatcggagattcgaacagccctattacacacatcctaataaaaatattaacaacatttcacaataaataataattcttacatacatattaactgatactttttaagaatatttttaaatcatagtgaaaaattgattgtacaattttactgttggcaaagttttgttaaaagaaaatacaaataataaaattaagattaatattaagaagcgaacaaaattaatgcaatgaatttgcataagacaggcgctgagatgattttttaaaaatttaagcaatttaggtaccattgggcatggtattttgaattttcaagaaaaaaatttaatattttttgaatttaagaaggtatgatcgtttatcaggcattctaggaataaatggacaaaagttcgaacatggaattttccagacagaagggcctcgcaggaccgccaggaatggctggatagcaaggagttacaggtaattgttttttgaaaattatgaaaatacgaaaaaattcgtacatatttatatactcaagaataggcatcgatttccgattgctaccatagatgaaactaaaattatttcgaaattaattggtcgttaaactacagattccaattttttcaggaaatccaggtctgcctggaatgccaggtcccaagg

SEQ ID NO: 82605 - DNA, 485 bp, Heterodera glycines
atgacccttcacacaattcattccttctgctgcaccacattgctcatgatactgaaaaaagattggaaatttcgagcttcatctgtagggcgaggatttagatttactccccaaatatttaaataaatatttgagaaaaaatgcccaaatatttatattacatgttactaaagaccttttttttttgctatttggactaaaaaaaacttttccagattattttaaaatttcagcgccggatatcaaaaatttgcccaaaaatgattaaattatgccattttgagggtttaaaattcaattataaggttgagaaatgggagaattcggccctcctccctggctacgggcggggtccgtacaatccttcagtgggcaatccgtcagtggtcaatccgttagtggacaatccgtcagtgaaggacaatccgtcagtaatggacaatccgtcagtgtacaattcgtcagcaaatttttttgaacaatga

SEQ ID NO: 82606 - DNA, 544 bp, Heterodera glycines
aggtggtgtttacgtgccattccccggcggtgaacaatcgacgtgttcagaccgccaaaatcagtccgtcttcaccaactgttttgggaaccggaggacgggaaaattttgaattgagagtattatttaaaaaattatcgcaaaaaacggttaatttgctagcagttttgcataaaaatgaccattttcatgacagttagttgaaaacctgaatttatttttaaaaaaaatttttttttattgctctttttaggccgttctgcgacagcccttcagcacatggttgacgtgcgcaagaagctggagttggaggtcaaaattgaccctgccatttttgtcgtttgctccggcggtgcctttgacccaacaaaaacgacattaatcgccgaacttggtcaattgaaactgaacacttaggacgagccgtccacaaaagcatacgaacatgtcagggaattgtttagggcatcattcaatttaagaaaatgataatatttgcagataaccgatcagagattgcgttcattggtggccaaggcatacg

SEQ ID NO: 82607 - DNA, 383 bp, Heterodera glycines
tagaaaaagaatatttttggggttaacgtacatttgaaaaaatgaatgaaaatgttattggacgggaatcaattttcctcggccaaataatttgcataaagtgcaaaaataaatgggaaaaaatatttacataacggggatttgaacctaggacagaaaaaaggtgcggcagaggcgtaacccactacgccaccggccactgtggaagggtgtaaataattatttcttttatttaatcattaaaaactttggcattttttatctcggcacaggggtccatttggcagaaattgaaagcatttttcttaagaacccaggggtgctctatctacccaaaaaatctcattccgagatcccacggacacttggccacctccctttgt

SEQ ID NO: 82608 - DNA, 388 bp, Heterodera glycines; identical to SEQ ID NO: 51536

SEQ ID NO: 82609 - DNA, 1092 bp, Heterodera glycines
atgaccttaaattcactgcctgaactaaaagggaacttcggggcagatggcgtccgatcgtttttccggcattttgatgtcgcaaccgaagaatggcctgaagcgaagcgtttaagcgcacttcgatcaaaatgtttggggcgtgcggaacgtgcgttcaatgttgcggttgcaaataacccattccgttatgacagcgtaaagagagcgatgataaatctgctggaggagacagatgctaggcaaatgtcggcatttgacgagctgatgtctggtgcatatcgccgaaataatgagagaatcgacgatttggcggaccgtatttcttcgctggtcagaaaagcctaccctgggttactcgagcatctttacgacgattattcaattcggcacttcataagggctctccaaaacccggagttagcattaactctcgagttagcccgtcgtccttcaatgatttttgatgaatttgttgcattagcggcgagagctgaatcaactcaaaaggcatcgaagctcgcaatgcaaaagtcaaacaatttctcaaggttcaacagccaatttcaagtgcctcagtacagcccacggccaatgcagcagcattttcgccaagaaaattttccacaagccaatgaccagcaacaaaaccgcccaacttgttataattgcggaaaattcggacattttgccaggcaatgttcggagccccaacgaaaccaaggcactcagaataacaacagctcaacatcaaatttcgttcgacaaaattttattgttgaacaacaggaaagaccaccacaaccgagtcaaaatctttttgttggtggcatttcgatgagtcctgctgaggtggaaaaattgtttgggaaggatgggaccgaaaatgagacgacgaaaaatttgaataaggtttcgatcgggagaataatggccctaaatgtatcggtttgtggtttgacggcaaaggctatgttggacggaggggcccaaatttcgttggtttcttttgcattctttgcaaaattgttggccgaaaaaagaattgataccgatcttcgcccaactcgtcacatcacttcgggtgattga

SEQ ID NO: 82610 - DNA, 952 bp, Heterodera glycines
atgacagctttgatggttgacgcaaaaatgcactttgatcatagagttggctggtcacttgtgtccatgcgatcaatgggagcagtccggacaaaatgtgatcccttttttgattggttgaaaaagtattttaatagaaatttattaattttattttattgttattcttatttagtttatttaatatttatttcaaatttttatgtgtccaagcaatttttataaaaagaaatgattaaaacttcggttaaagaattagtccagattaattatttgtcgataatgatcagtcaaatgaatcaagtgatcggaatatgattttatttaaaaaaatgatggtgggaactaccgtagcgaaaaaaggatgaacaaatggaatttgccttctttgccgacggcattatgtgctgaaaaaattgaataaattatttttttattagatatttttttattgaaattaatttattttaaatcattataattttggtatatatatatatagtagagttgctcggtaccggtaccggtaccgaccggtaattaccggtttttttggtaccggtaccggttttttcagaaatcaaagtatcggtaccggtaccggtaccgaccggtaattaccggtttttttggtaccggtaccggtaccggtttttcagaaatcaaagtatcggtaccggtttgtctagtaccggtaccgccggtaaaaatttgcactggtaagaatgggggtctgggtgagaaaagagtaggaaattggtgaagaaggagaaattttttgagaaaaaaaaaattaaattatttattttcgtttaaagcgtttgttcatatgcagtggtcaagtggctaaaccttctgattttattatttctcgcttgggttcaattccccactgggatagaatattcttcatattttctttaccattattttaattgaaattttaattaaa

SEQ ID NO: 82611 - DNA, 1146 bp, Heterodera glycines
  unsure (1)..(1146): unsure at all n locations
atgaaaaatccttgttgcaaggcattgaggatatatgaagaacaatttatggttttttgtgtgatgtgtccatatgtaaaatcagatgatgtaaatcaaaaaacgaattaaaacaccataaatatatatttatatatataaatacatttattatgtacaaaatttgttgtatttcataaaacagtatcagattttaatgaattaaatttttctttttctttttttaaattttaagactgcccagtcaatttctttcacatcaagcggatttgaacccagaacccatttttaatgcaccgctaaatgaaaaattcacaatagaagtcgatcctgctctatccaatctatatatagcttatatgcaatttcacggagcaggacaaaacgtcgtcggacgaatttttgggccataacttttttttctttctccaccaaattaaacattcatgctattattcgaaagcatttgaaaaacgctattaaactagtaaatttccaaaaaaaatgtattcatgcacaaagaaatcagggcaaaaaaagttcgaaatactgggttttcgagttccttctggccataacttgtttgaaacttaacgaaaatttttgcaattttacaaattaataataaaaaccacagagctatcgaacaacaccaacaattcttaatttgattgacagtgaacaaagttatggttcaaaaagtcttccgacgacgtttcggccggcgacgttttggggtgcaccggcaatttcatacatacatacagttgatatgttcccttgtaagcaccggaggtccggccgtcccgatatgatttacaaatcgctgaatattaattttttggctgttaaatttcaaaaaaaaattgcttagtttaaaaaggttgtgcaccgaaaaggaggctttttcgacacttttgaccttttgtatgagatttattgcacgaaagggagtgtggagttggaaaaaaagttcgaaaaactagggtgaaaagaacgtggtgatcaaatggaatttcccgggatataacctccaaaaggtacatttcgtcaaaatgtttttttataaaaaaaaaaaaaaaatcaaattnttaattttacaggcagataaagaaatttatgtagataattaactttttattaaaa

SEQ ID NO: 82612 - DNA, 902 bp, Heterodera glycines
atgtcattaccaacaaaagcaacaacaccaataagaaatgttcagccaaaaacagaggccgaaggacaaagcggggcgatgacttggaatgtggcgattgtgacgattgtggcgattgcgatttttgttgctgttgctgtatcggcggtagcagtaccaacaatgacaacgactgttgctgctgtaacgcaaagtgttgctttgttttgtggctaataattgcattggcatgcgttggcggcatcgctttatgtgccatcaaaatgcatcaaattactgctaatgaaccgaatgcacaccatagtattggtcatttcattggtggtacggtgggcgctggcatctttctggtgatttctgttattgctatggtgatcagctgttgtgtaattcgggatagctgaagtgatttaaacgcgctaatggcaaaacgtgcaacaagaaaaaaaaaagttgaaaaatgtaacataaaatgtaaaaaaagaaaaaaatgctttttatttttccaaattaaatacctattttagcttgaaagattagtttttgaaaaaatcacagttttgccatgacaaagattaggcatatggtacggtatttgcatttttgtagattaatggcaatcaaagaaaacagaaccttaattcacaatactgaaaaaaaaaatcaaaaatagcagatttcacagaaattttttaatttcaagtgagtgtggagtcctgcgattcataatataccgtattctgtgagtgtgggtgctttcttgctgaaattttgaagctaactcatttcgataaacattaaccaattttaaggagtttaatcaatttaattttattttattttatgtttataaaacttctaatttcgtattaagaaaattatttttgtttgagtccaataaa

SEQ ID NO: 82613 - DNA, 562 bp, Heterodera glycines
atggtaaaattggcataccaatgccactttttgtttctacgttttcactaattaacctattttttggttttgtttttcgcttcttaattaaccttgtttctttctctctcttcccacttccgtttgtttcttttgttcatttgcgcttttccaatggatttgtgaggtcataaatgttcagaagagggccaagcaaaaggcgaagttggcgggcgaagaagcaaatggttttgaggaggaagaaaagtgccaaaaggaagaagcaaaaaaggaggaaaaagccgaggggagacggagtgaattcggtggaggaagaagaagcggaagagagtgggaaaagggggacgaaagccatggcaaaggccgaagaatggagggacaacaagcagtagcagaagcagcagcagcagaggaagaacaaacggaatggaagaaaaacggacggaagaagcaccgggggaagacgaaggaagcagaaacgtatgccaaatggacggattgattactgaaaaattaattaggtattaattaattgcttaaagttgagtaattttaaaataaa

SEQ ID NO: 82614 - DNA, 593 bp, Heterodera glycines
attgtaataattcccatttttgacaatgctaaaattgggtgaacttttgtttcaattaaaatgcctttgtttcattcattctttttgattttgctctttttaaatttatttttccaatttattttcttaaaagcattgaaagtgccgcgtttcttagtaaaaaaaatattaaacgaaacgatgcaaaacgaagcgcagacaatcactgaaaaggtgggccaaacatggcgaaatggaaaaaacgggaaaatggggggggggggcggtaataacaatttaatgtaattatcattaattagtccaacaatgccaaagtgccgtttcagccgccgcccctcggcgcctccgccccttccctcggtggcagcgctttgtcctcccttttcgcctcccctctgatcactttggcccctccgatcacttcctccgcttcgtttctcctctttttgctgacgatcaccttccttctgctgatcagtgcttttggccttttgcttttcaaatggcacatgcgcaacggaaagagcgaaaacggagggagcaaagaaaaagcgtggaacggcagaacgccaatcatttcgcagcctttgcga

SEQ ID NO: 82615 - DNA, 796 bp, Heterodera glycines
  unsure (1)..(796): unsure at all n locations
atgagaattaagcaaaagaaagattgcagagatgtgttttttgatggtttgtaatgcgtaaaaaatatgtaattaatttttcttttctgccattccatcgttttttttcattttgccttcaatatgccattctgtgaatttaaatgccattcttttgctgcccttctgtgatttctatgattacatttttctaactttgttcatttcgacacttaccaatgtcaaattcggcactagggctaatatttatagttttttttctgagctctccgtttgttaagctacttttcgagttattagtaactattttctagttttttattttgagtaccaattaacaaaaatgcaataaaacgaaaaatcacccctaagaatcgaccccaaaaatttatgaaaaataaacatgaaaaactctctctaaaattcatctctaataagatttttttgattttctaaattattgaataaatttagtcattttacaaccctaaatttgaggcttttaagtgcctattttggcggtttttagagctaaaacttggagctcttttattaacatccaaagggttaagtgtactctattagcctgcgatgccatccgtctcttttttaaattaaataatttgcagaaaacttcgttgtgncatatggaagcgccgatgcttcaaatcaacaacataaatccggcgttgaagcaattaaatatcatccaaaaacacaacattatgaaattaaggataaatttcgaaagaatacaagagcatacttatttttgaatgacattgtcgtaattaaa

SEQ ID NO: 82616 - DNA, 1522 bp, Heterodera glycines
atgatatggtaatatatgaaaattttgatccaatttaaaataatataggcatattaataaataaaaattaataatattaaaagcttcttattttaagaacacgaaataataaacaaaaatataataaaattgcatcaagaaagtgcaaataagttttctaggctacctaagacccaataagaaacaagaaagatgtgacgttgcacgtgaaaggcgagtgcttaaaaacaaaaatgtaaaaaatagaaatgataaaactaatgtattgtattttattttaaagtaagatatcttcatatgtaaaaaaaaatttaaattaagcgttttaatattcgtttcggttgaaacattccttatttggggaatttaaatatatatatatatatatatatatatattttattttattttcggattgaaaattcaatacaatttaatttgcaaaatcaaaaattaataaacaatataaataccaaacatttaatataaacattttaaaaataatattcagagaaaaaattttcaggaattattaaaaaaatggattaatttttttacttttataattaattaaaattattgatgataaattggtgaatgactgctttttacataaaaaataaagtttattgaataaatttaaaagttattttattatcttaattataatttaaatcttatttaatttattgaatgaaacccataagaatttatctgtaaatatttaattaattgaaatttaaaaaggacctagtgcaattattggacctgagaatcacatactaaaatgtaaaattttaaattcataaaaaatatttttgatcgaaaaaggctgagttgaaaaagaaaaacatgtatatgtagaaaacataaaacagaattttatatgatcataaatatttaatatgaagaataatataaaataaaaataattaacaatttattaaaaaaagtaataattttaaaaaatattaggaaacaccacccgtatatttcaatggatattcgtcaaattttttgtctcgaaaaatttacaaaataataaatggaaaaaccaacaagtaggcaagtgaaagtgattaaatttaaaagaaattaaaaattactataaataacacatgaaaaataactcccaaaacaaattaaacttaattttattttgcaattgaaattaaatgaaaaaaataattaaaaaaataattaaaaatttaataaaaaaataaagatgaaaatctattcaatcattaaaataatattttcagtagtaataaggccagattcggagtatcaaactgttgcagaacagttgcaattttttcaaggctcttaatagaatagctctacaacggcagagggcaagtaaacacttaaaaaatatattgctaaaatttacgcaattctaattgcttctgggaatttgaaatactaaaaatttgaacaaatgcaaaaatgaattgaaaaattattactaatataaacaatgtcttgagttaaggattaattatattgaaaaatcagctaa

SEQ ID NO: 82617 - DNA, 1193 bp, Heterodera glycines
atggcattagttagattttctgtcggcaaaacgaaccgtgggcgtcagctgatcacgcatggaggctacgaataccttttcgaagtgaaagttttcaaaaaaacaaaaaagcagttttctaaggctgactcccgcacggaagatggttggagttactggaaatgtcctcgccgtccaccatactgccctgggagggcaaccgtgcagtcaaatttgtttgttgctgatgacggctcaaattacagattaggtcgtgttactgcacaacacaaccacgaaccggtctttggttcattaactgtgggtcaaattttagtggaaaatagggggaaaaattatataggttagagaagccaatgaacgacttcgtgatgaagcacgatctgattttcctacaacaagtcgaaatgttgtgaggcaggtcagagcggatattccagtcgatgttcgggttggcgttgctccatctgcttcaaacatgcaatggaactacaattacaccaaacgaaagcattttgaacaagtcgatttaataaataaataaaataataataataattaaaggaaggcgatattgggcttgatgcaatgcccccaacgaatttattggttccaaatgcactccaaaatcgtgtcatttacaaccaaaatcttcaggggaaaaaaatgctcattttttgttcacagtttggtctcgatgcactcagaaattacggagaaagcgttgcaattgacggcacttttgaagtacgtaagataaaatcaaaatggaaaaatgtttttcagagttgcccgaggggatttggacaactttacacaatgtcggttatcattgagcactgtgctgtcccttgcgcctacgggcttcttcctaacaaaaattcccccacctaccgcattttttttgattccatctgcgcttctgttgggattgggtggtaccctgccagaattatgactgattttgaagccggggcaatcaatgcagccaaaattgtttatccaaatgcaatcgtcagtggctgcctcttccacttgggaaaggctttttttcgaaaaattcaaagtcttcctcatttgttggaccgctacaacaacaatgaggatgtccgaaaagcactgcgttgcgttcaagctcttgcctttgttccattgaattatgtgtacaattactttgccatcgccatgtcggt

SEQ ID NO: 82618 - DNA, 1745 bp, Heterodera glycines
ctgctgagcattcacttagaaaaagattctccttttcaaaaatttttttcagatatcaaatttgttcggtttggttgggaattaagcgagttatggctgatcaaattaaaaaatacaaaaaaggcatgtaaattaaaaattagcgcgcaaaaattcacgacaattacgctctttggcgttatgaacaattttgtctgacactgggcttgaccaaaacacattctttaaaacaattttgtcaaattttttggtaatactgccttttactggtcccattaaaaaaagagaataaaaaggcttttttttacgattattcgttcttttagggggttatcaggccgctgatcacgaatatgatatccatttcgaccaattcctaaacccgaattcgaacataaaatcgaaaattcaaattttcaaaatttggatttatgtttcaaaaagggtttaaatgcacggaagcaaaccgaaagccataattagcaataaaaaatacatataagcatttttaagacgaaaaattcgaaattctttaatttgtgaactttctattttttgttcgaattcgagtccgggcttaggaattagtcgaaatgaatgacatgttcttgattagcgaccccgataacccccgagtagaacgaataatcgtaaaaaaccgcgtttttattctcttttttttattttcaaaaattataatgtcaaaaaacatagttatttccttgggttttcggggtcactgataacgaaattcggcatccatttgacaattcgaaatcccgaaggtgaatttgaacaaaaagtcgaaagccaaatttcgaattctcatttttctctgaaatggtttaaaagaaattttacttaagtatttattgttgcctttcagtttgtttccgtgtttttaaacaaagtttgaaccaaaaatgcgagttcgaaaatgtaaatcttttggttttttaatgaattcgtgttcggagtccggaatagtcaacatggatgctggattcgtaatcagtgacccccgaaaacgcaaagaaatgaattgagcagcgggggaacaaactccaatattacttctgcgcttatgtcttatggaggtcggaattgaacggatggaaagcgatgagaatttggaaaatttaccaaaacaggattggacgataacaccagaaccaattgtcattcgtggagttgggcacctaaccatgtgagaagagtaatttaagacaattaggattaataggacttgttttttcttcgaaggtttggccttaactcgcatttttcaacggaatttcctagcgctctgacaggaaaattggcaccggaagagtttgacgacacattgcgacgtgtgaattacgttcttcagaggaatgtgagcagaaacttgcgctggttgatctgcggattgcttttttgctgctgcagcttcggcatttcgttatggccggtggtctgtctgaacagaagggtaagtggtgaaaaaaaagtttatttcaatttttgtaaaaaccaaaattcaagactatttccgctctcgagaaaactctggaccatgagaaccaacaattgtacgacaagctcggcttgcattggtagcgcacctttaacttttcaatttgtttgctacaaatggcgatttcaggaagttggccaggctgcccgttgagccgtccaatcgcctgacagaatatgtccttttgcttgaaacgctgccaagaattcccctttccatgccggat

SEQ ID NO: 82619 - DNA, 1135 bp, Heterodera glycines
atgggaacatttggaataaaacggacagaaagagccatcgcagtcaaatctaaacagtttcacgtgctaatccggcatggaaaggggaattcttggcagcgtttcaagcaaaaggacatattctgtcaggcgattggacggctcaacgggcagcctggccaacttcctgaaatcgccatttgtagcaaacaaattgaaaagttaaaggtgcgctaccaatgcaagccgagcttgtcgtacaattgttggttctcatggtccagagttttctcgagagcggaaatagtcttgaattttggtttttacaaaaattgaaataaacttttttttcaccacttacccttctgttcagacagaccaccggccataacgaaatgccgaagctgcagcagcaaaaaagcaatccgcagatcaaccagcgcaagtttctgctcacattcctctgaagaacgtaattcacacgtcgcaatgtgtcgtcaaactcttccggtgccaattttcctgtcagagcgctaggaaattccgttgaaaaatgcgagttaaggccaaaccttcgaagaaaaaacaagtcctattaatcctaattgtcttaaattactcttctcacatggttaggtgcccaactccacgaatgacaattggttctggtgttatcgtccaatcctgttttggtaaattttccaaattctcatcgctttccatccgttcaattccgacctccataagacataagcgcagaagtaatattggagtttgttcccccgctgctcaattcatttctttgcgttttcgggggtcactgattacgaatccagcatccatgttgactattccggactccgaacacgaattcattaaaaaaccaaaagatttacattttcgaactcgcatttttggttcaaactttgtttaaaaacacggaaacaaactgaaaggcaacaataaatacttaagtaaaatttcttttaaaccatttcagagaaaaatgagaattcgaaatttggctttcgactttttgttcaaattcaccttcgggatttcgaattgtcaaatggatgccgaatttcgttatcagtgaccccgaaaacccaaggaaataactatgttttttgacattataatttttgaaaataaa

SEQ ID NO: 82620 - DNA, 725 bp, Heterodera glycines
atggaatttaataattattttaacaaaagtaagtcaacagtattctaaagaagtgtaacaatccgttcttgtgccgcatcttgtattccgaataaaaagatccgttaaatcacagttttttgttcacggattaacataattatatttttaagtgcaaaatatttaaatttatctttgactctataatattattttctattgtcatagtataacaaacatatcattgctattatttgtttacttacaacaaaacaaatattaattttttttcataagttctggcggtaagcacaattcattctcgtcctatttaaggtcgttgattatgttgaaaatctcattgtttttttcttgttttggaaatttttttaaattttattattctagtattttgattaaaatgttattgcttttttattttaaatgttcaaatttcgtattctctcgacgtaagcaaaaatttgaaataatccggttaaaaaattctttttattatttttatcattaatttgattttattaaaaaaaatgttcgtttattatcattactaaatgtcgatatttaattgataataataaatttgattttgatattcaaaatggaaacataaaaatatttttaggtactcttccgttggcgattagttaactttaacgtatttcgtgtcattatattcttttgattgcatatttttctttattttccccattctgtattcattttca

SEQ ID NO: 82621 - DNA, 780 bp, Heterodera glycines
atgagatggcaagcgaatgctgcacgtatgcttatggcgattcctcttcgagagcctaaaaccgttgatgttcctgacgagtaagtgaattgattgataatttagtaatttcatggacccgaaattcacaaatttttttgttttgtaggcctaagtcttcacctactgacccactttcaccatacgacccgtcccatccgcgtcctacacaaccggactatcccgacatgcgtgattatgatccgcgttcatttaaacctcctgagccggacgatgacccgcttcgactgcatccgatactgcccgctgcgccgtatgcaccaccggcacggcctcgaccttcacagcctaatgcgcccactcgaccgccacctacttaccccgacattggcagaccgtattttgatcctcttccgcaccagccgacgaacccgtacagcgactggccctatggacctgcagcaccgactggatccggcggatatatgggcggttatgatggtggagtgtatgaacctcgtcctgaccagcctgggaactcgaattatgacccatatggaagaggaggatcggacgacggcaaccacggacacgatggtccaggatcttctggtggcggtggcggcggattttttggtccttatctttaagaagttcggatggaagtctatttgcttgttgatatgcaattgtttccattgtataatatgtaatgtggttaacgggtattcattcatttaacacatacattggcatatgtcaaccatactatttgtttca

SEQ ID NO: 82622 - DNA, 1062 bp, Heterodera glycines
atggaagagtttgaggaaatggtcgctgttcttcagcttgatggcgtccttgactttgacgcggtgcgaagagcagtcagttctggtgcaatccgagtgcgcgaatgtgacgcggaaacgcccatggttcaggtgtctgaattttgactccttcgatagacattccgaaccgagttcgaacaaaataaaagttttctgatactgagttaatgaaattttgtttgaatttttgtctggagctcgcaatttgtcgagccgatgccagattcatgctcagaaattccgagaaatgtgttttcttaacttataaaattaaaaaaagtaaaaatgactatttattgaatatgaaaaaaaaatcgaaaaaccggaattgattattagtcttttatcttaagattggatctcatttgtattctggacaatggtcacaaacgttaggcactgatatgcttttatgtccttcttcaatgtcggattaccatcaccatgaaggtattaaatttcttttaaaccgaggtcgaattttttttcaatctcattgtcagctcccataaacagtattaaatattagagtgttggtttggtttttcatggttgtttaaccgaaacgaaatcgaaaaccaaggggtaggccaaaaatctaaggccgaggagtccaaagccaccctaactaaaagccggtagacccggttaataatcaaccgtgaataacccgtgttgatgtagcctatcttttttattacatattcatgaatttagttttgaaaaaacaaaatcatacgcactttcaaatacacattttgactacgtcgaaagataaacaaaaaaaaaaaattttccggaaaaaaattctgttcatgaacaacataaaaaatctgttcttcccattgggcattctgtgcgttttacgttttaatttcaggccatcagaggttggaattggtcgctgtgtcagacactcgtctctgtgcgcaaaaagttcttttagcaactgacgaaagtccgactaatggcaatggcactcggaatgaacaaagcacttcaaatagttcaaaggcataa

SEQ ID NO: 82623 - DNA, 948 bp, Heterodera glycines
atgtggacctcgaagaatgtgcaggaatttaaagacaacatcaaaaaggagggcaccgagggagttctgaaaattggtcatggcgaaactgtcacagtgagtgaactttgaatcttgaaacggtcctttccattatgagccaaacaattttactagtggtaatttatttgtttgtttgtttatctgtttggcctttcaaaagggacgaagaatattgtataaaataaacaaaagatgctaattgaaattcgcattttttcattatttttaggttcgtgtcccgacgcacccagagggcaattctttagtctgggagtacgtttccaattgatatgagtcattcattagtcctctctttgcagttttgcaaccgattactatgacctcggttttggcgtttatttcgaatggacaattgcggagacgaaccaagtgacagtgcaagtggaagagagtgaggacgaattggaggacgacgaagcggcggggggcgagggacgcaccggcggacagacggcgggcgacgatgtggaagcggacgcggcgaagcgacagaaagacgcgaacaaaccgcgcgtagacgaaatcattccggtccggccccattgccattgcttttggtgttttaatattttcattttcagaccttccgaagggactgtcacgaggaggtaattctgtgcgttcaagtgacaaaaagtgaacaaatgtgttttttaggtgttttccggatctcatgtttatcccggacagggcatttaccttctcaaatttgacaattcgtattctctgtggcggtcaaaaacgtaatgctttttaccctttgagtgtccataaaataataacttacgtttaccttaaggttatattacagagttttctacagcaagtgatatcatccagacttattgttgaaatttacacagtgaagggaaatgattgaataaa

SEQ ID NO: 82624 - DNA, 102 bp, Heterodera glycines
  unsure (1)..(102): unsure at all n locations
atgggattgtgcgagaaaagaaagaagctcaaaacgatcggcagatgtctttcatttatttgggcagtgattggngagaaaaacgatatcaacaaaagaaaa

SEQ ID NO: 82625 - DNA, 730 bp, Heterodera glycines
atgtctgaagccgacccgaattttgtcaaaagtgaggcgatcagcaacggatgaagcatttgtgccatgagttccaacaatgcgttgactgaaatgatgcggcgtgagaagaaaaaattgttgggaaacgtcgatgtccacgggagcagattgttcaatattcgttgagcccgctatcgacttcgatagcgccttcaggcaaattctttaatcaattcatccgttttaatttaataaaaaaattcagttccagcgtgggaggacgaaatctttcgggcgccccacttcccaatcccattttggaacatgcactctcaggccacgtctgccctcgctcgtacaaacaacggactggaagcaactcatcttcattttatggtctttaattttttaaaagcaaattgaaaagaaacatttagaaaggcctctgtcaccaccccgccctcttggacttcatttgtggggttaatgaaagcatcgacagacaggtggacgctgcccgatctgctcgccatttcattcacaagcgacacaaacgatacatcctccaggatgctgtcattatgcgaattttggcggacgcgtcgtacaacaacaacggtgacatccatgatcttatgacggcgctcggtttacaaattgagggatatgcaggaaaattgaaggatttcgagaattttgatgattcaattgtccacgtcgtaaagaattttattgaatgtttaataaa

SEQ ID NO: 82626 - DNA, 1588 bp, Heterodera glycines
gttgttcaagggattttggtcaaacttcatcaacccgagaccactccactagctccgatcaccaatgaagaagtggacaacaatcagcagacagacaatggcaaaaatgccgtagaaagcggtggcaatgcttcatcttcttcttcacctgcttcaacagtgccactgataattttggcactgattttggctgtgctggtgttggtcagcattttttggatattgatcaagcgggcaaaggctggccaagagaagcagaccgatcatgccaacggcaaaggtgggtcggggcaattagcacaactcgcgaggcaaactaattaattaattgatggggacgctaaaatggcataaatttgggtccgaatagcacgcattttttttttataaaggaaattcaaaaatccatggaaattttttttctgtttttttggcgtgagggagccttcgcaattttttttaaattttattaaatcttttaaaaacgatctgatagatttccatggatacaactggaaaattcaagaaacccaaagaaaaattaaaaatttttttatgttttttttgccatgaggaagccttcgcaaattttcaaaatttattaaatttttgaagatttcacaacataaaaggggtatttgtgaactgtcaaaggcgcgcaaacaggaaaaatttaatccatttatccgaatttttcccagaaatcaggtgaacaatttcctaattttgcgcgattcaaatattctatcattcaaaaggagaaaaattgtttaagatttgcgcctagaaaattgaaattttttaattttaaattttttagccgtccatttgccgtcgccggccggcgattcgaccactccaatgttggacatgcgtggaaatgccgagcggacaaccgccccggacactgtcggcatggcaccggaaaatggcaccgcgggaaggaactgattttcattcattggcattttgttcattctttggcatatgtccttctctccctgacaatatgctgaccatttttttttgtttaatacatacattttttgaggcttccttttttgtcatgccataattttttggcaattaaatttcaaatttttcttttggaaaaatcagattttttgatttttcatttggcttactgtctctcttttttcttttcattctcaatttgggttcttcttttgctatttaattttttaaatcaaatttcgggattttggtctcgactttttgttctaattttgcctgttttacaactgaaaccctccgacttttttagcattcattatcactattattacattaatttacactcctaaatatttaaaaattaatatttcaattattttgccacgcgccacccttacgttgtgaccagtcaaaattaattaattctgaaaattattttgatttattttaaatgattttttttatctatctttgtatcaatttatgggcagttgatatcactaatatttaggtgaaaatataatttttccagtcaaaatgccaaatttggcgcccaccaactgcccatccaactgaaactccattaatttgatttttattttattatttttaa

SEQ ID NO: 82627 - DNA, 1655 bp, Heterodera glycines
atgccacctcaggacgaagcagggccgtcatcatctgctgcatcggccgaagaagcgatggagacaccaccaccaactccagcaccagtgccaacgccggagatggacgaggaaaaatttggaacagtatggtgctcttctctggccccaaattgaccaaatgaatgcattgatcaacagaccgattaagtggtaaaaagggtgaattttttttttaaattgtctgaaggtttatcggaggtgatgtgagctttgtgtgagcactgatcggtcattgcggatcagcagtgacttcgtttccatcgcctatctgcaattgtcatcttgatcagatgctcactgaaggatggcaatgtcaaacccggacaatcccgcagacaacgcaacagtcagaacaattcgcaaacgcagtggaaaacggagagaaagcaacagccgcagttcggtccagcacgatgggaattgtcaaggcaccgctcatgaagacaattgaatttgatcggattattccagcaccgtttcacgtgttgcaggggttgggaaacgcacttgttcgtgaacttgagcagcaaactgatgccacaattgccgttcaacaatttctgcgacagataggggctcggagggaacaatttcgtaaaaaggacatgacgggaaataccataagaaaagtcctcaaacgtgcatcggaaatggaacatctctttgaatcgacatggccaaagacaatttgccaagctcttatgcacttaggccaaatccaaaatttcacaaaagtacaaattttgagcaaataactcccaaatttataaatttaggctcaaccactttcgccaaatgacttggacgcatttgaacaccaaattgaggagttccgtggttttctggcccaagaacaacggatgcgcgacttcctatctcagaaaccgaaggcccacttatttctcaatcatttcgtcccatttgctcggcaacactcttttctcggcttgctggacgagcagggtgggcagcaaaaattaattgacgcaaattttcataaaaattaggggatgaggcgctgcattcggtttggcgaagactggagcaatggtggaaatgcatgccggacgcggaccaaattctacaacaattggagcaccattttgtcagcaattggctcctcgacaccggcagaattgctgagatgaagcaggcgagttttgagtggcgtgggaggggttaattttcccagaaatcatttgaattaaacattttagaggctggaagaccaaaaagaaaacgacaattttttggagcattcggatggtgaaaatgaagatgacgctgtcattgatgttattgggtgatcaaattttgttttgttttttaaatttacttaaaaaaatcttagaataatatgacttaattattttttctttattcgttgagaaaaacgtgaaatattgcttaattaaatatataactccggtgggattgaacctgggactccctttttggtggcaaactcacagaccagtaagacaaaaaatcaattagtttttgaactgggggctcaaaattgactcggtgtgtatagcatttggtcatgtaacatttttctcattaagattagtgattttttgtcatatagcatttttctcagtccaatttga

SEQ ID NO: 82628 - DNA, 462 bp, Heterodera glycines
atgccaaatcaaattttttcgccggggtttttgaccattttggagctgggcgaaatgagcttggaccaagaattgcaacgtggtaaaacaaaaaaatcaaagaatcaactgatcacaatggtaaaagatatcgtgagcactttggatgttttgcacaaaggttattaactaattagtttattaattaattgtcaataatagagttaacgattctaaattaaaattatttaattaatgtgaataatatgaaaaactgttcaaagacaaaaaaaaatattgtaattacttgaacagaataattaattattttaaatttaatacatgttcgatcctttccttactgattttatcgaaataattttaatttgttttttaagttgcaatgcatttggacttcaagccgttaaatttgctgttatttaaaaaactcagtcttttttcttccacagatgtttcaataaa

SEQ ID NO: 82629 - DNA, 250 bp, Heterodera glycines
gcggtcaaaagcagcgaattgccatcgctcgcgcattggtgagacaaccgaaagtccttttgctggacgaggcgacttccgcgttggatgcgcgcaacgaacagctgataagggagtcgttgtccgcttgtgcgaagggtcgcaccgttctgatgatcgctcatcgcctttccaccgtaagacgtgccgaccgtattttggtgatggaacatggccaaattgtgcaggtccgaaataggaaacggttgtt

SEQ ID NO: 82630 - DNA, 383 bp, Heterodera glycines
  unsure (1)..(383): unsure at all n locations
atgccgggcagcaagtaccagcaactgttgctgttcatcgatgaattggggcgtgtcatccgtaaatttttttttttttttttgggaatttgaacgttttacatgcttttttcgacaaaaaaagaccccaatattaatttcccttaaaaaaaaattaagttnccattatgcaattttttataaattttttagtgatcagcgaccccgaaaaccaacggaattcggctttagtgcactttatgagtccaatcgagttttatgagtccaatctgacttttatgagtcccatcgagttttatgagtcccaatcaaatatttatgagtcctataaaaatttatgagtccaatcatttttttatgagtcccaatgattttttaataaa

SEQ ID NO: 82631 - DNA, 2297 bp, Heterodera glycines
  unsure (1)..(2297): unsure at all n locations
tttcgaactccgaacccgagttcgaacaaaaagtcaaaaactcaattttcaactaaattcaattttttttttttgcacaaagagattcaattcgaattcggagctaggaatgggtcaaaacagatgccgaattcgtgattggcgaccccgaaaacctaaggaaaagtgttttatccgactctataaaaattatatatgttttttaaattttgggggacaaaccatataagagcccccctcccctttacagtgcaccacaccaatcagaaattgcagcaatcggcaacctcagcggcggaaggtggtggcaaattttccgattttgaggatggaagtgacaatgaattgttcatttccaccaccaccatcaacaacaatgatggtgataatgataatgatgaggaggaagaggagggaaaggaagcgattccatggcacgggggcggcaaatatgccaaatgttttgagcaaattgtcagagatggcacattggtggccaaagtccggtgcctcatctgtgccaaagaattgagcaccaaaagccgaacaagcataagatattttaatgcaaaaaaaaaaactagggcctcaatttttccaactctaaaaaatttgggccgattttaatttttttttttttttttaaacgggatatcttaatgcaaaaaattaaaggcctcaatgtactcgctttttgttaattcaaaaaaaaaatggggggcgggagcgagcgatgggcagaggaagggggctttatttagggggggaggggggttgccgaggtaccttattgaatttttttttttcaaattttacagtctaaaaaagcgtccgggtgacgatttttggatacacggagtttttacatcccccgccaggatggtgtggaaaacttagttcgaaatggcatttttatacaaaaaataatggaaaattttttaaagagcacagcaaattgcaccagttggttgccgaatcaggcatttttgaccattcgcaagagggcatttttgacggaatgatgccggaggcggttggcactgcgttagtggaagaacggacgccaattgttatcccatttcgacgccgggttacgaccacggaaatgatgccatcaacatcagcacaacagaaaatggtcctatcgaaattttgaaggcataataattggaaaaaatgaaaaaaaaaccagcatggggagggtggaaaaatgtgtccgaaaaaaccaaaaaaaaaaattgagaaacttttgtttaattacccctctgatatttgaaacaaatttagaaaagacgtccttggatcataatagtagctcacaaatttgaatgaatcgcctagccaaataccagggatgatattccaaggccacaaaatactttgggaaatcgaaattcagaggcagaggcccaaaaatttttcggaagtcggaattccgaggcccagtagtatttccgattccgacaccaaaaatttcgaaattccgtgccatctttgccatacactgtctggcataaaagcaatttaaatgaatttttaaattttataatatttaaattgtccattttaaagcgtagtcaatcggtggaggacgacattttgaatgatgaagagctgcagcagcagcaaaacttggcacattttgattggaacaaacagaaaattgaactgcaaattttggaggccgaactcattcagaaacagttgtccaatttccagcggtgcactgagcttggcataccagctcgtgtaaatttaaaaaaaaattaaataacgacatgaaagcctaactctctcttggcacagccttcgtttattggaatttcctaaaaaaagatttaagaaaatgaggaatttttttgaaaatttattgtccctcgtcacctcaatattgaaatacccgaaaaaaattaagaaaatgggaacaaagtttagaaaatttaatatctctaatacgctaaaaattaaaggtggcaaattttaaaaatttaatgtccttcgtcacctcgttattgaaaggtcccttggtcaaaattttgcacaccttttttcacataaaaatgaaaaattttggaaatttgttgaaattttttttttttggaaattctcatttgcacaggtccattttcacttttaaaatgaaaattttgaanatgttgaatttttttggaaattctccaactccatttgcacaggtccatcnttccnnggttggcatntgtgccaagtgggctcacaatcagncgaccggatggaaccgccgctttgccaccttttcaaatgcgcacgcgcttcag

SEQ ID NO: 82632 - DNA, 408 bp, Heterodera glycines
atggttgggcatgagaatgacaataatcagcaaccaaatggtagtgatcaggcgctgaatcggccatcgccggctgatcgccgccacccaaccgcccaatcgtcccaaaaagatggcgcaaatgggggcggcggaaggcaatcgcgcgcagttggcgctaaagcagatggtgccggcagcagttcatcaacatcgtcctcaacttcggcagtcgttgagcggggttcgctttttgccgaaatggccaatttgtggattttgagggcaaagattgaaaaaatgcctgtggaaattaatgcttacctgggaatttttggaaattttgagtgaatttttttttaatgctaaattttctaaaactgccctttccaatacaattctaaatgtttccaacattttttgttaata

SEQ ID NO: 82633 - DNA, 114 bp, Heterodera glycines
aagacggccaaatttctcagcattttggagcagttcacactgtgcacaatgtcccgcatttttggccgttttgtcggcacttatcccatcgcatttctgatcttctcactgatc

SEQ ID NO: 82634 - DNA, 1034 bp, Heterodera glycines
  unsure (1)..(1034): unsure at all n locations
atggagaaacgtnggaagaggagaaaaaggatgaaaatagcattggggaaggaggagagacggaagagaaagagagaaaaaggaaaaattcgacggaagaaggagggggagaaagaggaggaaaaggatgaaaatagcattggggaaggaggagagacggaagagagagagtgaaaaaggaaaaattcgaagcaagaaggagggggagaaagaggaggaagagagaatgaagcagaaaagagggaggaacagcagcaaatcgacactttttgattttgccggtgctaattgctaatggatgtcgtaaatccccgtcaaaatcctgaaaactacacaattttcgaaagaaaaatgcattcattcgattacacataggcaaaaaatttatgttgtggcgtgggttttgcaggagcacagcttgttccccaaatcccattaacgatttaaaaaaatcattaaatttctcagggaatttccggcaaatttcaaacaatttattacaaatagagattcttagaccccctaagaatcggtcggggccgttttcgcgtgagtagctgttcaggactggaattggtcggatttgtgcaaaacatccatgtttcgaatccgaacccgcattcggacaaatttcttaactttttaatttttttatttcttgcggctaatatcttctacagtaatttgtcagtttggtcggatgtgcgtcaaacggaaaaaatatttaaaattttataaaaatataacaaaaaataacaaatttcagaacaaactaaggtcgcatttcatagtttcgggaaacaccagtgagaaaattgataatgttttcgggattcacattggcattggcataattgtgatcattttgggggaggtgaatgttattgatgtcgttatagaatgcgccgtttttgcaaattttttctcctccaccggcagaagaaacgggacaaagcatcacaaatgggccgtcttcttctgacaattagtgacggacaaaacaacaaaaacagtgatcagcagcagaagaagaa

SEQ ID NO: 82635 - DNA, 961 bp, Heterodera glycines
atggcgcagaaactttgcgcaacacaaccgccgtcagtggaggaagtggggacaagcgagagtgggagcgagtcggcctcggactccagctattcgttttcttccagtggtgagtttgagtgcggggcggggaagggcacaatttcaatttgtatccattaataaaactgaattttcagattcagatgagagcgaacaacccgccgggcatggaggaggacgttctcagacgccgcgcgagaagaaacaaccgctgaagaagaaggcgccgggcccgagcagtcgcaatcctggtcgacgcgtgaagaaaccgtcaacgaagaagtcgcctgctccccgccatgcaaacacctccaccaagaagcgcggacgtcctgccaagaaagcggaacaagccaaaccatcggacagcggaacagccgccgatagtggccgcgacgacagcggacgtgagttgaatgggggtggggaatggcacaatttcaattgtataatcctaatgaaattgaattttcagattccgaagagagtgcctcggggacgaagaagaaaccaactcgcaagagcgctgctgctggacatcccacgaaacagaaggcgtcgcgcggaggacgtgcgggcaacaagaaggcgcaggaagaacgctctgaatcgtcaactgaatcgggctctgatcgcgaggaggatgaagaatgaatgagccagccggagaagaatgctgcttcacgagaccaccgcgataataacactaaccccaatttaaaaaagagaaattgtatctctatgtatgaatatgtatatattgtatgtccatatccctgtggcattgtcttgctgaatgtaattctcccataaatgtttgttgttctatttaactatgccatatatatgtgtatttttaataattgtaatatgtttgccctgtttatgcatgtttatggtcatttattctcattgccga

SEQ ID NO: 82636 - DNA, 128 bp, Heterodera glycines
cgtaatcacgcggtggcggcatccttttcatcgattacgacattcatttaccgtagcaatttatgccaatgaactcgctgaacatgggcaaagaagtggccaaacggtggatggccagcaacaacaga

SEQ ID NO: 82637 - DNA, 743 bp, Heterodera glycines
atgtccactttagtttgtggggtaccatcagtaaatgcattgggtgagcaacaacggatttgatgaaatttttcaagaaaaaatcatagaaaatttttttcttagaaaactcgaagaaaaacaaagttaaaaaaattcccagcgatttttttttgaaaaaactaatttattataaaactgaaaaaaatcgcttgaaacttttttgaattttttttttcatcaaattttcttagaaagaatttttataagattttttcttggccgagttttgtcctgctccgaaataattcatccaattcaaatttcactaaattttaggccattgtcgccaccagcggaagaaggaaaagaaaaagcggacgaatgaaagcaacgaaaattattaattatatttaagaaatggtcaacgatctcaaccaattggattcggatttgatgagaaatgctctctcactttcatttgttgattcctttatttgaattagtgttgttactcatttccgcccgaaattgacataaaaaatgtttttttctgcggcgtgctttttattaaaaaacttttaaatgaaaaaaaattaacaaaaacagaaaaatccaacacttcaccatacctacctaattttaaatcttggaagtttttgaagatggactctgaactgaagacttcaattttttgatttttgctcgggaatttggtacttttgttttgtgagttccccccccccccgagattttcaaataaa

SEQ ID NO: 82638 - DNA, 186 bp, Heterodera glycines
agaatggcgcccttttccctttcgcccgtcgaccgaatgcgtcaaagtgtgttccgagttcgaagtcgtcttgtcgtcaatttgttgtccgaggggttggccacctttctgctgctgctggtcggcaatggcattggggcacaacacattttgggaggggggaagctggacaattacatgcaggtg

SEQ ID NO: 82639 - DNA, 1047 bp, Heterodera glycines
atggaagagaatgacttgaccaatttaatgaacgcaaataatacggtaatttttttcggaattttaatttaaatttctacaaaaaattactacagttgtatttgttgtaccgtaatgtgtatccatgttggccactcataatcggggcaattgcaatcaatttggttgccatattcggaatggttgccaattttggggtcatttggacaacatttcgtacaaagtgagggacgagacgtctgctgctatatgagcttgcacaatttccaaaaaacttaaataaatgtctaaaaatctattccgataattaattataaaatttcaaacttggcggtactgaatcggttcgcgacgaactgaccccaccccggggccaaaaattttaatgcattttttcaagtaaattgaaattatttttttattgcacccccttaaaaatgtgttgttgcccatcatttttcaggtctctccatggcactgccaatgttctgctcgcactttgctccttttttgaactgctccaccagcatggccatttgctgttcctttacgtggcactttctggccacaatttcattcccctttcattggccatcaaaatttgctcgatttcactgtttgctgtcagcggaatttcgctaatcatggcattcactgggttggaccgactgttgtgcgtcctcatcctggcattgtaaatttttcaaaatttttgctgagaccggcaacaccctttttggcgtttatataaaattcgactaaaatgggcctaatttaccataattcggtcaatcgatttttaaaaatggaaatcaaaaaaaaaatgaaaaagtttctttggggttttcggataccgagacaaataattaacgaaaattttttagtccacgaacagtgaagaaaattccgtatcttggcacaatcatttttgtttgcgtgtgcatttcatcacacaatcttttacttgtctttgaatcaacatccaaaaagccacttttgatggtcaccggcacaattggcgatctgttaattgtatggccattttaa

SEQ ID NO: 82640 - DNA, 606 bp, Heterodera glycines
atgcatttttatgatgagaaaaaacgtgaattcattgaacagtttgatgaatttaagtgcttatatggccaacgaaaacagaatgaatttgtgaagaaattgggcattaatacaacaacattaagaaaatggaaaaaagaattggtgcctcaatatgttaaaagtaacagattttttatatttttatttttataaattttcatttaagcaccatattccaacgaggacaaattaagaaaaataaaagaatatttcaaaattaaagaaagaaatgcgaagattagcgacgtaaaaattgcaaaaaaattgggaattggaattgcaacattaagaacatggagaaagaaatttgattcagtttcggagatgtgatttttgagttgccaattgtttagtaaattaacattttcctattttaattattttttggcatatgcttttcctgttattaaaaccaagatttccatttattcattgattttttgaaattaaaattatattaagttgaataatatcaaaaaaattttatctaatatttataaaaaatattccaatagaatttttgtgaagattgcttaagataatttgactaaatcagttaataaa

SEQ ID NO: 82641 - DNA, 1268 bp, Heterodera glycines
atgaatattccgttgactgatgcgtttttggggagagtaaaacggtgagtgatcactccaactgatcagcagcagagagttagtggtgttccgtggcccatttcgctcactgccattttctcaaagtgactcatcaattttcggcaccatcgattgattacattattctctacaactatttaagcaatcaggcgaatgattttgcaggaaattctactttttttttgcaagtacaacgcccaaaataggtccggtgatcagaacgaaacaccaaaaacccaaaaactcactcaaagcatttcagagctttttgagcagcacaaattattatttttttttgtcttcatggttatgaagaaatttgtgtctaatgaataaacggaatttttaatgaattcaatttaaacgttttattgatagtataaatgatggaacaaaaagtaataaaaataatttaaaatttaaacaataaatgcaagcttttgggtgaattaaattataaaaataagtaatgcttgggattgttaagagagtattaaatcaattcttattaatttccgcctaattacacgcattcttttgccaccttccgcacatttggaggcgaatatgaccaattgcagagagactgtgaaaaaagagaaaataaaaatataaaacaaattcattttaacaaaaattgcacctgaataaatgcagaaacgaaaatgatcaaattcaaaacggagacgcagaaaagtgaccacctgacaaatgagcaaagttacagaggcaatttgataatgagaatcattaggaaattaaattattttattagaaaaagtgaaaatgaaatttttaatttaccaaatgaggaagaaaatcttctcattgaaccaggtgatgcgcagatggcattggacgaacacgttcggagcaaggacagagtgacaaatgatcagacgggggaaaatgggcagatccttaaaagggcaaaagttcagtgattaagagagtatttttcggtgtcttcaacaaaaaacggatttaattaactttctaattaaaatttaaaccaaagtgccgaaagtgtccgaaacaaggcaaaaaattgcatatagagtaaaactactgaaaacttgacaaagtttcgcgctttatctttgaaatttataagaaattttgcttagataaaattatgcgctttgaaaatacataaatttgctgaaatatttgaaataattgctaaacaaaacgattatgtttttaaatcggatttgtccttaaaa

SEQ ID NO: 82642 - DNA, 764 bp, Heterodera glycines
atgaaatgtttagtaagttaatctttttccaaaatgggatgtgagcttcgtttaccattcgtttccgcttttatttattattttttcttttttttttggcttttcccaccgcttcaaattttgcattttgggcattctcatcgctcttaatttattctaattttagcattcatcaaaaagcaaaaccgacgattttgggttcaatgtgtgcgaagtgctcaatgaggacggaacaacacaatcgaatcaccaaaacaattcagcaatttttttctacgaggtaaaaatgattaaaagaataaaataaataataatatgttttaccaattttgctttattagttttacctcaatttgttaatatgttcagtttttgccggtaatgcttcttatccaagcggcacttttctatctgccaaaatggacgcgggacaaattgcttcaaaactgtgagtaatttgttcagtttttgccggtaatgattcttatccaagcggcatttttctatatgccaaaatggacgcggcacaaattgcttcaaaacggtgagtgattttaagaaagtgcaaaaaaaataaatcttcgaatttaaaatatttaaatctaagtttataaaatttagcttgtttgttgacaaatgccgtggcacaatttgtcgtggttaacgcattgaccggccgagggcaccgctggtggggcattgaagtgggaaaagcattgctcaatggtgatgaaattaaggtggaaattgaagggaatgactaa

SEQ ID NO: 82643 - DNA, 1094 bp, Heterodera glycines
atgaaacggagcaaccgcttacgcaagtgcaatcggaggcgcgccgagaatttcaaagcgtaagtaaagccgacgataaattcaaagtgtactttggcacactttgaaagggttgacaaaatacaatttataaagtctaaaaatttaagaaaataagttcgaaaaagtctcgacctcgatcaattgagttaagcaataacaaaaataaaactttagcttttatttttcaaataatttttcctttttttttggtttgatgaattttttccttttctatttttttaaaatttctcccagatgatttaaattttgaaaaatcatccgtcatcgaggtgggcactgctgatccgctgatcagtgaagccctttggcttggttaatcagtgatcattgctgggataatgcacttaaacatgctcatttgtcagtcgcttctaatgtggtgatcaattacgctttgatgtcaaaatcaatgactggggcagaagtggaaaattgtgccgaagtgttgtcatggtttaatgaggtccacgttgtgcggccgcttcaaagacagtgagcaaaagcacattgatggagagtttttgagggacaacaaaacatttgagcaaatcgaattggaaattttgaaaaaacaaaaaattctttttctgtctgagttttaattcagtaaagttcttccgtttgggaatcaaaagtttctggtccaaattcactacaaaatcatacggaatcatggccctaaactcggcgtgggtctgatcgcttatttatgcttatgcgttgaaattaaaattgcttcaaataacggccaattaagcatcaaagatcaaagatttcttcggcccaatccgacgtaaatgatgatgccattaaatgtaaattcactttaatctcctgcttttaattgatccgatgaatgaatgcctcacattttcattccccccccccccccccgtcggttttccgttttgtctttgtcccttccctttccatcgtttggtccgtcgaatcgcagcaaaatgcaaatgcttcgactgctgtaaattcaatgaatggcaggccacactgacagcaaaaaatgaatgaataaa

SEQ ID NO: 82644 - DNA, 722 bp, Heterodera glycines
atgttgaatactacaaaacaatcagaagcagataactggcagacagagggagaaggacagcagaacgactttttgttggcacaatcattggaaaattccataagcagcgaagaggagggactaccgtacagtcggagcaccatacaccggcggacgaattacggtagacggggaaagcgaatggacagaagaacgggtgaacgaaatccactttcactagaggtattgtgggatggaaattgggaggaaaaggaatttgattaaataaaaaaaaattaagggtaataaaataaaattggtggacgctgaaaatcggaaaaggcaaagggagaaacaattggaaaaggccaaaaaagaattggaaaatgtgaacaaaagctataaagaagcacagaaaaaagcgaaaaagtgaatttgaaatgaaaataaatgaaattaaatttaaaaatgtttaaaattaattaaatttaattgaaaaagtgtttatttgacagactgatcaaatacttggaaaaagaaggcgacggtgacaaaaaaaagaacactctgcgcaaagtgatcgaagaaattgagaaagaaaaatcatttgaaaatgaggaccaagcacaacgcttttacgtggccgcatttgacaattggaagcaggaaaccttgacaacgttggtggactaataattgatggatgaaaaataatgataataataatactaattagaaataaa

SEQ ID NO: 82645 - DNA, 858 bp, Heterodera glycines
atgaaattgaccatcaaccagagactgggccaaggtcagcaagcgtacttgcaaatgtgccgccaaatcgggctcggagaaaccggagagcacttctggattcctccgccgttcctcgttaagagcaaggaagagctgatagattatgtctatcctaacttccaacaactccttggcaatgacaaagagctgctcaatcgtttgattctcgctccgcacattgacacgtgtgatgaagtcaacgagatcatgatggcgaatgtgccaggtcaagtgcgggaatacttgtccacggataagccccttgacgaccgcccactggacatcgatgagatcgagtccgaagtggctgcgttgaaccggcgcacagactcgggcatgcccccgcacagtctccggcttaaagtcggatgcgtcgtcgtccttcttatcaataaaagtgataaggaaggactgatcaatggcacacgcatagttctggaagaacttggcgatgatcgcctcattggtcgtgttatcaatagcaatgctattggcggccaagtgagattctttcttgaaagaacacgaaatgtctatgaagacaaatcgcctggcggcataaaatatgagcgtttgcagttcccaataaagcctgcattcgctatgaccattcaaaaaggtcagggccaaacaatccgcactgtcggcattgatctggaaagggaagtattttcccacggtcaattgtatacggccttctctcgggcaacagacggaaacaatgtccgtgttcatgctcccaaccgggaaattgatgcccaaggccgagccaaagtgctgaatattgtagctactaatatgctcaagttacaataa

SEQ ID NO: 82646 - DNA, 853 bp, Heterodera glycines
  unsure (1)..(853): unsure at all n locations
atgccaacggagctaatcgaagagaaaagtcagctgaagcgaaaggatgtgccaaatccggaagatctctcatatcaaatcgacgcacgcgacgaggaattgtcaaaaagtttgccggcggcacaaacggacggcactttgacgtccaccgaatgcgatgccaacacctccatcacaactccgtccatttcggccgacctttgggcggccgcgcaacaacttagcacctcactgcataataacaataaaacctctgccgtcgcatatggaaaaacgtcaaatttggaagtgaatttgccggcacttcctccgattgtttgtggacaatttgtcatcgcactgcttgaactacccgaacgggtgtttcccatttatgtcgacgaacattccgtgccttggcattggttgcacgccgccaaaaacgaaaagcaggcgaccgatggccatgagaagcgattgatcggcaacgaatcggaggaagttcgtttgtttggcaaaatatcccatgttttacctttgctttctgaagagactgttcttcgactgtgccattgataagctctgtcccttccgtgccgtttgggtgcgcgagcgttcggccgtttatcaaagccaaggccacgcccactccccgctgttatctccccagggattgaccgttcaaaacgctccgatcactcccgaccgcgctcatctccttctaccgatcagtgaaaacgctccgatcactcccgaccnctctcatcctcttctntctcctcaacgatcaatcaacgtctcttctcanatcactnatcaatcgntgtgtttctccaataatatcatttttactccaatctctccccatttccaa

SEQ ID NO: 82647 - DNA, 883 bp, Heterodera glycines
atggcaggcgatgaagcgctgtcactgctgcggaggggcaattcgttttgggagaagggcaccgccggtcgggaaatggtcgacgcgagcacgacgatgtcggtgagcgctggaaggaaacaacagcagtcacaaaaccgttcagcgtcgctcctcctccgcctcggggtcgttttacttcaagaaaaaagtgccgagagcaacgagcacgacagatttggcacaaatggcaacaacgaacactcagaaaatggcaaagacattcaatcagcagaaggaggaaggacagaaaagagaagaggcacaggacagagccggaagagcagagatagaacaaacgatacaacgcatcgtcaaggaagaactgcggaaagtgagggaagttgggaaagagagacaaggggaaacttggagaggagggcagggacacgcagaaagtgcagggaatggagagagtgcgagagagaaagaggacgaagaagctgaggaagaggacagagaacaccagcagaacattatgcgaaaacagcacaatgtgacagccaagttccgtgccaaacactcggcgagggaaagaacggcacaaacggacggtcaaacgaacggagagaacggcaagaaaagtcagtgcccgtccaatcactcaactttttccattgagcagacagtgaaaaagagcttgtgaaaaaagtgcagcacaaaattgaggagggcggcacagaaggaaagcgaattcggagaagaatgacgccgagggggacagaaagagcggaagaaaggggagaagaagaagtgggagtgaccgaactgcacattctcgagcagggactgtacccaccgatgccgcataatcagcagcccatcggaaggatggccgaattcg

SEQ ID NO: 82648 - DNA, 1676 bp, Heterodera glycines
atgcgcgtccatttcgtgccctattcgctgatgaaagtcaacccgaccgcgtggctttcccaagtcacccgccattcggcacaacattccgttgccaagtcccgtgacttgcactggtcgctgatggcgatcggcgaccactcgcaacaaattcaactaaaatcacttcgttgccttttggtagggaatggagaatcactaaaagttttgcaaaattctttttaaattttattttaagaactgttttccccggaagaatttaaaaaattattatcaaaaatcaaaagttagaaatttttcgaatttcaagaaaaatttttgaatatatttttagcgattttttaaaaaatttatgatgaattactaaaacttgcaattgaacatggttaaatatttgttaggaccaaaactttattacccttttttcattgtttttgattccaattatttcccccccccccatcggatttgttcaactttttttttctaacccccttcccaaaggtggcggatggtgctaacccttggtctctgtcctcgtgcgatcagttcatcgtcaccttcaaatcgcacggcatttggcccggtgcactttgtccatgcgccggctctgccgagactggcattgtggccatgcgtcggcccagccatcccgaacaggtcgcagttgcacgcaatggcggcggcacaacaacgacaaattgttccaccagcggtcgcggagtgctctcaatgttggccctaagccattgcgtggtccgtgtggaccaggagaactcactgacttcgctcacactccaagtcggtgtctgttgaattaaaaaaaacggattttttgcgcattttctttggaatttctggtttttcaagggtgagcaatgggaaggggtcatcaacaaatcttgtgggggataaatttgcttggaaggaatcacaaattcataataaatgcactaccattatctcatttgttctctcatcttcaggacactggccaagtaattcccggaggaatggccgttgtcgtcaaattgtgcggtgcgccgcggttgtgccgagcggacgaagtcggcgagatttgtctgcacgcaccgtccgccgccgtttgctaccacggcctcaaagggctctcccaaaacacatttgctgtgctgccgctcggctccgacgacaaacccattggtccgctggagtacgttcggtccggattggccggctttctcggccccgagggactcatcttcacggtcggctgcaaacagtcgcttctgcacgtgtccggacgtgtgcacagtgcggacgatgtaataataaattaacactcattatactattttaaatttaggattctttcgttttttaagatagccaaagaccgaatgattttttttatgccatgaaaatgttttcagttgattgccaccgtgctggctgttgagccgatgaagttcgtctaccggggccgcatcgccgtgttcagcgtcagcgttctgcgcgacgaacgcgtgtgcattgtgtgcgagcagcgtgcggagatcagcgaggaggaggcgttcaattggatggtgcgcgtgctgcaggcgtgcgaatccattcaccaattgggcatttattgtcttgctctcgtgccgcctaaccatttgccaaaggcaaaagcaactcgcccatttaaataa

SEQ ID NO: 82649 - DNA, 1944 bp, Heterodera glycines
atggataaaataaattggaaattacgagaaattgatcaacagaagagcaaggaaaagcaattgacagaatatttggaaagtggcgaatttaaatttgctttacaaatgagcgaaaaattcacaaaattattaccaatggtaaaacgatttaaggaaaaaacaatgaaagttgacgaatttatggaggaattggcaaatatccagcaaaatttagaagaagaattgcagagaaatgaacaaaatgaacatttgttcaatttaattacggtaattgcgcgaaattttggcggagttttcgttaaaattggcgatatacaccaaattgaaatttgttttgatggagcgcacaaaatgttgcaaaaactgtacgatttggccatagaacgattagtgaaggaaaaaaagggtgcaaatggcaatgacaaacaatttgaatgtcgtggcaatgacaggaacagttttaaagcggcaatcagagagctaacgggcggaaatacggcacagagtgccaaactattgcagtatatggacaaattcgtgccaaaaagggaagccccgtcgcatttgatcaattcattttttacgtttgcgacgcgacttgaagcatttttgtacgggaaaagcagcggcgatgccaatggagaaggagaagcggatcggcaagcagaggaggcaaaagcaacgaaaatggcacagccgaggcacagaattggcgcatttattgccgcgacgcaatgcctcggcatttcggcgacacaaatggaggagaggtaaagcaaaattggaagaaaaaactttattacacttggaaatcctgtaaagaaatgagcaagcttgaaaaaattagcctggataaagtagcaagcaaaggcttttgaaaaaggcttggacctgcataatttacctcattttcaccatttccacggaaattttgaaatcaatgctttaataaatttgttttagcatttttgactcaccaataaaagttgcaaaaatcaattcaatcgaggaaaagcgagcgccgctattcggaataataatagaaaagccgagagcagaaacggaaaagcaatggataaaagcggcgtgcaaaagtaaggcgacaagaaataaattttttttagtatttttacaaaaagatcaaattttatatttgctcgagaaaattttactaaaaataattttttcagaaaatttttcgatccttaggggtcaaaaagaccaatttaactgaaggagtgggggcccttctaatagaggctttttggaaaaatgccaaaaatggacaaatatagtaaatttggacatatcgcgaaataatatggaaaaatatagaaaaaatggatatagaaatccatccgaagcttcaaaccatgctaaaaatatgtttcaggcctcccatagaccaggaaaataaggatttccatataattgcaaccctaatgatcacgttaaaattaaaaaaaaacctgatgaatcaatgttcaaaaaaggttcaaaaatagacattaaaattttttatttaatttgaatttttaaaaataataattttagacaatttcaaaatgttgaagcaactggaagaacataaattttcgatttacgatgcaattaaattgatcagaaaaattgaccagcaaatcgaattccaccatataaagatagaaatcccagcagaagtcatcgcattggtagaacaattcggcagcgaacaaaaatatctgattggatggcacaattactctaaggatgtttacaaaaaaattcaaaaatgccaaaatgcgcggttgttgcaaaaaatcttggcacgatttattgaaaagttgcgcaaaattggcattgacccgaaagcgcagatggtctcgacggatttgagcatcggcgaaacgattcaacaaacaattaaattctattgcgaggcttagtaagaattcagacacatta

SEQ ID NO: 82650 - DNA, 775 bp, Heterodera glycines
atgcaggcacaatcaccagttgtaagaccgatgaatcttctgcctagaacgataatttgaattaccgtagccaaaatgtaccggaaacattttatccatttaccatcatggagtgtatttctaaaacaaaaaccactttgcatgagtgaatttgaattgttgttgataaaaatgcaaaaaatattggaagagatttattagttccaattttgctcattttctaaactgtgtatccgccccctgtcacctaagacccaatatgtatcatggattgattaaatcccgggataccatgagaccaaaagagagaagcgaaaaacgcgagaaattagcgagtcgagaatcgaagcttagaactcttaatgaaattaattaagacatatttttttaaatcaagaacacatatgaaaaaaggggtgggtaaacagaaaattaatctcgcgggatcccgtcccgcaaagaattttgagttccaatcccgcagcgggatcctcaaatttgattttttgtgcgggattatgcgggattttattgattttttttttaaatttttctaagacagaatgccaaatatttttaaataaattaaataataaatttaattaaagttaactcatttttcatcgcaaatttcattcaaaatttgtgaaattttcccggcggcgcctatcggcaccgccggataggcttttacttaataatcctgtagaaattgagtcaaaaactgcgtcatttggtcaattttagacaaaatctgttaacaaatcgcattaaa

SEQ ID NO: 82651 - DNA, 2184 bp, Heterodera glycines
atgtcccgttattttgctttgataattattcctttcctatttgatataattttagttgttaaaagcgatattcaagtttgttataaaacaaataattaacaaaaatgattaattaaattattatttacttttaatggtaattaataaagaaatgcgatttaaaatttttttttgatttaggcaattgttaattaaattttctatttatgaatttatgttttatgcgtatatttttgtaagaatttattaaaatgtcagaaaatcaaatgaattaaagttaggagtttaagaccaaaaaaataaataatcatttggaattaggcgtaaaaacaataataattctattaaaaatgttaatcttgttatgagaacgttttatgaatttaatttctctcttataaaaaaatattatataagaaaatttaaaaattttaaggaggcgtcatttttgcatttaaaattgtgctcaaacattgacaattcgtttaattattcaaaatcaaaagattggcaaaaattggaggaatatgtgccgaatttattgccatatgataagcaaaaagaattttcggaatgggaaatgtgttatgaaagcatccaaaaattcattatttattgcaattttcttcaaagcagcaaaaattattattataaccgaggtaggaagaaagaattgtattttaaaaagaacaaataacaattaaattaaaaaaataaaataagattctgttaattaattacggccccgttttggctccgggaaatgcgtcagtgaaaattttactgtcacaaaaacaacttccttgagttttcaaggctattgatcatgaatccggtatccatttcggtcaattccgagccccggacctgaattcgaacaaaaaatcgaaagtccaaattttcgaatttagcatttttggttcaaaaaaggcataattgacctccttttgaagaattggtggctttcagtttgtttccgtgtattaaaacttattttgaaccaaacacactaatttcgaaaatttggactgtcgaccttttgttcgaattcgggtccggggttcgaacgatgttcttaaagaatttaattttagattacaatacttaatgctacaaaattttatttaaaatatttgtatcactgacgcattttccggtcatgccccgttttcccattagtcacggtcctaaccaattaaatgccaaatttttaattaaaaaatatttaaaatgtaaattttaagatttttatgaatatgaatttgaattcattgctctcaaaccggaatttgcatattcaaatggggacacaatgccaatggatgatgcgatgcgccaaattgttgaggcatataaacaattgtttgaaaggaaaaagaagaatttcaaattgaatccgttttcaaagaaagcccctcctcaagtcaattttgtcaacaaagaaaattgtgcaaatgtaaaattatttaaaatttattaaataaaaaataagtttaaattttaataaattataaattggaaaaataataatgttttaaaataatacagaaactgattcatacttgtatattaattttttcatagttctaattttaattttctgtataaaatactggaagatacagctatagaaataatatcgggtggcaagaatctgatccaggcttgtagctgttttgtttttgtttttttgaaaaatattaaaaaatgattaagcttgtgaaaccaagagagagatcctttagaaacagataaaaaataaaaataattatataatttaatattatttgaaacagatattttttcagtgaattatttataattatgtgtaggaaatatctgttttcgtttacctgtatgctgtagagaaaaaagacctgtacctgtctgtgcctgtacaatgtggatccagaaaaatccattctgggtcaagttacggtacagatcgagtttgaatttttattttaaatttaaaaaaagatatttcatttttattcaaacgtttaatcaattttcgttaatttattcaaggtgattgcctggtccgctattcatgtaaaagcagtcggaaagaatcatttggccaaagaaaacttgcaaaaagtaaaaaatcatttgattgaaaatacgccgttggcattggattttcctcctccaattgttcaaggtatcaacaagtggtga

SEQ ID NO: 82652 - DNA, 229 bp, Heterodera glycines
atgcattttaaaagtaaatcacctaaactagacaagtaccgatcaatctgctaatgggtcgtacgaatcactttcaatgcttttttgatttccaccaaaatgaaaatgcatgaatcgcaattgcttgaattgaaaatttgcttgatatttcagtttcggaagatcatttaatacaaagttggagagaattagtgaagtggaggagcagctaaagacaatctaacgaaaa

SEQ ID NO: 82653 - DNA, 93 bp, Heterodera glycines
ggcacgtctgctgaacattgtgccgaccgtcgtgttgtgatgatcaaaatgaccagccaccgtatataatagataaataccgtattttccatc

SEQ ID NO: 82654 - DNA, 957 bp, Heterodera glycines
atgtcatcattaaccacttgttcatcaacagcagaggacgaattttcctctgatgtgtttggacaaggtggaaacggtaggcaaatatttaatttttgggctactgtatacatccaattaaatttaaacattcagcagaagtgaatgatggtgggaccaccagtgtttctgctgacgttaacagcagaaaaacagcaatcggtggtgagaaatttcttttttttgcgtaaattttgaattctgaagtacaattaaatgcactttgaggaagactaattaattgcttcataaatcatagctatttattgataaaaaaggggaaatttttgatttaaaaatttcgaattattttttaattttcagacggaggaatgaagagaaaaatgacggagttgttcattttgactgtagtgaacattacggtaacagtggcactgatcagtttcattgccccggttatataaattatttaattaaatttgcggttattttcaattttcagattgagaatgggcgggtaaatgctgagttggaaagtttgaagaaatttgttggaaaaatggaacagcaacatgggaataatggttggaattatattattaataatttttgtattcaatattattccccaacaaaatcttatggagagttaaattatttatgaaaaaaagtacagggcagatcagaaaattattaatgctaaactgagactctcggactataaatttgagaattaataaataataatataaattaattcattttcatttgaaaaaatgtttagatggtcaacagactgaattttgtgccaaaatggacaccgaaaaagacatggtcaaagccattgaaacaaaactcaacgaattggtggaacagcaaaagaaagaagcaatctttattggcgttttgaaagaccgatttggaaatggtaaaaatgaaaattaaaaataatattaa

SEQ ID NO: 82655 - DNA, 222 bp, Heterodera glycines
atggccgaggtttcagcaactgatcgacctggtcttctgcattctgttggctcttatcaaaccgatcttatgcgtttttctttatcctctactgctggccttcattctgcaatacgtcggcttagacaagttataaatttttatgtgtgacattttttatttttaactactcagcacggacgacggcgacgatgcgcattggatcctcaaccattatactga

SEQ ID NO: 82656 - DNA, 2698 bp, Heterodera glycines
atggtcaaggcaagtgaactcacttatcgaattaatgaacagcacaaaaaagtaagagtcacagtttctgaccagtggcgagaattaacagacgaactcgagaaaaaagtagtcggagactacaaactgacatggctatgcgtcctatcatttgtaagtctagttctcttgattgattttctcttaaggtggcttccagtacttcttgaaacttacaccggtcctggatggctgggccgaataatttttggcgcaaagaagtcaagaggctcgcgcaacacgggaaacgtgacaattgatgaatttccaaataccagcgtaaccgttgaagatatccctttgcaaagcattccagggaacccaatgaattggccaccttcagtgtcaagttttcagaccatattttcatcttctgaccccacagcagcatcaacgacaaccaacgttgtaaacaaatcaccacgaaaaaggcttaggccctcttctgttttgcaaatcggaacgagcacaaccattttgattttgttgctgatgatcgcgttggtcgccatacctgtgaacgcagaacaagcatcggaatccgacttgaaagccggaacgggtatttttctcacactttcggatttgttggcactgcttggaatcgtggtctctcttggtgcaatggctggattcattgcattccatatgagtgtgctctcaaagagcaggagtttttgggctacggcctcatctaatcattccattatggaagaaattgttgctaatcatacaatgacgccacgcttaacagcgacagtccgttccctgattaacaacagaccagtaagctgtctggctgataccggagcaagtgtttctcttgcccggatgagtcttgccaatgaattgaaatgcaaaatttttccgacaaatcacaccgttagatcagcctccggacattggatcaacataacagcagcagccatggtacatatcgaaattgcaggtcagaaaatttttggcgaaataaaactcattcaggatgaagttatgagtgacagaagggattatcaagtcattcttggatgtgacttgatggcaaaacttccaccgattacttttgattttgttcaaggtctaatcagtatttcaggaaaatctgtaaccatgggagaaagaggtgacttgctttactccaatgtcaaagttgtggcacgtcatcatgttgacattcaaccaggatcctatagcatgctgaccggcaaacttgactcacaaattcaacttgatcaagttgtaacacattcactggatggacgactctccaaaatgcatgtcgggatgatctcaactgtcgcaaagcccgtggagggatgcatcaagatgatattgaccaacccaactgatgcaccaatcaacatttgtgccggaatgcacgtagcacttgccaatgaattgaaacaaagcgtggacggtccatggcttgaggaacaatcgcaagtaaaggaagccaatgtcaatccagaaattactacaaatgacccatcattcaaaatcaacttcgccaaatcctctgcaacgggtgaaaacctcaacaagctgaaaaaactctgcgttgagtttgctgatgtcttctcaaaatcccaatacgatttaggctcatgccttgtgggagaacatgacatcataacaaccacggaggatccgataactgccaagccgcgcaggacgccatttcgtttcagagaagaggtcagagatcatatgcagaaatggattaaagctggagtaatggtcaattctgacactccgtggatttcaaacattgttttggtacagaagaaggacggagggctgcggccatgcatagatttcagaaaactgaatgaaattacagtgcctgatcactttccactgccgagactagaagtcgttctcgagaaaattggcaattgccattggtacacctctttagacttgtcctccggataccttcagataagactgaccgaacgagccagcagaaaatgcggcatcattactgaagacgatgtctaccaaatgacgcacatgcctttcggacttcgcaacgccaccagtgccttcgccagagtcatggctcatgttctttcaggactggaagactctgttatagcctatgtcgacgatttcttgatttactccaaatcgcctgatttcgatttgcatttattggcactaaggaaagttttcactcggctacggcaattcaatttaaaggtaagtcccaaaaaatgtgtaatggcttcatcaaaaatggaatttttgggctttattatcaataaagacggatacacgcccagcttgggaaaagtggagatcatcaaagatattacagcgccgacttcgttgaaagaagtccgcagatttgttggaatggcgtcgtttttcaggaaacacataccaggattctcaacaattactgggccactcacaaagctgaccaagaaagacatgccattttcgtgggacgtcgaacaacatgaggcgttcaaccaaatcaagaagctcttgtctgaagatccgattctccgatttccggactattccaagccattccacatcttcacagatgcttcaacagttggacaaggcggagctctgatgcagaaagagcaggacaacagtgcatttcacgccgtggcctactgcagtcgcactttgtccgaagcagagc

SEQ ID NO: 82657 - DNA, 1111 bp, Heterodera glycines
ggggggaaggaggaacagaggggggcggggaagggaagaaatttcggcagcgccaaaatgaccgaccctccccccctggttcggtggcaccaaaggtaaatgccatcaatggccaaccaaaaagggaaatgccaatgaccactccgcagtttcttcctaccacttccccacctctttcagcgtgtcttcggcagtcccttcccctccaatgcctcctggcagcactgtgccggctcttctcccgaattccgtggctatacctgcggcctttggaccattttccacaccattaccgttcacgcttatttggatgcagtaaagggtcattttggggacctgataccatttaaagcattagttttgctaattggtgtattaatcggctgttgccctgttcagatcggctttccttcaaccctttgcttccgttgcgtgccattcagggatgggtcagcactttcttcggatgtgaacactgcagaaaacacttcatgaaaatgaccaccgaactctttccgatgaacgagcagagagtgagtgagctgacttaggccaatcaaaggacaatcatttgacaaatgacaggtgaaccgtctccacgacatggtcatgtacctgtggagggctcacaacattgtcaacgcgcggctgcacggcgacatcacggaggtgcttttttggccgaatctcaggagcatatccgatgggggggggcagtcacagagtcgtacctctcccattcctcggcaatataatggcgtgggtggggggaaagtttgagagagacggcaatggcaagacagacagttagagactgacgagcccaactaatggacagtaccaaaaatatccataaaaaatagtttttttgtttcccatgccccaaaaaacgtccggtggccattttccccaattttctatggtatttctcccccccccccccccccttaaggaccctcaattcgtcaaataccaattcccgcctctgtttctctgctccacgtgccattcgggtggccatttcagtcggcgacaaacgcgcaatttccttctccgtttttacgggtccattcgcccttaccaccgaacgcattcaatggccgaaagtcgg

SEQ ID NO: 82658 - DNA, 405 bp, Heterodera glycines
atgggcgacatcactttggacattataagtatggcggatcaacaccgaagctgggaactgttcgccggtcaaatcattccgctgatcggcaccacaaatattaccaagctgcacattaacagttcgtaagtgtacaatgataatcaaataaataaacaatttttacagccattctagaaggtgctgagccgttataaaaaagacatcaaatgaaaattttaattgttaatatcattcgatagccttaacaattaattttctattagcctataaaatttcaaaaaaattcacaagctttcaaaaaagttatggccaaaatttttttgaaacttggttacttgtgtacttttgggaataactttgttcaaacttgacgaattttttgaaattttataggataataaa

SEQ ID NO: 82659 - DNA, 1131 bp, Heterodera glycines
tccagtgacacatctctgaccagtctgaaggtggaatcgtttgtcttgccatacggcagcaaaatagctgcacacccaatgtatgccttaaggataacggccatcggaccacaagcagggctcggcttgtttccagcggaaacacttgaaaattggagcaagttattataacgcgacatgcgtcgcacaaactctttaccctgttttggttggttttcaccaacgataagctccataagctcttgagggtgtgggttcaattttggcaacacaacccttcctttttggcagcataggctgctgtcttcgtgtaggaagagaagagctccacaatgggggcatttgtggtcaccaagatttccggaatgagaatattccggaaaatgttttgctgcagcagcagcgcagtgccagccgttgtgcaccataaggcaacgttttgttaacgctgttgctggccccagcacattagttcgtggccgaactgttagtgcgggtgaaggcgaacggcttgatgatgccgaaagccttttttgaacacgcaaagaacgccctggtggcgttttcggcttgagaaatatctcatcgtcatgacaggagcccgccgctgggcatcttttaaccgcaactgttgaaaccgtataggaacggagccaattctccgtttttggcacacagaccattgttattgagctcaaacgtagccgaactgccctgaggagctcgtcctgggctgacctcatcagaaatgagttaaccggatcggatggcaacagagtcaggatcgtgcccgcggatcccgagcatttgagtcccgatggcgttcttgcgcagtcctccgagcgcagcatcaccgagatgggcctggatgaggacgaaatgccatgaagcaaagcagcggaagcaatgccattgcggcctcatgcatatgtgcccgtcctcgttcgggatttctccaggcccgggctgctgcgtgtgcccgtctcgccagctgtagtcgttcttggacctccctgatttcggcccggcatttctcgcgccctttttcactcggcttttcacctgatcagccgtcggctcgggaacatcccgccagtcaaacgattaaaaccctgaattggctaccgagtc

SEQ ID NO: 82660 - DNA, 415 bp, Heterodera glycines
aaactgattgaaattgaccgtttacctgaactgataaatttgcgtggacttcgaattcataactcggagagttcggcctctgaacgcctttcccacgtacaaaaaaatgaataaaataaacctattttaataattttatttttggacagattggcgacgaaattgtggaacaattggtggaatggaccaaattgttgcctttttattcggaattacctgttgaagttcatacttatttgctcacacatcgatgggccgaattggtgggaaatatttttattatttatttattttatttttaattattttttaaattatattaaaatgtaaaacaaattaaatttttctttttatttaaaggttttgttgtcaacctgcttctttgcccattgttcagctaataatgccagccaga

SEQ ID NO: 82661 - DNA, 1021 bp, Heterodera glycines
atgcccaaaaagtacaaaaaagcgaataaggacaaagttggtcttgctcttcctcctgttcctccaccgtctgttgaaccaccggccgcggcaattcagtacgaggatttgacctctgatgaggaattggactcaaaagccgctggaggcactgctactgctcatcctgttgatcagcagatggagtcgcttttggcactttcacccgaaaacaacggcgcgatgttggcactatctcctgactcggttgatcgtcttcttgaagaccaaaatgccggagaggtgaaacaaaatccagaaaataataataaaaataatttttaagtctgtgccaataacagcggagtccaatgaaaaggccctcgggtcgacagttttgaatgaggaagacgaatttttccaagcaaattcgggcgaaaatgaccaaatgaatgtagaaattgccaaaattgtgagtccgcttgaaaccatgggggcgctaattggggtcatttcccaaaaggatgatgaattggtcgagaaagggcctcgagattcttctgaaaaggcgaatgccggagagatggaagtggaaggaaatgaaaaggccctcgggtcatcagttctgagtgtggaccaagccgagaatgaaaatgagaaagcggataaaagcgagaatgagcaattttcaaaggaaaattctcgcgcatcagatgaagaggaaaatttcggtggtggtaagaaaatggtagtttgccaaattcgggaggacggagtcattgtgattgcttttggtcaagacgaaagagcgggattcgtctttgtggctaatgatttattaagtgaaatttgggaaacgttggccaggtcttcggacaccgcattgaaacttggggacataatttgggtcactaattggagagtgttgcagttaaacgaatcatgggattggatctccaactcaaaaaggattaacgccgaagccgaagcgacttcaattgcccaagtgacaatgtcactacggataaggacatcggcataa

SEQ ID NO: 82662 - DNA, 952 bp, Heterodera glycines
atgaggaatttttatccgcaccgcgcattgatattatcacattcaggtaaaaaacgaatacaattaaaataagagaataataaaattagtttcattttattataactaattaaagttgtgattaaatacgggtgccaatttgctgttttataataattagtgtcttatttgagaatataacctacgaaaacactctctcgcttatgcagtttttgggggttaaaggaggcggggcctatctttggtacaaaattaattcaaaattattaaataaaatatttttttgcgaaagaaaataaattttccagcaatttccggcctgtccggtgatggtcgtcgcaccttgcagcattggtccgatcactatgccgacctgttaatgtgccatttgcgcattaaccacggcaatatgggggcggcgcaacgttttgccgaaatggtccatctgattgaagcgctgatcttcagcgcaaaaagggaacaagattttttaacctatttggccatggtcactgaacagggccctttcaatgtcacgttgccggcaattttcacgccaatgcttttgtatgggaggccgaaatgaaaagtcgaacagaacaagaaaaaatgacatggaaaaacaaaattcaactcttataccttatcattatcacggtgactgatcacaattgttcgataaaatgctctttcatttttgaccccacactttgtggatcccccgacttttcagattttttgaaattttgcgggaaaatacataaagtttagagccattgaatgataccaatttaaattatttaaatcttaaattaaaaaagcccacatggcaaattgacttttttatttatataaaaatgggctttatttcaggtggagtgctctagttcagggggttataattcaatggtaactctggttaaatcagacaaaaaaatttggagtaaataaa

SEQ ID NO: 82663 - DNA, 786 bp, Heterodera glycines
atgaaattttgcctattattctctttaagtgtttttttgatcgtcctaattaatattaattatgttgggtcagtggataaaaaattggaacaaaaaacatttgatgaaatatttggagaaaaatgggaagaaaaagaagaagaaaaacgaaatgaactcaaaaaaagagaaataattggaaaattttataaaataaaagaaaaaattaagcaaaaaggaagaaaattctcaaaaaaagaatggaataaaattgaaaataaaataacgaaaaaattgctgacaaatcgaaacaaaatttatgaatggattaaagaatttggtcttcaaaaacaaataaagaaaagctacaaatcaaaaactgatgaagaaaaatttgaaattgtgcaaaaattcattgtaatgaaaaatgaatttaaacaaaaaagaaaatattcaacaaaagaatgggagaaaaattatgccgaaatttataagaaaattggagttagcatttcagtaattaagaaatggaagaaacaatttggcataagcaagaaaataataacgaaggaagaaaaaatgaaaatttattgcgaaattaaaaaagaaaatccgaaaatgagtgacacggaaattgcaaaaatgatgaaaattgatagaacgaacatttcaaaatggaaaaaacaatttggagaagaaataaatgagcaatgaaaacgtttaatccaagagggaaatcgaagagagcagagaaatgagacatcggattctgatttttgaatttctcttttttaaactaaaaataaa

SEQ ID NO: 82664 - DNA, 471 bp, Heterodera glycines
atgcccatcatcatttatttttcattaaattttcaacttgcgtttctgcttttcaatattgatatacaaggatgggattggcttctgtattacaacaaactctcaccttttccaattattttaccgtccgctttaaatccaatcgtatcattttgcaccatcaatgcttaccgtatcaaatttgtttcgaatataaaatgtttcggtatgtgataattagttgactgtttgattttcatttatttaattttttttaatttatgttgattatttaggaaaaagcatcaagcgattgtttcgcatgaaaattggtgatcaaaatgcggtttcaaatattcagatgcagcaacattagtagcaacaaaatcattgttttcacaaaatgcaattttaatttcgtatttatcctggcattgattttcaagaattgcttttcattaatgaaattattagatttaacaaaaaattaaa

SEQ ID NO: 82665 - DNA, 375 bp, Heterodera glycines
atgttcatttgcttttttccaccggctgatcacgcaatattggacgacaaatctgtcgcggaaattttgggcataaatctcgacgaccaaattattttggctgcatatgcaattaatgtaacggtaaatcaataaaatttaaaaattcgtttttttaatttaggatatccatttggctttaagtttatattaccttgtcattataagcacttttgcttatatcataatatttggactagcatattgtatcaaaaaattcttggacatgaaaaccaaatggtaaattaatttaaaattattttttattttaatttttgtgtttgaagcgtttcatcttcttctgaaatagccaaaaagatgattgaagtgaataaa

SEQ ID NO: 82666 - DNA, 1087 bp, Heterodera glycines
atgtctgatcagtctgtccaaaatcgtagcaccgatcaatcgccgcaacaagaagaagccgtctcccgaccgccggaatttacgccgtccgatcacactgaacccacacgaacggaacggatgaatggtacaaaacatcaacattgcattgatcaacaacgactgatcagcaacgtgccatgtctgatcagcacaaccgatactgatcaaaagggtgctgatcaacagtactattaccaccgaaacaacaatcctgatgttgttatccaacaacaacagcatgatgatcagcttggaaatcttgacggcattttgatgaaggacgatgacagcgttgagtgccatgccaaactgtccaccgcttcatccgccattgtgtttatgccgtcgacgccaagcgtgattgccgcttcgtcgttggaaagctgcagcggaagtggttcaccggtacgcggcggtggatgccgctcatcaccgcccagtccgtcgtcgccgtgcagttcaaccgcaacaattggtccacgctttgtgcgcacaccaactacaatgtcttgcggtaccggtcgcatgcatctactaccgcatcaaggctcttcccaagcgttactatacgtgccggaacagcgacgcgtctcaaccatttccggccattcggtgcgctcgtgtcccaacgacatatgccacaccgggttaaaggaggaagagcacgcagacagtggcggacaatcgtcggcggcgcttttggctcgagcggacgaccaccaacacgcggaagaggaggaagcggacgagttccaatcgctgatccggcaccaccaccatcaccgcccccgccatcacagtccatccagctcagtgccggaatgtagcagtggccgcgtggcggcggctgcgtcagcatcagccgctgctctgtgctcattttcacgcgcgcaagctgcctcggacgcgtactgtcgcgtgtacggtggcggaagcagcggcgtccgcggcacagatggtacagcaaccgctggtgatcaaatgcaacagcctaatcggttgctggcggttatccaggaccggaaccgcaaagcgagtcccgcag

SEQ ID NO: 82667 - DNA, 106 bp, Heterodera glycines
cccgaagatgtgagcaaagtccaaatttttgtgactgcgccaattgttcggtccgagggtttaaggaagacaatcaataaataaatgtttattgacgaacaataaa

SEQ ID NO: 82668 - DNA, 2853 bp, Heterodera glycines
atgacgcaacccgccgcggttcagccaaatctgcagcaattaatcgacgtaattgctcagcaacagacgcaaatcaaccagctgataaatgttcaaagaaacaatcagccaaatccagcaatcatccaaacaataccgtcaatgccggacgtcgcaattttcgaacaatgcgacgaaaagcatcgcatcaccgaatggctggagcgtttcacttttgccattgactcgtgcgcaccgaacgcggccgatgacataaaagtcaaggcactgatgaacaaactgtcggaaactgcgttcagcgagtacagcaaatttgttctcccggccaaggtgacggatttcgactttgatgaaacaatttcgaaattggagaagctgtttgccaaaccacaatcaatatttgtggaccgatttgcatgtctgatggccaccaaagacgatggcgaagaatttcaacaatttgttaacaggcacaaacgacttttgaaagattttcagtttgacaaattgaatgaggaacaattcaaagggctaatgctcctaactgcgctgaagtcttcaaaggacgcagttcttcggcaacgtattctcgccaaacttacaaaggatggcgacgccgtcaaatatgatgaactgattgaggattgcatcaattttttgtctacaatccatgaggcaaaattgatcgaagcaacttccgtgtcatcaaggacagtgaatgcagtgaagccaaaccaaagaagggagagaccaaagccacaatccaagcaaggccaaccaaacgcaactccaactcagcttcaatgttggagatgtgggaaaacgaaccacacccacagagaatgctcgcacaaatcggctaagtgtcccaaatgtcactacaccggccatttggagaaccaatgcgaaaaagtgcaagagtggcgccgcaaaaacttcaaagtgaagaaagttggaacgcttagcattggaatggcactcaaatcaatcaacagtgcttctcttataaagataaaagtcctgctgaacggaaggatcgtgaagtttattctcgactccggggcagagatcaatgtcatcgatgaggaaacttatcgactgatcggacagccaaaaatttgggaatgtgccgaaagaggcagaatgttcgatgggacagaaaaatcttttatcggaaagggagaaggacatttcgaattccaaggcgtaaaagttaaagaaaatttttatgttgccgaaaaaggatcgatgaatctgttgagcatccaaacaatggatgcatttggattgttggatggcatcaaagccaaaatcaactctccgataaatctttgcagcgcaggggaagaattgagaggcaaaacacatgccccaatcaaatccaacaaagttgccggcacaccaaataaggacgccgagaaagaaatcagtcagctaaagcaggagtacaccaatgtttttaaaactgaattgggactctgcacaaaggtcaaagcgcacttagaattgaacgccaacgcacggccaatatacagaaaggcccgtccggtcccgtacaacgccaaagaagcagttgacggagaattggatcgttgggagaaaatgggagtcatcggcaaagttgagcacacagaatgggcagcaccgattttggtcgtcaaaaaggccgatggtagcgctcgactgtgcatcgactattcaaccggactcaacaatgcgctaaaagaccaccagcacccgttaccattaccggaagacatttttgccaccttaaatggaggccagtacttttcgcaaattgatctccgggatgcgtatcttcaagtggagctggacgaagcatcgaaaaagctgtgtgccattgccacccatagaggaaattatgaagtcaaaagacttccctttggcatcaaaacagctcctggcattttccagtcgataatggaccaaatgttggcagattttgacttcgcgacagcctacctagacgacatcatcatcgtcagcaagggccaaaaagaacattctgaacatttgaaaaagatgttctcgcgatttcaagaatggggatttcgcgtcaaacgtgaaaaatgttcgattttccaagatgaaattaaatatctcggacaaataatcgacaaaaacggacgcagacctgaccccagcaaaatcaccgcgatcaatgagatgccagaaccgatggatgtctcttcacttcggtcatatttgggaatggtaaaccattaccaacaattcatcaaaaacatgcgcttcgtcagaaagccgcttgatgatttgctgaaaaaggacgccgaatggaattggagcgataaatgcaaaaatgcatttgacaaaatcaaaaaaattttgtcatcaaaattactgctcacgcactatgaccctcaaaaagagatcgtagtagcagcagacgcatctgatcagggaattggagcagtgatctcgcacaaattcccggacggaacgatgaaagccattgcgcatgcatcatccgccttaactcctgccgagaagaactactcgcaaattgaaaaggaagcactagcaataatttttgcagtgcagaaatttcacaaaatgatctatggacgtaaatttacgctcctaactgatcataagcctcttctcgccatcttcggcaacaaaaaaggagtgcggcaatgcagtgccaatcggctgctccgatggtcactcattctcttggcatacgactttaacattgagtatgtcaataccaacgacttcggccaagctgatgcactttcacggctaattgccaaaggaaaagatgcggaagaccgcgtcatcaaaatacttcggtcgattcggaggtag

SEQ ID NO: 82669 - DNA, 944 bp, Heterodera glycines
gcaacagctgaccagcgaaaatcaaatggaaagcgaagaggctggtgaaattgtggccggaccaggtaattaggatagcgtatctcaccaattacattaaccagcgatcaacatgatgatgatcgcactgccaagtctgaaccggaaaatgtgccgctacgaaaggcaccggcgcgcgttggaggaagcgggtgggacaaatgggggaaataggggaaaatgggggacaaatagagagaaaaaaatggatacaaatgggaaattaaaggaaaaagtgcattttcagcactcgcagaggacgacggaatgtcttcgagcgaatcgctgtcggaagacattcgaattttgaccaacgactttttctccgaagcgcccacttccaactcaaagtgcttaccccttcttccgttttctcattttccttataattcccccattttccctcttagagggtccgcttctttgggtccctccggcggttgtcccagtgccacactgttcaacggttttcgtgcctcattttcgggcgtaattgacatgcgcaaaaagtcaatggcggatgaaattgtgccctcaatttttgtgccgcgcaaacggtcggcctgcgactttggcacgttcagcgcattacgagaaatgtcgcgccaaaacaccgctccaattaaaatacgcgtgaccaccgtccgtggtactgtactttacagtcattttggaatacttttgtggagattttttttgtttcgggcatttgattgtaaaacaagtcattttgatgttttaattccgacagatgacagcagtaaacggccagagactgaaattgtccatcgttcgcagcttttggcgcccgaaagtgtcgcgtgggcggtgccgacgacgcgccaaaattcagcggaagtgccaaaagagaaaagcaatgcgcaaccgctaaaacatcaacgtaa

SEQ ID NO: 82670 - DNA, 272 bp, Heterodera glycines
tcctccttgctattcgtgttgtccctcgtgcggcggcggcggcggcggtttcggcagcggtacgttgaataaaatggcacattttaaatgattaatgaattttcaacggaaaggtgggggactcggaggactcagcagcctttttggaggtcttggaaagaaaaagtgaaggacgagggaaaaacagagaaagtgcaaagaaacaaacatttaattaattgttctaattattatatttattccattttatgcattcttaataaatttttatt

SEQ ID NO: 82671 - DNA, 357 bp, Heterodera glycines
ccccccccaaatccgttgattcaccatttcttttgccattgctttccgtttctccgtttaaggcacttttctgtgctgttgggtgccattcttctcgctgaacattgccaatgctttgtgcattgaaatgggtgccgattggtgccaaattggcttcggcccctttttctactccacttggctcggctacatgaattccttcatgaacccactaatttacacaatgtcagtccccgaatattctttaattgattaattagtgcttcttttcagttttaatgccgaatttcgtcgcgcatttaaaagtttgctgttgggtcggcgcggaaatgtttttgccagacgaatttaaaagtg

SEQ ID NO: 82672 - DNA, 1342 bp, Heterodera glycines
atgcgttttattattctgaatgttcccaattttgaaaatgaaatagtgcacaaaaagggagggatggttagacgaaaagagaaatttttaggaagggacgcaccccatctgatattcacccttttctgttccataagaggccagaggcgactgtgttcgtcgacaagtaattgtccaattaaggtacttggactttccacagtgaaatgtggtacaaattttggaactgtcccgcctcacggtgggacttaaaaacatggttaatccaagttcaaaacttcagaggagaattttaagttttgaatttttacaatttaatttcttagagtcaaaaaatttcggaaccaatttttaaaacgaaacagtgcacaaaaagagagggagggtagaagacgagagtaattttttgaaaggatcgcaccccattgaatatttccttatttctttttcataactgtccaaaggtgactgctgtcattggctcttctgtagtccttaaggtttgtgccgtgccatttaaggcgatgttacgctttatttacaccaacaaattgagtgttttggacggacaaaatgcaatggctgtgttttatgcgggtcaaaaattaaattgatttcattgatggattaattattatttatttattatttagccaaaaaatatgccatcatcggtctgatcgaaggattcgctgactttcccattgcaaaattgccaaatgttttccttgcctttgcccaagctcgtctcctgcaagaaaatgtacaaaaattaattttcgatttattaaataataatttcacttttattttgggaatttgctgatcgatgcttggcttacattgaccaaaaagcacaaatactgatcagatcggatgattttttaccaatttatcaacaatatttctgtgagattctgagccgtgatcagctcaaagttggagaagaaagtttcatttggcaagccgtaagaaattgataatgttaaaacaatataatggaattaactcacttaaatttgattttggaattttattaaattaattaattttcaaatctcattaaagtctgacaattacgaaaaagtttcgggcactttttaatttcgtaattttattttgacataattaagaattttgttgtatatcgtaacaaatataggaattcaatgtttttgctaatttgagaaatttaaattgtaggcactgcgttgggctgacgaacggtgccgtcaaaatggcatcgaatgttcgggggaaaatcgtcggcaaatgcttggcccaattttgatggctattcgattcccactaatggcacaggatgaatttctgaaaatcattg

SEQ ID NO: 82673 - DNA, 2028 bp, Heterodera glycines
  unsure (1)..(2028): unsure at all n locations
atggcagcaaatccaacaattgatgaattgacgaaattgctggccaagcagcagaaactagtggaacaattgctgattgctcaacagacgaatgccgcgccagctcaatcaactcaactcccagctctttcaaacgtcgaatgttttgatcttgatgatcaatctgggaagaacatcgaaagctggatcgaccgttttgtgttggccctcgactgctcttcatcaaacatccaggaccaactgaaagtgaagctggtgctgacgaaattgagcgagggagcatacaacgaatacagcaaattttgtctgccgaagaagccgaccgagttcgacttttcggagacatcggcacaactgaaaagtttgtttgccaagccccaatcggtttggattgaccgatacgaatgtttgcgggcagtgaagcaggacgacgaagacttccgtgctttcgtcaaccgccacaagcggctgcttcgcgattttgattttaagaagctgaacgaagagcagttcaattgcctcatgcttctgatcgctctgaaatcgccgaaagacgccgaactgaggaagcgaattttgggaaagctgacagcagacggcgacaaagcaaagtacgacaatgtcgtcagtgacttgcagatgttcctgtcaacaattgctgaagctaaggccattgagcgcccatcccattcgaatgttttggcgatcaatcggagaccatttcagaagagggaaccaaacaaaagcccaactcagcctacttgttggcgttgtggcggtggacatgaaccaagatgttgtcctcatgcgaaagcaacatgccgaaaatgttcaaaagttggacatttgcaaaatatgtgtgcgcgtcatcgagaatggctttcgaagcattcgagaaagccgacgcaaggaaagcagatgaatgctttacaactgggaggtatttcagtgaacgcactgaaccaaccgagccgtcttgtggaggcaccagttgatgtgaatggcaaacccattgattttgtgttcgatccgggagctgagataaccgtgatcgacgaagaagcacatcttcaaattggacgtccccgactaattcaatgcagcgaaagtgccaagtaccacgatggaactgaatgcaccctgctggggaagggttttgcgacttttacgttcggaggacacacacacaaaggacaattttatgtgaccaaaaagggttcactaaatttattgggaatcgacattttggacgcttttggcttattggacacattcagagccaaagttaaaatggcaatgaaagtgaatgtcgttcaagcggaagggaaggaccgaatgaagagtcaaatcctgacgaagaaggacacgactttgctcgaccttcagtcaaattttccgcatgtttttgcagaaggcctgggccactgcaccaaagccaaagcccatctcgaattgaaagcggatgctgttcccgtgtactgcaggccacgtccagtgccattcaacacacgtttgattgttgaggccgaattggaccgattgttggcgcagaaagtgatcagaccgatcgatcacacccgttgggccgcacctattgtggttgttaagaaggccaacggagcagcacgcgtttgtgcagatttttcaacgggcttaaacaacgagttgcttttgaatcagcatccattgccgttgcccgaagacattttctccaaattgaatggaggacgaattttttctcagatcgaccttaaggatgcgtatctccaggttgaattggatgagaaatcgaaagaactgtgcacaatcgccacgcacaaaggaaatttccaatatttgcgcttaccatttggggtgaaatcagcgccagggattttccaatcgatcatggattcgattttggccgattgtcagttcgcttttgcttaccttgacgacatgatcgtggtcagtcgttcacatgaggagcatcgnaaacatttgaatgaagttttcaaacgaatcggaaattttggnattccggattaa

SEQ ID NO: 82674 - DNA, 1731 bp, Heterodera glycines
atggctgaaaatcttcaacaaaaaatcaaagacaagattgggactggttattacagcatcacaagcgatggttggcaacaacctacaaaatcaccctcattgcagaggttattactaattaaaaactataaaaacctaatcaatgtgatattatcattttttagtgtgacaattcattcagtcgatgaaaattttgtgcgaagcgattttgttctcaatgttgcgccaatatatgatgctcacaccggcgaaaatctcgcagaacacatcgaaaagtgtttgattaataatgggttttcaatggaaaaattggttatgatggtcagagatgacgcaaaaaacatgatcaaaacatgccgaatattagaaattgaaaggtaaaatataattggtaaaatatttaaaaatattgtttagctttcaatgtgttaaccattttttgcatcttacaatatgtgatgttttgaaagaaccgaaattatctgatctgatcgaaaaagtgagagaatgggtgaaagagtgccgtactacaaaaggagctgcattatttcggaaaaagcaaaatgaacagggtcaaaaaacaacaaaactgatcatggtaaaaacagtaaaatgaacatggcgtgattttttaaattttagtcagttcccaccaggtggaattctacctatgcaatgctttctcaatttcgccagcaaaaaaaagcaatccttgcgcttgagtttgatagaatgcattcagaaattcgaacggttaagcgggcaaaagtcgaaaaaatttctaatgatttaccgagaattgatgcagtcgattttgatttattgcgtcatgtctgttcgattttggacatttttgatgcggagactcgaaaagttagaagattttcatctcaaacttagttacaatgttttatcaattttagttttctactgaaacatccatcgcttcatctgttatcccaactctaaaaaaaatccgtgactttctcgcttttactccattccacccatctgttcaatttcttgccacttcattggcaaatgcaatcgatcgccgtgtttctaatctggcacataatacagcgctccaaattgcaactattcttgacccacgatttgcgtatgatgaaaacatttggcgtaaaagcttatgggcagatattgaggaagaattgaaaaattttgccaaatcaagtccatgaatatttatttttaattttcaattttttgaattcagttgagggccaaaaaaatgtgtcggtcgatgatgagcatttggatgatcaaaatgccgccttttctggcttagttcaccatgataacgtcgatttgagtgctttggacgaaggtggaagcagcgatgagagtgttcgatgttcgaaatattagcaattttttttattttattgcatttaagatgacatttgggttactcctaaatcgccaggtgccgggtcaattccatcaacactttcgggagaaattaatgctgatctcaattccaaaattgaatcacaattggctcattacaaggccattgttcgtcctgcaattgactctgatgttttttgttggtggcgcgaaaacgctccaaaatttccagaattggcaaggctggcacggattttcctaacagcaccggctacttctgtttgtagtgaacgtgtcttctcgaaagctgggctcctttacgcaaattcgcttagaaatcggttcaaacattttgtctta

SEQ ID NO: 82675 - DNA, 2173 bp, Heterodera glycines
atgccttcatccaactcattctatgtgatcgttccttccaacacaaatgttgaaggaaatcgcacaaactcttttcgagttcgactaccaagaaaacttcaatttaattcggaatgggatgtgggcttaggtgtgatcatatacccccattcgtggccctcactcggcacatcagaggaccaatttgttcaaattgaatggaaaattggagagaatgttcaaataccaattccatcctctaacgtgacaaaccccgttgagctttggaaaagtctttacaaactgcttgaagaaggcaacaaaccgttcgcagttaaagtggaaggcgtacagaaaaaattcactgaagcggccaatacagcacgtcaattgggcagagccgagtacatcaataaacaacaacaacaacaaagagacaaaagaaatgttaatgatgatgatgatgatgatgataaaaacgaagaagaattattaaacgcccttttagcgggggttgacacgttgcttgacctttacggggcaaccagtggtggtctacttgagagagaaaaacgtgcagcaacaagcaaggtccccctgcggaattgggatgacactgaagaggaataccagaaaaagcttgataaatattttttgcgtctacgtggccgtaatttagaacacttagagggactgataacagaaaagttgaatgcggaaattgcactgatggatgacgaagaaaggacaattctcgatcaaaccaaagaattaggcatgacagcatggataaaagttttccaatcagcatactctgcatgtttcctacattttgacagtgcaacgaacagattttcgttgaaactggacgatcgttatgtgcaaaaaataaaaatttcagaccaattggcctacattttgggttttaactcaaccgaattcactgaaaaagaaacgattgcaaaatttatgccagacatgagtggaggagttgcttcttttcatgtttatgcacctgatctaattgaaccaatgatgattggtgacgtgattgccccagttttgcgtatcgttacgattcggggaaaacctgacgaaattatagaggagcagtttctctccgtccaataccatcgcgtactagtcaaagaaataagtgaaattttcatcgaaatcagaacatccggtggtaacttaatgccatttcaatacggtacatgtacattaacgctacactttagaaagagttcctacttttaaaaatgaacagtgttcaaataaataaaattcttgctcgaaacccagtcacgcgttcgacctttttagggtgttttccatcagatcaaattccagcaggagcaacaacaccagttccttactcaatggtgattaacgttgatccgagcggttcgcctggttcacattgggttgccgtgtattgcgagcagcaaaatcgggtggaatactacgattcgacaggaatttggccaccgctaagccctttcatccaaaaatttttaaagagttttgctcaaattcagtttcatcaactttcgctccaagcaccatactcacactcatgcggaaagcatgtgattttctttatatttggacggtgtatggggatgcactttgaagcaattttgcaactgctaaaacgcgcaaaaatatcaccagatttttttgtgaacaaatttatgcaaaaaaatgtgtttaaacaaatataaataactagaaaactcaatttaaaaagcgcaacaaaaaaaagaaagaaaaatgcacgttgattttgatccttttaaagttgaatggtcagcattaacccaaatttctccagaagtagtcgtccaatacggtggttataatgtgttcagaggggttccataccagcgcggtagtggtatcgggtctgtttttaggagtctattgcgttacctaataccaattgggaaagaaatcgggacagccatcgggcgccaaggacttgaatctggaaatcgagttctatccaatgtattagagggtagggacctcaaagagtcacttgttagtgagggaaaaacggggctcaaaaatttgctagagaaagcagccaacaacataaatgcccaaaaaggtcaagggttcgactttaaacgatacacaaagagaaatgatgcaagagaaggtgttgcaattggtaaagcgaaaaaag

SEQ ID NO: 82676 - DNA, 2098 bp, Heterodera glycines
atgggacgtgaaaatgtagtgccgatatttttggagaatggccattgggatggtctgaagaattatgtctgctttttcaaccgtggaaggaagttctgcgttgaatgtgaatgtttttacgatcaggatgtttatcatacgatggattgccgggcgagatgttattactgcaatagagttggaggaatgccgtgtgaaaaggagagtggagtgaagattgaatgcccgaagtgtcgacgttacttttacaattggggatgctacagctatcatcagggacatcagacttgcaatttatggaaacgttgtgtgatttgtgaaaaaacttatcgaattaatccgaagaaggatcatgaatgcggagagacttattgccagctttgtagtgtgagccacgaccccaagcgggggtgttatattatgccgatcgaggagaaagaggaaaaggatgtttaccgaattgtcgtttgggtaagttttatagtaaactaaatgaaaataaataattttaacttcaggattcggagacatcgcaggattctatttacaagggggaccagaaggagcatgttattaattatatttcggtgagagttacgtgtacggaatgctgtgatgacaaaaacaggacgaattgcaaaatttgtggggaggagaggatcaaggattggagcgaggcggagggacatgagccgaccaaggattttgtggagtggattttaactgcttttacgaattacgatacgtacatatttgcacataacgccggacgttttgacggtaatgaaaacaattaatctaaatttttaaatcctaaattttaggtcattttgtttttaattacctctgccgtaccgggaagaacccgctaccgctcatcaatggattgaaaatttatgaatttaaagtgcaaaactcgaagaaacattcaaggctgatttggagagactcatgtttattgatgccggtgaagcttgagtcgctgaaggcgacatttaatttggactgtgaggacaagccctttttcccctattactacaacaagaaagaaaattatggagttcgattacaacatctgccaacaatggaagattattcaccagggtctatgaataaagagaaatttataaaattcgaaaaatggtaggaaaataatttaaaaaaaaacaataaaatcttattttttaggtataacgaaaacaaggagacacccttttatttggatgaagaattgaagaattattgccgaaacgacacggagattttattgctgtcaattattgagtttaggagaattttgatcaacgacattacgaaggggtttgacccgttgccgaggagttgtacgaatgcgggggtcgcgatgaatatttttaaggcaatgtttttattgacggagcagttatcgattgtgccggagaagggatatgagcggtgtgatcgggcaagtgtgatggcaataaagtatttggagtggcggagcaagcgggatgggattgagataaggcacgcggggaatggacgagaggtcaaagttggaaattacaaattggacggatttattgggaataacggaggtagggacaaatgcattgaggtgatgggatgttacatacacggatgtttgaattgttatgacccggcggcggaactgattggaggaaggacggctcaggaattgaacgatgagacgcaggagagattgatggagctgcgtaagactttggacgtcgaagaagtttgggtaagtttatctgacatttacatttttattgtgagtttttaggggtgccaaattgaaaaggaactgaaaaaggatgaggagatgcgggacttcttcgacgacagagggaatgagaaggggccgattgatccgcggatggcttatgcaggagggaggacgggaccgatgaaattgtttgcaaaatcggacgagaagaaaaaaattagcgtttacgatattgtgagtctgtatccgtctgtgaattacggtacagcttacccgattggattgccagagattattatacctaagagcgatgagattaatgttaattggacgagaccagaggatttgaagtataagggattgtataaa

SEQ ID NO: 82677 - DNA, 712 bp, Heterodera glycines
atgaacccgagattctcaaatagccgtacccgtgccgaccgtgacctggatctcgcatcagataagtgatcaaaaaacgcctagtttaatcacaaaaagtgccagaaccgcccggctggcactaagccatcctgcaccaattttgtatgccatgccgtgcctgccatgcattcattcttcacctgttcgcctctgtcatgcaaccggcgccgtacgaggacttgtgcagcagcacactgccgccggaggacgactcagcgccgggctgtgtccgccggctggcccggccgtagatggacgagtgaatgccgccgaaccgactgaggccggccgcgtcaccgacacaacaagcccaattcaaacagtcggcaatggcacggatcagctgcgctcgcatgtccttgttcaacgaaaagtagatcacctgtagaacggagggtgatcaatttgatacgattggaaattttactcaaaatttaaatttaagcatttgaaatttgagaaaaatcaaaaaaagacgaacaaaaatattaaaaatttgaaaaaagaaattaaattttgaaaattttgatttaaaaaattctcatattttttttttgatttgatgaaaatgttaacaaattttctcaaatcacccagaaatttagtaagaaaatcaaaaaaatatgtgccaaaatttgtttaaaattggcataaaaatgccaaaaataaa

SEQ ID NO: 82678 - DNA, 2790 bp, Heterodera glycines
tccagcgaaaattcggcgtccatcgaggcggaccacaacaacagcaaattgcgctacgccgacgagaccaccatcatcccgcacgacctcgtggagcggcattttctgcaaaacacttggtatgtgttgtgttgtaaggcgtgcacaacaggtttgagacatcatggtgggaccagggagagccaaaaaaaaaggaaaaaaaatccggaatttttgaatctcgaatgctcaaaaaacttgaaaatggagccatgttcggtaatagcagggctaccccccattttcgaaaaatttaatttgaatttttgactttttgttcgaattcgggacctgggtcggaattgttcgaaatggatacaggattcgtggtcaatgacctcgaaaaaatttttggaaaatagatgggtcgtgagaccaccctgctttactccagggagacccaagagaaaaaagaaaaacacggaattttgaactcgaaaaatggaaagatttcaccatggtactggatttatagaaggaattgaagagacacatgggtgtcagtcagcattttttcccatttctcatggacccgcaaaacctcaaaaatttaagccgaaaaatcaaaaattcattcaccgacaatatcacatttctatttttgtctatttttcaaaaattcttacggcattgtataactaaataaaaatgaacggctgattttttaacgactttttgtaaaaaaaaaaattcaaaattttaaactggcattaaatttgtggaaaaatgggttcacaatgtcgtatccaatttattaatttttcattttttgacagggctctctggtacttgaagggcgatcgcaacaagaattggaccgattgtctgaagaaagtgtccacctttgacaccgtcgaagatttctgggcgtaggttttaaaaaatttttgggggtattttttggacaatttgaaaaacaactaaaaaaatgttttttccccgttattttttcgtgaattttacattaaatagcaatggttaacatgggaatacgtggttgggctgttggtccgaaactaaattgaaagattgacatgaaacagtcaattttgggaaaatttcggaaaaaatttttccactgtccttcttatgggtgtaccccaaaatttcgccgccgaagttttcctttaaaaatttttcaaacttaaaaagtaaaatcttttaaacaccccaaaaaatttttttcgaaaattttgacggcgaattttggggtgcaccctttcatttatgatatttgtaaaatcatttgggccttcttcaaggttgtacaaccacatccagccggcgtccgggctgagctggaacagcgactattacctgttcaaggaaggcatcaaaccgatgtgggaggacaaaggcaatttggagggtggtcgttggcttgtgcaggtgaatacgcgaaacacaacccagtctcggcttagtctcgaagttggctttttgtgttgttggagggagaattggccggagttgcgaccaccacccaccaagcaagtttttcaaattttttgttgaattactaagatttttcaaaaaaaaaccgctgaaaatttctttttttaaattttgaaggaggtgggaatcttgagactttttctgagatttttttttcatacactgattcacctccgctgtttattccccgccccatatcgtttcctccttccgaaagggaggggggacgaaaaaatttcggaaggggtgggaagagggagccccgacatttgcggcccagacatttgcggtccgacttttgcggccccgacatttgcgcctatgtccaaaatcggactcaaaattgaattttttcaacccctgatagcctaataagcattaaaattaagaaaacacggttttatggttcattatgatcaataattttttgtttgaaaatttcagtattttttcaacttttttttgaagatcaaatgatcccgcttctgtcacgtcgatatactcggataatgtttaagactacgaagatccgaaagattgtgctctattatataaatttcatttggcatgagttatttgggccggtgatcacgaatacgtgatcagatttcaattatgacatcgctaagccctcagaatccccgtgtgattggggattctgaggcatcatttgaggggggagggggggggggaagttcgaatccgggcggtgtactttatttatctatttatttttgtgttatttttcagtgcgtttaatttatatttaaagatttgttgtaaattaataataaaagaatttatgtaaaaaataataattatgttttaataaagaatttcatattatttttaaattgaatttataaaaattaatttcatattaatttaaatattcaattcttgtacatttcaaaattctctttttaattaataaaaggaataattaattttattttttaaaatttataataaattgctttcaatttttgtacctcttttatcacttttgtacctcttctaatcactgttgtacctcttctaatcattgttggacctcttctaatcactcttctaatcgctgttgtacctcttctaatcactgttgtaccacttctaatcactgttgtacctcttctaatcactgttgtacctcttctaatcactgttgtacctcttctaatcactgctgcacctcttctaatcactgttggacctcttctaatcactgtttacctcttctattccctgttgtacctcttttgatcactgttgcaacctcttctactccttttgtac

SEQ ID NO: 82679 - DNA, 776 bp, Heterodera glycines
atgtactggcaggagatgatgatgtgcatcattggggaacagtttgagaaatggagtgaccacatttgcggtgcggtggtcaacattcgtcaaaagggtgacaaagtgaggaaaaaaggggcttttgaaaaaatgcaattttcaattccttccacctatctagtctaaatatcaacaaaaaaaaaaaaattattaaaaatttgaaggaacagagaattttgttcttgtttctgcagcgattttttaggattaaccgacgcattgacggatatttgtttcgaaaattccaagccgaaatccatgtagaaccgaattctaacaacaaaaaaaagtgtaatttttgaatctcgtactttcatggtcaataaattactccttttcgaagattgagtatgggaacaaattaatcctcgcccatctagcaatacccgggtaaattgggaacccggtctcatggtcctggtttttcaaaactgtgctctacaaagctagcacatttaaaaaaaatagaaaaaaataaaaaattttattgttttttttctaggtttcgttgtggacgcgcgacgcgaaggatgacagcgccaacatgcaaattgggcacattctgaaggccaaactgaacattccggacaccgaaaatttgcgctacgaagtgcacgcggagtactcggcacgcacgggcagtgcggtgaagtcgaagtgagcaagcagcgaagcgagcggacgggagggggggggtgcacggactcaccccaaaatttcgccgcaaaatttaa

SEQ ID NO: 82680 - DNA, 313 bp, Heterodera glycines
atggcatggcatttgaagaaaagtaaagcaaaaaaggaaaagcgaaggaaaatgcaattagaaaagaaatgccaaagtgccgatgaggaaaaaggaaaagaaagtgccaaaacaaacacagcaaaagcaaagccaaaagtggggacaacgacagacacacagtggcgggtcgaagacgtacaagaaagcgagaagacagacggggagcagttcatcgcggtcaactgcggcagagggtatattcagtaacgcgagacatgcatttggattcgaatcgaaaacgttaaaaatataaaaaactgacatatacaaa

SEQ ID NO: 82681 - DNA, 616 bp, Heterodera glycines
atgccatgccatctctctaaagtccgtccattcgcttcagtgaccgacatcactcatcagcaccctttccatgccattctctctcccgccgccagttccattcattcatcaaccaatggttatattttcaagagataaatcgagatttatttgaatttgcttcagatggtcggtacggccgaatgcgcgagttcactgacgaggagtccaacctgtgcctgttgttgaaccgcgtcgtggacatgcaaaattcggagaggtgcatcaacaagaatgctttttttattatgaaatattccccccccgcccccacagacacaccgttttccttgtcgtctctctgttcgtctattttttggccagcaaacgctgcggcccggcagaaaatgccaaaaagcaaagtgtacgcaatttgctcgcatagttgaattccgattttgtacttcttctttttgctcaggtactactccgccatttcaacactcttcttggctacagcaactccgacaagtgcttcacaatccctcccgcgcgacttcgacgtgccgccgtttgcaacgcttttttgtacggattgcccgaggtgttggattcgaatttgctgattggcaaccag

SEQ ID NO: 82682 - DNA, 196 bp, Heterodera glycines
acaaaaaggcagagacagcggcgacaacaaaaaggacagtcgtcgccaaacgcattttgaaacggaaagtgccaaatccatcggcaagaaaactgacggcggatgcgagccgacatttgggaggacaaagcgccaccgcaattcgagtgaagaaacgccggtcgaggagtttggacaccatgttgaggtgcaaatg

SEQ ID NO: 82683 - DNA, 1455 bp, Heterodera glycines
tcttacgaagccgcttctgcttacataacagaattttcgtcaaagagtgcgtccaattcaaatcccgttcatttgcttctctttgccttttagccactctttttgtgtgccccgtgccgcccactttggatgagaatgggctcaagggatacttcctcacttttggagatgttcggtccgttgtcgtgccacacaaccctttcacgggtgaacatcgcgggttcggtttcgtcgactttgccaacgaaacttcggccaaagcggcgtatgccaagaggggactgatttgggtgcgttttcaattttgagtaaaaatcgccatttcaaattaatggcaaacttagcctcgcggcggattgaaacccttcaatttgaattggtaccgtcccaaacgaccgttttctccgccttcgtcaaactcggaactttacgtcttcggactcagtcaaaaatgtaccgaattcgcaattttctcctattttggtcgctacggttccattgaacgcgcacaaatcggacgcacgacggacggcggtcgcgcagcgctccttcgcttcaccgattggcacagtgctttgcgcgcaatcgaagaaaacccaaaacaatgcgaatgggcaaagacagtggcagaagcacaggaacaggtggcagcagatgaggcatttacatgattaatcgaattaattaattaaggacggaacaccgccaatgaaaaaatgggtcaatgttttcgatttgccaaaaaggtaagaatttttgcaaatggaaatgaactacaaaacaccaaattgtttgttcagcaccaatgaaaattcgccgtcttttcgtccctcccgtcgatcggagaactcatcgccgaccattcacaagcagttcttcccggacctggttcagcagaaggcaagtgaatttgggtgtgtacgagtttggactgatcagttgtcaggatcaatcaccaaactttggaatgccaaaattggcggttttagagaaaggggcgttcgcagtccatgtgccgttttttggcgaaggaggaggacgacgcttacaatggcacgtcggacagagaccaatttgaggagggcaaaagggacaatgagtggcagcagaaggggcatcattcgcaatcagaagcactaaaccgagcaaaagtcaggtacagcgaagcaaaccttattgtaaacttaattgactacgactaacttaattaattgcccttaattccttttagtattggtgcaaaacgccctctgacgggtgcttcgtcttcgtcggaggacgactctgaggtgctcgtcacacgagagcatgtgccgcgtaagggccgtacgcttttccgtgccgtcgatgctatgcgttgcgacagtgttggttcggcagtctcggcacaacagcaccggagtcgttcgcacaagccaaaacccgggtggaacagtgtcagcggcgaagggagcg

SEQ ID NO: 82684 - DNA, 507 bp, Heterodera glycines
atgccatcgtcggtggaactgatgagacatttgttgagcacgggtgagcattcggatgtgcactttttggtgggggacggagacgcaaaagaggcgagtttaattaaaaataaaaattttattttatttttcaattgcaatttcattaattatccacgttttttaaaggttttgccagcacatcagcttattttgaagagcgcttccgatgtttttgaggcaatgttccgttttgacgccaaaaaagaaagaccggaaaatggtaaaaaaataataattttaagggaaaataccaattatgctatttgttcttcattttgtctctgctaatttccctaattaatttaacaattagtttctggtaattgtcctgatgttgtggagatacctgacattgaagcagaagcgttcaaaataatgttgagcttcatctatacggacgatttaagtgatttgaatggagacaatgcaatggcagtgctttacgccggtggatttaatttttaa

SEQ ID NO: 82685 - DNA, 545 bp, Heterodera glycines
atgcttttgttcgaattcgggtttgttgagctcgaaacttgtcgaaattgtgtgagattcatgatccaagtgtaagcaatttttaaggatttttccatcaaatgtttgcgttacatttgtcaaaatgcggctgacttgttcggatcagatgaatttttgcaaattgatcagaaaatgttatgcaatcttctcgagagtgatcgtttgttactcaacgatgaatttgaaatttggaaaattgtaatttcaatttaattttttattttcattttttaatttcgatatttttttctatttaggcactccgttgggccgatgaaaaatgtcgtcagaatggcattgaatgctcctcgggaaattgtcgttccgtacttggtcctgcactgttcaaaattcgttttcctaatatccatgagaaggattttgcaaaatgcgtcggtaaaaattttgaaatcggaaattaaatagaaattgttttggtcgatatgaaattttacctttaatgcttgaatttcatacatggataaggagggtcagcaagggga

SEQ ID NO: 82686 - DNA, 316 bp, Heterodera glycines
atggcacaatcacttgttagattgttttatatagttagataatatttgccaacttgattcatagtatatttattttttaattaacttgctcagtagtctaacaaaacttacgaacgtgaagtcatatctatattaaaattttctattttaatataactacattatttttttatatttaatcatatttattgttgctgattaaaaaatttaaaaatattatttttaggtacagttaaaaaatttacattcatttaaataattgaatataatattacttggtttaatgaataccctaaattaatcaagtaaaaataaa

SEQ ID NO: 82687 - DNA, 1451 bp, Heterodera glycines
atgaaccgccggtaaaataatatttagacaaagttttccattgccctgatttgattttccacaatttcagttggatttgcaccgacgtgtggatggacatgttcccattttttgaccgtcttcaactcggactcaaattggcacttctttcgccacgtttcgaatttttggtcgacaaacatttcgatggcacaagcgaattgccaattttgaaaaatatcgtattgcgcaagaacaaagtgacagcggtgccagaattgcgtgtgtttattgacaatgccaattatgtgccctttccggtgcccgaccattcgctgcccaagaaaattcgttttaagcatcttcggatttggtaattcaaattccgacatggattaacggatacatgttcctattttcagctacatcgaccattctgtcatcgcatttatccgtgccaatcagcaaatgttcgacaaaggaacaaacttggagttcttctatgtgtcttggaacgaaaccttttttgtccagccaatttggaatgctttgatccgccatattttgccaatttttgtgccaaatattcgccaattgaaatttccatgtgctgatcaactgtactgtttgcttcgtttcacttctccaaaagtgctctccgatctcaacattcattcaatcgatgctggtcgtctgttcccaaatgccattgattctggtgaccaattgctcgatgagatttgtggtgattctgatcagccacttgcatattctgctggccaaattttgtctgaatggcttcacatcccggcaaaagatggccaaccgaagaaattgatttgctggagtgattcgtcagaaatcgctgatttagtcaacaatttcaagaaggtgtgtggccacagtttcgttggattaattgccatttgattttcatttcccattgtttagaaatttcgccgtgccaccacttcttccgccagctatcaaattcaatttactgttcatgtgccaacggaaattgtgccatttcaattggtgaacgaacggatcaacgaaatgctgacattggagaaagcagaaaacaatgatgaaagtatggatgaagaagatgatgatgaatgggatgagcgatggataatgaagcgatgtcaaattggggagactacggccgcgttaaaccaaaattcgggcaatttgaacaatgtcagctttacgttctatggaaattgcattgggtgagttgcaacagcttttgctttaataatcaaattaaaaactgcgctaaatttaggccattgtcgacaccgacagaagacgaagaagcgggacaaagcgccggaaaagagtcgacgtattgtgacatgaatggattaatttggaaatgatcgatcattatgtattatgtgatgaaatgaattttatgaaggaaattcgcaaatatctacattcatatatatgtgtacatgtaa

SEQ ID NO: 82688 - DNA, 306 bp, Heterodera glycines
gcatttctccgtgccaacacttcttcgaccaactacatcattcgtcttgatgtttatgaatcaacgccaatggaaccatttgaattgataaacgaacgaaccaacgaaatgctaacattggagaaagaagaagacgaagatgaaaatatggatgaagaacacgatgatgatgatgatgatggtaaatatatcggttttttgttgaagcgatggcaaattgggaagacagttcaatgggaggacgaaaatttggaaaatttgaacaatgtggatattcgcctttatggagagtttgacattgggtga

SEQ ID NO: 82689 - DNA, 996 bp, Heterodera glycines
atgaggtagtctattatttttacagatacattatcacaaaatttttcataatctttattgtgttggattatgttttatgtatatcattgcatttttcattattttatttttattagggtgggaaataagtcctgtcatagcattgtttaaggattttttataaaatcgctcaaataaatcattgtttattagaatatatcattcgaaagagaaacttttggctctttaaaaagtcagctttatttctggtttttattttgttttataatttttatgatttttatcagcttcccaaaatgcaattttttcgtagttttttgaatgattcttaattccgagacctagcaataggaaaaaacaattatgaataccgtacctattgaattagtacccccgggggttctatttttcaacccccctcgaaaggggggttatattacagagggaggttctaattcagaggggggttttttcaacgctcatttttcaaaaacccaccaaaaaatggctacttattttgtaaacatttcgccaaaaaattgattttttttgtaatttcatttgttttagttcattctccatatttttcatcttttacgaatgacggacgagagaaacccttctgcatctgttaaaaaaggtagttcaaaattataggttttaggtacctacctgttcataacttgttcattatacaattaatttcaatttaggtgtgctgttactgcaataacatctgttctggagcgcaccagtgccgcaaatgctcaaagccgtgccatgcaattgctccgtgctctttttgcggccgaggacaacaagggattcagcgcaaaagtcacctgctgcaactgttggctcaacgatgatgacgatgatgttgtgatggacaaaaacgcgaacttcgccggtataaatgaagcgacaaacaatgaccaagacgacgacgcattcgaacaatttgccaacagccaaatcaatcggagaggacaatga

SEQ ID NO: 82690 - DNA, 2568 bp, Heterodera glycines
atggttaaaactaaaatactttttaaagagaaaactgtgaacaatttccgggccgtcctcattttgtcggcgaaccccaccccccccccccacttttccaataatttttgtgcggtcattacaattcatttatggtaaacgaggacacaaaaataagggaaagaacagagggataaaaatatttgtaactgttactttttataagtacttaaagtttggaattcaaatcgaatttattcgcccgtcgattgatcctcccccattatccgaatctgttctattttacgctaccgtacaattttcaaaaacatttttgcaataaatttatagtacataattagctaattatttcacacaacaactcaattagcaacaagtttttggccatttgaaggtaaaaaataataattaagaattgcttattaaatattaattttctaataaattgtacaaataatataaaatatgttttaaaatgaaaattttcagaaaaatccaacaaaaacaaaacgaaatttttcaattgaaatggcgggggtaaagcaagagcagcagcagaaaaagcaatatgagctccgcaaaaacatgacaatgttggatagagcggttgtggcagttgaaaatgcgcgagacgcagcagcggaaaatggtgggcaaaaaaaatgtgtacatttggaaaaaacggtagaaaattattttttagcttttttaaaatatcaaaaaaaaatgagagagataacctcgacaaaaatggccggttttttagtgatttaacgaatttttctaaaataaaataatataaatttaaaaaaatgaccaatatttttactgcaaaatttttcgaattttcaattctcaacttaaaaaaaaaattggttgaaaaaatcattttaaattggaattttttattcttaaaaaatcttatgagcttttggtttttgtacagctttgttgtacaggactttactaagaaattaaatccttgaaattaatggaaaaaagtagagaatattaattgttttttatataaattttcaaaaaaggaccctctattttgtcacatttaaaattttaattacaataaattgaaaaaaaaattaattggttttttcaaattatgttcgttgattcgccgttccttcatatttatatcattaattccattttcttccccctgtcccctccacttccctttcctctcctcctctctctcttcccgtctccccttttctgtccatctctctctttgctatttaccgcacaattatcttctctcttcccgtcgccccttttctctcctcttctctctctctctcttcccgtctcccccttttatattctctctctctctgctgttatttaccgcacaattaacgtatttttgctagtaattttttgaatatttgtgtttaatctcttacatgctaatcaattgcctgtggcaggcattgaaaaatgttgtattgacccctccccctcccccaccgcatttcctccatcatttgtaacattttattttcatggaaaagaataaaaaataaacagtgcctctacttttgaatttaataaatttctttaatgagcaaatgcccttaattgacccccaatgctaatttggtttaattaattgcataatatgctcccctaatgtattattccctatttgtgtgggatggttaattaaattctattaaatattttgtgttcctagagaaattgtgtttaataactaatactaattatcttaccaattaaacaaacgatgaacaccacgccaaaaaaaccgttctcctcgtccaatggcctaagtataaatagcatgaaaatttaaacaattcaaagcttttccaaactaattattttcagaccaacaacaggcttctcctgaatatttcaacgagattgctcaacggttcgaaaattcggaggaccgcagcgtaaaatcattttgcatgcccaaatctatttggtattatctacaatttttcaggcacgtgcctgggtccaaagaatgctggacgaggtgcaagaaaacaacgagcaggcccgcgtgagaaaattatttttaaaatgatttaatcataaataaattaatttattatgagagggttcaaaattgccaatttcacattttggcataaaaaaggaaattgtcaaattatggtcatcattttcatggccttaaaatttggaatttggcaggtgtttcgatacagctgatcgaatacactcataataataataattattattattatttaattcaccaggtttaattatttatttataacgcagatggaggacaaagaacgcatttcggcgttggaaaagcaaatgcttatggtttcggtcggccttctcatttgcgctggcgccgtgcttttcaagcacttgaagaattgagggctcaaacgaagaattccattggcacgaaaagaaaaatcaacaacaaatgaaataattttaattaacttaacaatcgttgccattggatatttaatttgtaattcgttggctaattgctttaatgttttttaatccatctttttattataatttggttgggaa

SEQ ID NO: 82691 - DNA, 782 bp, Heterodera glycines
atggatccgtcaacttttgttcgaagtcaaagagaccaaccgaaaagaagtgaggaaattattattgaaatttaaatttcaactttcatttgggttttgttgcaaaaatgtacacaaaaatactaaacccctttgaaaatttgtttaaaaattattcatatttttcccaattgcctttgtttataattggaaataatttctcagctttttttttcaggacaacaaagcgaccaccagcgaaggcactgttttcattttgggcgtttgtttcggcatttccgtcggcttcatcattgacagaatgttcctgcactgagtgatgagagaaggcacgaagaaaagaaccaatggcacgaaaaacgaaaattaaaaaggctaatttaacaacaacaaaaattcgttgccattgaatgcctaatttcgtaatcgttttctaattgtttttaacgcttttaatccatcttattatggtctgagttggggagtaaacgatgcataattaactcattgggatcttatgtcttgggaaatttttagtgccccaagcaggactaatcaattaatcccaatatttgtttcatttttaatggtcagacggtgcctaaagtttattaatttatgcttaaaactttaaaaattatatgaaaatttcttcagagcacatttttaaaattattcttcatgaaaacaggaaatttgaaatttaattttttttttgcaaatttgacgaaaaagtgattggatcaattatctgacaagacaatattaaatattttagaaaa

SEQ ID NO: 82692 - DNA, 390 bp, Heterodera glycines
atgaccgcgaagaggccgagtgagtaccttcggtgcaggaaaattattaaattataaaaattttttaattgctttttaaatatgccaaaaaatgtaggcttaactttcttagtgataattcgatcactcatattttttgctaattgagcagaagcgtaacaaactttgcagggatactccccggtaaaggtctaacttacactgaaatgagcgccgagctagctggctcaaaaaaattttcgaaaatgtgagtctttcgtttttatttattttttgcaaaattaattcttaaatattttttcagaaagggttctgaatcgctccaaattttattttcatgttagtttaggcactctgatgctttttctatcaaaaagggagatgaataaa

SEQ ID NO: 82693 - DNA, 477 bp, Heterodera glycines
atgaagtaagttatgaattttaagaattttaaaccgaatacgattttgaagctatgagcattttgggaacaacatgtctccaaatttgccaaaaatttcaaaaaaaaaatatcgataaagccaaataacgaaaacacgcaaatttttgtgtttttttggggagtgtattttttaaaaatttccagaccgatccttaggggtgttttttcgcttcttttttttcatttttttcaatatatggaccaaaaatcttaaccaaaccaaatttttttttttagtctaagtagcatatgcgcaaaaaaccaaccctagcaatgagtaaaaaaagagtttaatgagtaaagagagatttttacttttaaataaaataaaatccaatttcagtgtttttgttctccgggattcaagactcgaaaatttttttttgccacttattcattcatttattcattcaattcaattatacttgtattaaaa

SEQ ID NO: 82694 - DNA, 824 bp, Heterodera glycines
atgctaaatcccgcaaaattgcaacaactttggacgaccgttttcaccccgcagaacagcaacggaagtgaaacattactgacaaacaattcatttgctcaaaagaagcaaatgtttccctccaccccgggggaaggtgaattttgagaaatacaaaaataaataatattaattaattattaaaatttaaaataacagcagcaggcagccatcatcattatcgtcatagccatcatcaacagaacagctcattaacgacgacgcccaaacaacggcacaaaaggggggaggggagaaaagaagacgaagaaaaaagagacaacaaaaggcataataatgaggaggaaaatgagcaggatgatgagccaaatgaggaggaggatgaggaagagcagagggaagggacacgcaattgtcgcggcgatggcgacgaagcggcgggggactgcgaacgccggcggagaacgcccgacgcgtcgccgacgacgccattctccgaaaagcaacaacaaaatgttgcttcatcaaccgttttggaaattaaagaggagaagcaaaaggacgaaggaattgaggagaagcaaaacggaggcgaaagggaaggtaccaatggacgaaagaacggggcgaaaaacaaagggaacaatggcaatttgacgcgggtgcaatcgccgacaacgaaggacactgacggaggcgagcggaggatgaagcgagcggcgagaaatgtcgccggattggagcaaacggggggagcggcaacggacaaatcgcaatcggcgcagccgaaaagcgaacagcggtcagtgggcggggagggataa

SEQ ID NO: 82695 - DNA, 808 bp, Heterodera glycines
atgccgttggcagtgcaaatgaatgtcgcgatgcatgagactgtcctcagggcacgcgctctgataagctttcatacggtaaggacaaggccatttttgtttgccttgggcacactttggccaatttccggcgataatttgcatatattttcgccctcatttgccttaaggggaatttcaaagagatgtacgccattttggaaagccacaaattctcacaagacagccattcgatgctgcagaaaatatggtgggacgcacattatcaggaagcagagcgaatgcgggggaggtgaaaaagggagagaaaattggagaaaagtggaaatttggggaagagaaattggaaaaagaaattggaatcaaaaatgaaaataatgaaagaattttaaggacacttggcccagtggacaagtacagagtgcgcaagaagtacccgtgtccagcgacaatttgggacggggaacagaaaacgcactgttttaaggaaaaaacggttgggcatagggcacaccaaataatgggaaagtaatgaaacatgccatctttgcagaggacaatgctccgagaacattatctgaacgacccctacccgaacccggcaaagaaaaaacagctggcggaagaggcaaacctcacaccgatgcagggtaattaatggaataattaattaattgattaggttccggaattgcgattcacgaaaaacgaagttttgaatttaaatgacgaattaaatttaaaaaacaaacaattatttcatttaagttggcaattggttcaaaaaccgacgacaggttggtgacaa

SEQ ID NO: 82696 - DNA, 699 bp, Heterodera glycines
atgtccaggaaatccaggcttttgccttggcctagatttttttgctcatttgacctgggtttcctgaacaaaaatccaggtccaggaaaaatccatgttgccgaaaaatggcctagacctggatccaggaaaaatccaggcctggatccaggtccaggccgggctctaatggtgaatgactcccgtgtgtcaaaagcaagagttaagcgtttttacctgttcaacaacaaaaaacgataaatgaactgaacacacaatccaaacactgaaaagaattgtatgattatccaactgttgatcagcaattcttcaaattgagccgaaagtgacatctattcagagaattgtgaaacggaaagagatattgtccaaccatctgttgatagggtaatctaaaatatcatttaggaagagccggctgggatttttatgttctaaaaaccgcaaatatgcacataatataccgtatttcctcgattagtaccccccccccccccttaaatataagcccactttggagggggatttaacaatagaagccccggggcttataatcgaggaaatactgtatgccaaaagcctcaaaaatgtgttcaaaaaacgccaaaattgtcagaactaaaaaaactgctcgtaaaatacgttaattacttaaaaagtttctttctttattcatttcgctatcacaatgcaaataaa

SEQ ID NO: 82697 - DNA, 583 bp, Heterodera glycines
tttattcatgtgaataaaaaggctcttaatggggtgttacgacaattgcggaccggacaattgcggaccgtacaattgcggacgacaattgcggacgacaattgcggaccgtacaattgcgtaagacaattgcggacgacaattgcggacgacaattgcggaccgtacaattgcggaccgtacaattgcggacgacaattgcggacgacaattgcggaccgtacaattgcggacgacaattgcggacgacaattgcgtaagacaattgcggacgacaattgcggacgacaattgcgtaagacaattgcggacgacaattgcggacgacaattgcgtaagacaattgcggacgacaattgcggacgacaattgcggacgacaattgcggacgacaattgcgtaagacaattgcggacgacaattgcggacgacaattgcggacgacaattgcggacgacaattgcggacgacaattgcgtaagacaattgcggacgacaattgcggaccgtacaattgcggacgacaattgcggacgacaattgcggacgacaattgcggacgacaattgcggacgacaattgc

SEQ ID NO: 82698 - DNA, 631 bp, Heterodera glycines
atgcttacagattccttcgacgacgacccttcccttccaacgacggattttgattatttgtacggccatgctcagcagcagcagcagttcagcaccaacgacgagttggagcccgatgactccgctgcggcccaattcggttgtgggggaacgaagcggaagagggcattctccttctccagtgcgccttccgcttccgccaccaacacaatgacgaccagcacaacgacgattatggggctggtgaacgggggaggcggcgcggggccgtcgtcggcgatggtcggcggcggtggcccaacagcggcggttgtggagaagagaccggccaccaaaatttgccgagtttgtggcgacaaagcgtacaggtggacaatgccacaaatactgctccaaaccgccttttgttcagctacaacttcaacgtgatcacttgcgaatcgtgcaaagcattcttccggcgaaatgccaacaaagagaaggttttggcgcccaatcgaccgaatttgaatttcgtcccaaaggaaattcggtgtccattcaacgaacagtgcgacattaacattctgtcgagacgcttttgccaacggtgccgactgcagaagtgcttcaatgttggcatgaaaaagga

SEQ ID NO: 82699 - DNA, 749 bp, Heterodera glycines
atggtaaaaataaaatttccttttttcaaaaatattccaaaaatgaaaatttcgaatttgaatttgttttaatttttaaattctttaatgccattttgcctatctctttcgaacccctaaaaataaattttgcacattttcagtcgcttctcagcgcagcgattgacgaaaaattgtcctattttttgttgatggcattttttctgatcatcgtcgttggccttctgcagctgatgatcaaaggaattgccgataaaattttgatgcgattttggcggaacaatggaaaagggaaggaggaggagaaggaagaattggtggaagaaaaaggaagaggagagaaaggaggacgacatgaggaggagccaattttagaggagaatgattgggatgaggaggaggaagaagaaaaagaggaggaggaggctgaaggagaggaatttgttggggaagaggatgaggaagaagaattggtggaagaaaatggaagaggagaggacgaagcaagacgacaggaagaggcacttttggaggaattggaaggggaaagggatgaagaggaggaagaaggagaggggaatgaacgagaggaatttgttggggaagagaatgaggaagaagaagaaaaggaggatggaatggaggcatttttggaggaattggaagggacgacagatgaagaggaggaagaagaggaggaatttgacaatgacgaggaggagaagcggaagacgaagaaccaattgtga

SEQ ID NO: 82700 - DNA, 358 bp, Heterodera glycines
atggcatttctcaaaggagtcagcttgacctctcatcgcgtattcatactttacacttttttttcaaacacagtgcgacttttgtggacagcgatttgttctcaactcacatctgaaggaccatcggcgcactcacacggtgagaaaccgtttgaggtgagttacggatttgcggttttaaaaacaaaatgcactattttgatttatttattttttaattccattacctatttggtttttattataaaattaaataaataaatttcaaattcagtgcaccgaatgtggccgacgatttgctcagataagcaatttgcgtgtgcatttgaacagaaaaaaaaagtgcggaaagaaatga

SEQ ID NO: 82701 - DNA, 2269 bp, Heterodera glycines
atgccattttctttgtgtgtgacaatgttgctcatctgttccaatctggctttgcaaaaagtaaataaaatacaatgatttaagttaatttagtgattttttttcaagttgggaacgcttttatttttgtgagagataactttacaaatttgttttggaaaacggttgagaaaagtgagtgtttgtttttcaaaaaaacaattaaataaaacattaattatttttttctaattcaagtttggaatgcaactcttttcgtgcggaacggtgttgttgttgtcgtctggggtaccatcgaaaaaagtttgtactttttttcattatgccctcttaaagaaaaaaattattaaaaattggaaaatttttgacccttctaaatgaaaatcatcactaactactcatactagtatttaatttttctacttttcagttttcactgttttcaacgttctaattcgttcaattgcgcatttcttcacatcggcttacaatgcgtttgccggatttgtgttgggcgtttggcattctgtgcgcttttctcccccagcgacaaaagtggaggaattgttgaacaaggcgcaagaaataaaagttcgttagttttctgagtcaaaataaaaatcgctaaaaagtaaaatgagcagattttcaagacttgttaatttttgacataaaaaattattgtttttcaaaaattgtgttatttttttggtgaaaaacatatcttagaaaaaaattccagacctttttcttttttgctaaattgaacagacattaggtatatgaaaatgtattttctttttaggaccaagacctgccttctgatgatcacccgctgattcagcattttcatcgcattttgactgccacattggctgaggagcggacggtcctggagcaacggcttcgtgaattggcccagcaaaaacaacagcagagctcaccatcagcaatattggtattgaaaagaaaaggaaaaacgagactttctcttttatttaaaatcggggaaccaaagagttggaaaatgcaaaaaaaaaaaagagccatttttaagtagttaaaaatgttacctttttttggtgaataaatctcaaatttagtttagaaaaaatcttcatttgcgttatttaatagtccacatttatcttccacaaattgacattaaaaggtttggttagcttttaaaacttgcgagaaatttttcttacaaattttctaatttttttttgtgtgcactcaaatcttctgttacggttttttagcccactccaacaattgacggaaacgcactgaaggacaacttgcgaaaagagcttgacttgaaattgcgcgttgaaaaggaggaaatcaacaaaacggtcaaccattttgaggagcaaataatgacggttagttttttttggtacttgttcagtttacctgacagatttcacatacattttcagatgcctataaatgggttttagaaactaatgaaaatagttttatggggtttttgatgtctctgatcatgaaacaggaagaataaaattcgaaatttgtatggatgatatcctcatgggcatcttgtcaatgagggtattattggtacatgaaacctatcaattctttgtccctgtacagctcatgtagtgaacggtagcgctgatctgagcccggattcgtgatcagcgaccctaaaaaccccttaaaacttattttcattaagtacctttttttccaataattccatataaattgtatccaaaagaaaagcggtccacgaatgattatttatttttttagcacaattgaataatttaaattcagtcagtcgatgcgcctttcaagcgttgtctgagaataaatgaaaattattttattcaaattttttagggccaaactttagcagattcattctttgtcagaattccctattctttactatattttaccaattatgttttcaaaagatttttctagtaaatttagttttttgacaacttattgttgcttaaaaattcctttcgaaacggtggtgtaataatacccttattcttaaacatttttcttttttttgcagaaacttcgcacgctcattgaacaaatgcattcccaaaaagacgtgttggagcatgagattgatgaagtgcgcaagacgcaattggagttgaaaaaagacgtggaagacacagggaaaccgttgttgaagaaggagaaaatcacacaacagttgaaggaggacggacgaacggaaacgatcaaagtgagaaattattgggattag

SEQ ID NO: 82702 - DNA, 1246 bp, Heterodera glycines
  unsure (1)..(1246): unsure at all n locations
atggccaaaattgtcggggttggaggtcggggcggggtaggggtcgcaactctaaaaaatatgggcgggccggctttgaaccggcgtctctggctttccggaccagtgttctaccagctgaactaccgatcctgccctctccagctgcccactttgatcgatcgcataggatcaattgttgcctcaactggtccattaatcttcctcttcgggaagcttcttcttcttctctatctcagaagagagaccagagcgggagggaatggaactgcccagaaaatggtcaaatgctttggtgagacaagaaacaatgatcaatgctattgcncattcttgcctaaagtgcttgctcaaaaaggacgagtccaaaagccattttcagacacacagaaattgataatccgactgtaatggctaatcaaaaaatggctgtgggagcccaaaatggtgtggtagcataagcaacaggtgccaaaatgaaggaaagatggcccaattttttcctaaataataaggggcaatggtaaacgttatcctggctatgtctttcttgggtcgcgcacttcacaaatagtgggcaacaacacacattttgctgccacatcagcacagcagcaaatttttcgttcattttactaagcgtttgggtctggaaaaaattattaatataaattatatctgtaaaaatttactgaaatttttctgctataaatggaagcgccttttttaatttttctcagtaaattaattttgcatgttatttttgaaaataaatctttcctcatttttggaaaaaacggtaattctttaagcttcttttaattttgaactaaaaaatattagcaattaaaaaaaaatctgactgtttttagagccttttagcctaaaaagcaaatcccttgcaataaaattgttcaaaaataaaattgttcaaagaagaaaatatgtatggttgcctgaattggtgctgttcacttgccaagcaattctcttttattgcaacagattctacttcatttttacaagcaaattttatctgataatgatgacgtaatgccaatgccattctcattttttacttcatgttgagagagagagggagagagagagagagagagagtagaattattttacatattgcgaagatagcgagaatgcgaaggagtgattgagagtcagagaatttagtaaaagaaaaagaaggagagagaagagagagactagagactgactctaaaatatttaa

SEQ ID NO: 82703 - DNA, 153 bp, Heterodera glycines
tgattgcacgtaattgccgaaaaaattcgagaccaatttcggatgttgaccgactaattgcaaaacgaaagccgtctttgtcaaagcgccttaccgagtcaaaaaatttggaaatgtatctcatatgcaatttcaaccaataaatttgaagaa

SEQ ID NO: 82704 - DNA, 63 bp, Heterodera glycines
atggccacgcttatttgccttggtgtgccatcttttgaggttggcacaatgaatgaatggctg

SEQ ID NO: 82705 - DNA, 297 bp, Heterodera glycines
atgctacggtacagcgcatttttgtttggcattttgttctgcattatgtcgtcgatctgtccgccaatctggtccaatgaaataaacagtaagtaaaacttaaatattaaattttattaaaaaatatattaattaaaaccaaataaaattccaaaccttaaagttttatttcaaattttttaaattatttcaacaaaagaattccataattttcagggtgccatttttaaagttaaaaaaaaatatatattttaatataggaaattttttcattaacttttcatattttaaattaaa

SEQ ID NO: 82706 - DNA, 212 bp, Heterodera glycines
atgcgacatatttcaggtgaatgataagaaatcatatggtgtaaaacagtttaaaaaataggaaattcatttatatttaaatttttgtttgtctccagaccaattagggaaccatggaaatgctaagcgaaaatctaatcctgaaatggcataaaattaatgccgcacacacacatcgttttgtttacggagttgcagcacccggatttgga

SEQ ID NO: 82707 - DNA, 1874 bp, Heterodera glycines
ggttctgatcactcacagagcagctattactgctgtcccatattttctgatcaatcgattgaactgtgtggatttgtttgatcagcacaagcatcaacagcaagagtgggcggggatgggaagcgggatgattgtgacgcgtacactaatgggtgtcgcggagggtgccgacgaactctcaaccgcaccaccaccaccatcatcatcatcacatcatctccatcagcagcatttcagtgtgctgctactttatttgtgtgtgtgtgtgtgtactcattaaccactgttattatcgataaaaaccggttgctagctgtgagtaaatgaattagcacatcgaccgtccgcccgcctgaccgccacacatcccctgcggggggagtggcgggagatggcggtaaaaatgggagaccgcggaacagtgtgcggacggttggtgtgtgggatggtgtgaaatattattaaacggttgcgcgggactcaattcattcaatttatgtaataattaaatttaaatgaaaattgattggagcggggcggaaagaatatgggaatggtcaaaagtcagcagaaaatgaacaatggacaagaatgttgagaaaaagtgatgattaaatgaggagagttgataaattagtgaaaaaatgcaattaataatttaatatatggcgcgaaacgagaaatttataaataaataaattaaattatttgaataattacaaaaatttttaagattttaattccaatgaactaaggctatgaccataatataaataaatttacattttaatagttaaaaaaaaagcaacagaattaaataaaataaagaaaaaaaaatttaagataaaatttgcaattaaatgctttaatggcttgctatgggcaaatcgatgggcaaaaacgaacattgatgatgattgtgtgggggaatgggtgttgtacgtgggtgtaaaatggcgaaaaaaaacaatttgtgtaaaagtgggaagaaaaatgctaacaataaggaaggaacgaagctgacacgacactcttctgtgaacatgagtcatgtcatcacagaagaagaagaagaagcaatgaacaaaaaaagaaaaaaaaagaaaatgcgaatgcgtaaatgtttaattttatgttcgaaaatgagaaaaaaattttaattaaaaaatttgtagaaatcataaacgatttatgcattaataatcgatgtatgaaagtttggacgcaacagaaaatttgcgtaaaattgaattttcgtaatcggctgatcacggatccgacatacatttcgaccacttcctaaatcctaaccccgattctgacacaacgtcgaaaatatcactaatccggcatttggaataattccaaattcgtaaccagactcggatacaaacatgtaaagcacacctcgatacccttagggaataaattttgacactggattttgatgaaaaattattttagccattttcacagaaatgcttttaattaaacaaaatgtaacatttatttaacccaattttgacccagattttctcatagtgtgtttgcatttgaagcaactcggagcttgattggggtagggagtgagctgctctcccgcttctgcttgctgattttgatgacgggaagaagcggtggaaaagcaatgaaattgaggttggatattttgcagcccccgcctcccccgcgggcaaaaatgggcaggaatttgagaagacgaagatggaaatggacacacacacggcgtgggaaatgaatgagaatgaaattgcaaaaccccaaatgaaggacatttaagagcaatggttgcttgttggtggtggtggcggtgctggtggggaggaagtagcggaaaaggcaattaacaaacg

SEQ ID NO: 82708 - DNA, 544 bp, Heterodera glycines
atggttgagcacgatggaggcaccaattttgaggaggaagaaggcaaacaggaagatgaagaggaattggatgggcgcccggcccaaaagcggccccgttatgtggcacctgttgaggaggaggaggaagaagccgggaatggcaccagtgccggcaactgtacggcggaggtcgacgagctgaaggcggtgatcgaaggaatgaaaactgagcttgaagcggccaatgaagaggttggagagttgaaagccgagatgggcaagctgagcgcagaaaacggaacattgaaggcggacatccgttcaatcaaagcaaagatcggaagtatggcaataatcatccgtgggaacagagaggagcgcaatgagatgcacgaggaaatgcaagagatgaaggcggacatggccgagttgagagcggaaaatgcaaatttgaaggccgacttcggcacaatcaaagcgggcattggcggaatgagacaaatgtgcggcgagatgaaagaggagcagggcaagatccaaagaggaaatgcaagagatgcag

SEQ ID NO: 82709 - DNA, 430 bp, Heterodera glycines
taaaatggcagaaaattgctcccaatttgccatcaaatgatgccacggcactgcaatcttttcacgcactgttcagaaactacagaacagtggcactgcatgaactgaagcagcaatgggaattgcaaaagtcaattgcaaacaaagcgggaagaaatgtgaaagaaacggccaaaaaggttttagttgccaacataattaattaattaccattactggtttgattttggtgtatttaaatcacaaaaaagtacttaaaaagttcaaatttactaaatgcccgataaaccctatgctgcgaccctaattttaactattgttatttaaaagtttttaggtgcccaaccgtcaaagtaggatttttagttatttattaataactcactctaatttgaaagatggacggagaaaaattagcgcctataataaa

SEQ ID NO: 82710 - DNA, 2434 bp, Heterodera glycines
atgccaaaatcaagagttcaaataactgagccttttcaaaacgttggccttgattacatgggtccacttcaaattaaaagtttcactgaaaaatgttggataatacttttcacatgtttctccacacgtgggatacacctcgaattagtgacatcattatcagttcaacactttctcaatgcatttcgcagatttatttcaagaaaagggacaccgaagaatatttggagtgacaatgcatcacaattaaaacttgcatcaaaagtattacctgaagtcctaaaattaaaggacatacttaaagacgactcaattaaaaactatttcgaaaaggaaaacataaaatggattttttcaattgaattagccccttggcaaaacggagcaatcgaacggttaaatcaaaatgtaaaatcagcaatgaaaaaagcaatcggaaggaaattgatagaatttgattcatttcaaacacttatttgtgaaatcgaagcattagtaaactcacgaccaattacattcatttatgacgaaattaattcgtaccaaattcttagaccaatcgattttatactcccgcacaaaaatctatgcattcccccaattttggaagaaaatgaaactaatgacccaacatatttaccaaaaccaacttattatgaccaaacaatagagttatggaaaaagacaacaaaaattttggatgactattggaaaatttggacagaagaatatttgccgagtctgagagaaagatacaaaacagaaaataaaaacccaaagaattgtgtaaaatcttttccagaaccaaatgaagttgtcataattcacgatgagacaccaagagcaatgtggaaaacaggaattattaaaaatgtcataaaaggaaaagacggtatcataagaggtgctaatattgaactaccaagcaaacatgtcattaaccgtccattaaaattactatatccgttagagattaacaaaaatgactgtgaagagaatgagactatcacaaacttaataaaaaccactgaacacaaacaaattggtacaaatcgaaagagaaaacaaagtgtcctatcatccccaaaattaagcaaagtatttttaaacacactcacgtttcttctattatttatgcaactcttaccatgcttatcccatttatatgaatgtccaaaaaccaatgaaaaatggagaacgaagtatacaacattttgtgttgaaaatggatttactatcagacaaaataaattaacaatggaattttgttatcgtaaaatattttgtcacaaacaacacgtcataaaaaatcacccaccctattgtggaccacaatgcaaatgtcctgattggacaattttttgtagttttgcctcatatcaccgaataaaaagagaaataactgatcaggagaatattcaaaatattatttcattctttaaaccaaacgtttgttcattcaataaaacggaaaaatgctccctaatggataaaaatatatttagttcaataatgctttatgataatagcattcattcagtcaaaagtcttaatttacttcatacacaagccaattctcgaattgattatcgttgccttggggagggcaatctgacgattggtacacaaaaattctgtcaagaacacgaatgcactgacacacatggaacaaaattttgcttttacgagccacacgaaaaaacttatcttgtgaaatcagaccgagaaattatcccaataaaagcatggggaagcatcgaaagaattttttatttggctaatgacacattgatggatgaactcaaacgtaaaaaaagagaattcgatccgttcgaaaacgaacaaatatccgctgaatgtacaaaaggtggaataaaaataaacccaactcatactaccacggaattagaaattttggttgataaatactttatcctaaagcgaagtccacagagcgaagaatttatttctctacctacaaaaattactatgaacgaatataaaccagtcattaaatttatgaaaggcacaagcgtatctgagtacaaaaacttaacatgtcctccatcaccaatctgtgaattaattatctgtcgcttctgtatggaatacattcgaaacccacaatgcataggtcaaatgcattgggcactaattctgatcatgataatgctcaccctttacgttatcacccttagtcttaaaattataaaaatactataccgcttcaccatatttatttttctatcagtctacaattgcggtagaaaaagaaaattacagaaaataaaaataattaaacggaaacaatttatttatttaatcatgattaggcttttactcaattcgccgactattttttcatgtgatgaagtcactaacatggtagcaggaacaaacgactgcgcaattgatcaaaacggaaagattgaat

SEQ ID NO: 82711 - DNA, 46 bp, Heterodera glycines
atgtttgaaagacgtatggtaattgacatccccgaattctatgttg

SEQ ID NO: 82712 - DNA, 151 bp, Heterodera glycines
atggatgctaatgaaaatatgcaaacagaagacaataaaaaaggaaaagtgaccaatgatgagcgtaacttggtcgtctcatttattcagtttttgcgtcacaaagtctcatcgaaccaatgcactgatgaacagattgaaggccttgaag

SEQ ID NO: 82713 - DNA, 457 bp, Heterodera glycines
atgcttcgtgttggagaggctgtgagttattaccatggatttttttaaagtccgattttaactcggcaagcacaaatcttttgttgaatcgctttttccgttttcagcttgctagatcgatgcaagagagtaacccggatttggttgagcagctccgtcgtcagttcggtggagaggacggaaacgatggtggcgccggagctggaggcaatcagaacaacaacaaccagcagcctccgcccggcagtgtttgagaagtaaaaatatcagtgaaaaggagggaacggacagaaatttatgtgatggtccgattaattgtccttctccttgtgctattccttttgatttcatcagaaaaactattatattattatgtgttctctccagcaggaaccgttatttgttaatgtcacataacgcttataaatctattcttggaaaacatcttatgaaccaa

SEQ ID NO: 82714 - DNA, 451 bp, Heterodera glycines
atgacggcacttcgatacgacgcagcaaaagtggtgataactgagcaaaaccaagaggtccgaattttccatttgttgtccgaaatggccccaaatttaatatttattcaagttgcaggttgttggcctctctccgtgctttttggcgcgcctttttggcttcgtcttttctcgcggggtcgtgcggttggtggttgtccggggggtgctcggtccgttcggtgctcttttcttcctgcgtgttccgtggctttcgtcctccgagtttgggttggcttcggcccggcgcttccctggctcgggttgttgccgttgtgccgtccgtcgccttcgtcttcgcttccggcgtgttcttcggcccgtgcgtgttcggctctcttttttggctgctgcgctggctcttcgcccgtttccctctgctcgtcgcgttcgttgcttctcgcctccgcga

SEQ ID NO: 82715 - DNA, 1434 bp, Heterodera glycines
atgaccgagcagcactttggcattaattgcgttgacctcgaattgccgatggacatttcacaattcaccgttaacgtctcagcaacactttttgatctatcgtgtgcaatgtttcttaaagaacgggaccttgacgaactgcccgacaattatcttcaagtctcaaagcgtggcaacttgaagcctgtgaaatgatgcctacagtaatgagatgcaaaaagtagagtgattctcttgttagccgacatttttgaccgaattttgcggatgattagtgaacaaaaaaatgatgaattaataaataatttataattgagatacaatttttaaaaattgtcatgaaaaaataaaacgtagcagcagggcactactgtattgctctgtgatggctggcagatttgctcgttcttataagatttttccaaaattaaaatcagctttttaatttagcaaaattataaatgaaaaaaattaaaaaaaattaaaaaatacttttaacctaaaaaatatattaaataaattaaaaaattaattcttttttaagttgttttagaataattcgtaatttttttaaatttttttaactgcctcttgattttttaaggcatttataaaaaataaatcctttttaaaataaattgtctagaagtgtacatttgtttatattaggtttttaattttataaatcatatttttgtttatttatattatattttaccaattgtttattaaattcatcattttctaatcatccgtaaattcatttgcatatgtcggtcctaaaatgctgcactacgattatgtaaaatctcttctcaaatgacaagtttagatcctctgaacttgttgggtgttttgttggcaacaaattgcccataactcatggtcaaatattcgcgttgtgtcgtcgacatcttgggaaatctcgttttgccgcgggttttcgaattcggcactgttccagacgcagtccagaacaaaacaaaattataatcgaatcgactttggatttttcttttaccaaaaaaaagtgatttaaaaatttttttaataattattatttccttaattaaggttttccataactcgaagtttcccaatcaacattcacgcggttgaaacagcaaaaaaacgaattcctattttcttaattgattttggaaacaaccccgatcaaagtgcactccgagaaaaaagtgatggcattgagatgctaacggatatggacaaaaaggtgaatcaattttaaataaatttaagtatttattttattaatctagaactttttggggaaaattagggtttttaattatggctcgtgtagtgacctacaaaaaatgcaggtctggtctggtatatgtatatgcaatttggaaaaagcaaaaattcaattttttgaaatgttatactaattgtttataacttaagcaaaaa

SEQ ID NO: 82716 - DNA, 2189 bp, Heterodera glycines
tcatgtccaaagcggcgattgctgggctaaagttgatgctgagcacgggagagtacgcggatgtgcactttttggcgggggacggagacgcaaaagaggcaaattttgaaaataaaaataataaaattcgatttttaaaaataaaatcttttttaagcttgtaccagcacataaactaattttgaagtttgcttccgacgtatttgaggcaatgttccgttttgacgccaacaaagaacaaagcgaagacggtaaaaaatggattaattatttttgttaattgattcaattagtctctgctaattaacctaataaatagggatgcgacttttagtgacgaaagtctcgaattagttaactaaaatagtgacgaaaaagtgccaaaatagtgaaaaaaaggaattttccaaaaaatgttgaaaaagtgtaaaaataatgataaaacgctaaaatagtgaattttcactattttaagtgacgaagttgccaaaattgtgatttctaatgaccaaaaaatacgtccaaatgaaaaaattttaacgcagaaatgcgttttttgagctgctttcttcaaatcaattgagcaaaaaaaaaaaatcactagaaattgtatccctaattttcaattggtttcggttgatgctctaatttaaatttaattagcatctgctaattgtcttaattatttctcaattagtctctgctaattgccctgttgtggaagtgcccgacgttgaagcagcagcgttcaaagtgatgttgagcttcatttacacggcagatttaagtgaattgaacggagacaatgcaatggcagtgctttacgccggtggattaatttttagaatttaatttattaatattgaatctttttaattagccaaaaaatacaatattcctgatttgattgaccggtctttgcaaatccccttctccaaattgcgcaatgttttcttcgctttagcccaggcccgtcttttcgacttggaggtgaaataatatttttaaattattatatggaataatctcatcgattaaatttattttttaaagaaaaacatccaatttattgtttattttagaattatgtcaacaattgcttggcttacattgacaataacgcggacattttaatcaaatctgatgcttttttgcaaattgaccaaaaaatgttgtgcgaaattttggaacgtgacgaattgaaaatccgtgaagaaatttcaatttggaatgcagtaaattttactttaaaaataaattaatttaattggaaaatatgtccattaatttaaattatttttttcggcactccgttggaccgaccaaaagtgccgtgaaaatggcattgaatgttcagcagagaatcgccgtcaaatgcttggcccggcattgttcaaaattcgctttccacttttctcaaaagaggatttttcgggaaaaattggtaaaaaaattaatttgtttttttttggtccacctcttttttgaactttttttattttataaaattattataattaattttttttaattttttttcaattgttcgctactgtattttccatattaatttacagttacatccggcattttaacagcagaagaagtggtcaaccttcaacaacaataccgtaggaattctactggtggcttactgtacccactgcaatttccgaggcacggacgacgcacatttgctgaatcgaaaatggaaatttttctggaaattgaaaaaacatcggaatttgtacgtgagaaggccgggtgcagtcggtacagcgacaaagtgtacatcgatggattgccatggaaaataatggcacaaattagcaaaccgtggggaggctttgatgaatggtttgacatttatcttgtgtgcaccgccgcttcaaaaattgatggtgaaaatttaaacttaaaaaacaatattttgtattgttttagttttaaacctttgacggacttatggcgcaataaaaaaaattcacaaaatggggcaatacaaaaaaaaagcaaaaatatttttttgttttttttaatgattcgtttgcccacgtttagccagagtttgtggttgtaacttttttctttgtcaaccaaatccaaaagattgttgggtatcattcgaaagtccttcacatgcttgtgggacctgcaaaatttcggaaaatttcgttaaggttcaaaaa

SEQ ID NO: 82717 - DNA, 59 bp, Heterodera glycines
tgtcctaccgggaccgggacctgagcttttcaaaacccgggaccgggaaccgggaccgc

SEQ ID NO: 82718 - DNA, 286 bp, Heterodera glycines
atgaagaaatctgttaccttcgctgttcccgaacaaaaagaaatcaatcaaccaaacgcggaagtggagccaccaaagtcggacactacaaagaagcgcaaggtggaggaccgggaactgtggaaattggcaaaagggaaattcatgctcgcgacgtacttatgtgcaggttaaattgaaatattaaatttaaataaataaacttaataaaatttatttagacgactgggaccgactgtttcataatcaacagaaagtcgcgcgcttggaagatggccgttttgcg

SEQ ID NO: 82719 - DNA, 965 bp, Heterodera glycines
atggagaaagagaaagtcgagctgcaaacggatatgctgcgcaaggaaatggagaagcactttcggcgtcaaatgttggagatggaagaaagattggatcaaaaatggacttcgctggtggataaagagcgacaaagggcgcagcgaatcgcaactcaaagttctgcggttattggtcagctaatgatgacaaagggggatgaagagaaagaaaatgaaaaagaggggagaaaaaaataattatcagcaatcgctgtcaatggtgtttgggggagggcccagtttcgttcgggagtaggaaatgtggtcatgttttttgttgtccccaatgctctgtcccgataattgccagtgatgaacccaattgtctgatttgtttcgagaaagtcacccaattggaatatttaggatcttaaaatcgatgaaaaataccgaaaataattaaattgatgtaacatgatcctaaatattagtgctgctcgagagtatcagtcttgagtctaggctcaaaaaattgtcggtactaaaaatttttttaaacgcttttaagaaaataagaatgtctctttttttcagcactactaaacatgtcatctccctttcattcaatgattttattttaaaaatgtattgagaattacagaaattttggcttttagcacaacactctaattaaaatttccgtaattgaaaaccctattatgatcattgtccctcaccccccttaaattatgggttgagcggtaccggtgctggtactgtaaaattgtgtacctagtaccggttttgaccggtacctgtactaatactgattttcccaatcaaaaaataccgctttttcaatccaaaaattatcggtaccgattaccgttcaactcttcctttaatacataaatgtttttcatgcaattgaatttaatcattttaatccatttttattttgaacaaatttattgaattaaaaa

SEQ ID NO: 82720 - DNA, 256 bp, Heterodera glycines
cttcatcttgtccatgtcaaagatgggctctcattgcaagaagctgttgatgcatcggacgggcttgcggtcattggcattttttatcacatcggcgatgatggcacatcaatggccaatttggaaagtggactgaaaagagtggcagaaaaaggcatttttttttaaaatgaaaatataaaaattattttaaatgaaaatttctcactaaaattattgctttctactaaattgaaaaaaaaaacaaaattttcca

SEQ ID NO: 82721 - DNA, 703 bp, Heterodera glycines
atgctcaagttaaagtgtcgtttggtgtgtccaatgaaatttcaccaccatttttttacatggacccattggcccatttatttcaattagcaaatggccaaacgtcggacgattgccaatttaaaataaaccaagcaaaacttcttttaaagcaattcactgatcacattttggcttctggcgaggaacagttaaagcgaatggtttcagaagctgactttttgaagattaaattgagttctgagcaaaaattgttcgaaattggcccaaacggactgcacgagtaccaaacagtaaaccaaattcaaaaggaactcgaaaatgtgctttatagtaaagaaaatgtctcggctattaccattaagaacactgtgacaatgtttgaaataatggaaaaattcgcaatttaaatgtatcggcacaatcctttttagacggcatgcagcacattacaatggaagcaaatgaggaattttaatttgttttctatgccatttcctcttttgtattgacatgttaattacgtcatattaaaaccaccctaaactgtttccaattttggttaaattctttatttatttttggtgttattttttgaaaaaaaggttccatgattagaggattatgttttgaaaaattggaagatcattcattgatataattttataacttttcaaatttgccggcttctacttttaataaa

SEQ ID NO: 82722 - DNA, 529 bp, Heterodera glycines
atgtcaactatagatgttgaagagactatcaagagaattcaatcgcaaaaaggtgtcaccggagtgattataatggacaatataggtaagaactcaaaaaaacaaacgagggtctcacaaaatatgtttctgaaaaaaccatttttcctcgtgtttaggccgtgccattcgttccacgtttgatgatgacaccaccgcgcaccatgccgcacttcttcaacagctctgcgaacggtccaaaaatgttgtgcgcgaaatggacacgagcaacgacctgagcttcatgcggttgcgcaccaaaaagaatgagatcatgatcgcaccagacaaaggcatgcgctcgtctttcccgctttttggggcctttaaatttgcaaattttaaatttgggtgtgtgaaaaagaagtcaccgacaaatttgtaggttcaagtctgtttcttttaatggcgttttgctctcggttttattttttcgattccattttcggaaaatagcgagacatgcctctttttcacgagattactgaca

SEQ ID NO: 82723 - DNA, 1384 bp, Heterodera glycines
catttctatcactgggactcaatccaccaacattccaatcaacgggactcaatccaccaacattccaatcactgggactcaacccaccagcatttcaatcgccaacacttaaccctccagcatttctatcactgggactcaatccaccaacattccaatcaacgggactcaatccaccaacattccaatcactgggactcaacccaccaacatttcaatcgccaacacttaaccctccagtatttcaatcaacgtgactcaatccaccaacattccaatcaacgtgactcaatccaccaacattccaatcaacgggactcaatccaccaacattccaatcactgggactcaacccaccaacatttcaatcgccaacacttaaccctccagcatttctatcactgggactcaatccaccaacattccaatcaacgggactcaatccaccaacattccaatcactgggactcaacccaccaacatttcaatcgccaacacttaaccctccagtatttcaatcactgggactcaatccaccaacattccaattaacgggactcaatccaccaacattccaatcactgggactcaacccaccaacatttcaatcgccaacacttaaccctccagcatttcaatcactgggactcaatccaccaacattccaatcaacgtgactcaaccctccagcatttcaatcactgggactctattctccagcatttcaatcaacgggactcaactcaccatcattccaatcgctgggacctaacctcacctgattcttcggtatcgcaaccaacacttaattctcctgcatttcaatcactgggactcaacccaccaacattccaatcaacgggactcaatccaccagcattccaatcaccgggactcaactcaccatcattccaatcgctgggacctaacctcacctgattcttcggtatcgcaaccaccgagactcaattctcctgcatttcaatcactgggactcaaccctccagcatttcaatcaccgggactcaacacacctgcattccaatcaccgggactcagctctccgacattccagtcactgggactcaattctccggcattccaatcagcgggactcaactcaccatcattccaatcgctggaacctaacctcacctgattcttcggtatcgcaaccaccgagactcaattctcctgcatttcaatcactgggactcaacccaccaacattccaatcaacgggactcaatccaccagcatttcaatcactgggactcaacccaccaacattccagtcactgggactcattctcctgcatttcaatcaccggaactcaaccctccagcatttcaatcactgggactcaatcctccggcatttcaa

SEQ ID NO: 82724 - DNA, 617 bp, Heterodera glycines
atgtttgcattgtccacattcattttcaattacggcggtaatttggtgcagaataaacgcaattaaaagggcagtaataattgcgggtttcatgttcgtgttgggtttttatctaccttttgattttgaaaaactcattaaatttgttaaattttaacattaaatttgggttttgctttctgcggtccaattttttcattgttttatcttttttttaaaatttttttaaatgaccgccttaggtatatttataggatggattaatttaaaaatattaaaagaacttggatggtaaaagaaggaaattttaaactttcaacgattattcagcattgggtggaagagaaaaatgcaaattttttgaaacattaaatgtctgctgaattggaaatgctataaaattgattaattaaagaaaacaaaataaagtataaatatttaataattttagtaaggaataaactattaattaacaccgctaataatcatgctcgtgttcgtatcctaattaccctagccaataacgagttacaagtagtagatttaaaaaagcggaaaaatacgtcaattaattcgaactaaaaaatggtggagcgagaagaaatgacaagaataaa

SEQ ID NO: 82725 - DNA, 1035 bp, Heterodera glycines
atgatcactgcttgggctcagaatggcgaaatcgaatggccacgggtgttgggagagaacccaaatttgtggggaaaggaacaaaaagtgttggccgatgcgaaggcaaccgaagacaaacagttccaagacccgaaatttgaacaaaattttaagtgggtttcaccaaatgtatctttatttcctaatctgcatagcattttgttgtgcacccattaatttgccttaatttagggcaatgaatgccattggtatggctcatcgcggtgcctaccattacttcagaggagagccgggaagtgccggtgccttggagcaagtgcggcattttctaaacacaagcataagggcgggattcaatgtgcacaaagactttgctgtggtcaatgttgaaatatgtgagtttttaaaaaagtttcagtatattttaatattttaaaatattaattgccaacttggttattctcggacagtgaactcaaaataaatgaggaagggaagcgggtttacctaattagcatataattccaagaaattgtgatcgaaagttgctaattcaaattagaatctcattaatagtacactgttaattattttgttatttaattctgttgttcagataagaatgaaggtgcagacaaggaccaattcacgggaaagctgctcaattttgtcaagttactaaagagcaaagtgccgaaccttttcatccacaccagtgtcgatcattggtcggcactgatcaacaacgatcatgacgagttcttcgctcaatttccgctttcggtgatcgattatgacagtcaacagagtccggcattgccgcgcccgtggaaagtatggcagcggtggttgcacacaatgactgtgccggtgaatggcatttcgggcaatgtttggctgagtcgagtgaattgcagcgtcaaaatgatgccaaacattttctgatgagcgaaaaacaaagtgatcattggaatcatcctgttgaaaaatttatgaaattttaagtaccaaaaacatttcaaaacaaaggca

SEQ ID NO: 82726 - DNA, 829 bp, Heterodera glycines
atggcattgccattaacacataaagtggcaccatttagtcacatgactgaatacattaaaaattttacgatgaatctaaaaatggggcaattaaagaacacaaaatttaaagaaaaggagaaaaatgtacgaaaaatatatttgacttgtccaattagtgtaagcacaaatttttaccaaattataaaatgttaagaaaaagaaaagagcgcagtaaaagcgaaatagaaagaggaaaagaaaaaaacaaaaacgaaagaatacatacatttctttgtttctctgtttcctttttcaacccatgggaaaattgactgaatattttctttcttatatattaatttttttgtttcttatgattgtgtgagtccagtgaatcgttcggtgcgattcgtcgcggagagcgaagtgcgacagtttgtggagggacggacaaaggacaacagcagcagcaacaacaacaacaaaaacaataaaaaaattcgcctggaggagcaattagttctaattgaggagggacgcgggcggttaaaaatacgcgtcgaatggtcggccattttgactgaccatcggatggagcgggaacactttgtccgttccgttgatacggacatttgtcgttcctttggtcgatgaagcggctgggctcccactttttttaaaaattgtgactcacattcattatttttatatacatttatttttgttatttttaaggcaaaaatgctatcgtaacattttctataaatcaaatcagtgattaagtaaagaattgtgggtgcaaaagcaaagaaaattctagagctcatgttaaattttatccaataaa

SEQ ID NO: 82727 - DNA, 632 bp, Heterodera glycines
atgaccttccgttgtgcacatttggcaaaacagtaagtgaaataatttgggcaaaatcttttgcgtcattagttattgcttggatgtcaagttcttcattgtcttaaaattaaatgatggtttttttatttagagctcgaccaggacttgagtccaggcctgggtttttctgcgcctgggttttcctggatttgctcagaaaatcaaggtcctgatcaaatatgaaacccagatccaggtctagagttggcataaaaatctatattttctggacaacatttagaatttataaaaacaccaatgatttagttcaaattataaaaatgaaatggattaaaatatattattatcgtaattagaaaaagggagatattccaacactattaacataatttaaatctttgattgacttttttattacaaatttcaaaaaagcaaagccaaagcctatgtttttcctagaccttggttaaaatccaggtacatgtctccaggccttgtcgagctctaattatatttgactaattaccctccttttggtcattgggtgccatcgcgacgacacaattcaaaaacaccacaccaaaaatgataagcgacttggtgtcaaacatttattatttatcgtgaaa

SEQ ID NO: 82728 - DNA, 904 bp, Heterodera glycines
atgcattatccgacgcatgtaaaacttccgcaaattgaccgtcgaataggcaaagtcgaagatgcgttccatgaacattcggccagcagcgattgccacttggggcccatagccgccgaagccgcacaattggaagaacgactcgtccatcaaatgctcgccaatcactggcaaattgtcgaaagtgttgaagtcctcgtaggagttccaggcattgatcaccttggacagaaaggaaaacttttttcattgaattttttgattttaatttaggctttgagttcattcattactcgggaaaagatttgttcatcaactgcatttttttctgtgacctttgacgaaaaaaacctacaaattgtaagttttaagaaaattgcatccggcataattcttgccaccactccaaaatttgatcgctatttctgcgttacatccatgacacttctgcaactttagcgttctccttgcttttttctagggtatggcaccgacccttcgaggtgagaaaagtcggagtttttcgggctcagctaggccggagtcgaagtccgggtcggggtggaccaaatcggtcagagttggggttcggagtttttcatttttgcctttgctcatatagtcaaaaaattataccatgtttatttttgtaaaaattgttgcaccatcatgatgaaatatttattgtaatttgccttaatcagtgctaatcgacaacctttcattaaatatttattattaaaatcagacattatttcctacatttcctctttttgttttgctcattttggtatatcgatttcgatttccttcctgtcacctggccaattccacagaattttcgtcaatcaaattaaaattttcatgtgaattttgttttcagttctcctcattggcgaataaa

SEQ ID NO: 82729 - DNA, 564 bp, Heterodera glycines
atgatttttgttgtcggcattttcaggggaatttggcaatgtgtcagttgctgatacactacggagccgacggtcagtgagtgggtgatgagtcacttttggccgcgacgccggcgaagggccaaaaacagcagaaaaatcagcaacacaaccacaacaataataacaaccgattgcgcagctcgtgtccatcgacaatttcgaatgcaaaacacaaaacaacttacggaaacgcggctccaagaatttaacaattttttgagtttatagagtgatggtgagccaagcgatggtgatgacggtgaagctgtacaacgccactctgacgaggccgtgttggacgcacttcggcatcaattcgccatgcttcggctggacgaactgcgcgagcggttgcgccgccgcaattgcattgcggggccaatgaatgcgggcaatcgacgcatttacgaggccaaattggctcatttggagacacgacaatggcacggaaaaggaggacaacagcagcagcagagggacccaaacgcaataaaacgtaacaaaaggggcgggaatttttaa

SEQ ID NO: 82730 - DNA, 841 bp, Heterodera glycines
atgccctcgggacattggaccatttggcgaccttctccatgcgcatacgaatcaacagcagtcttctgtcaatgttttgccgtcgaacccttcgaaacggcacagggaaaggctaaacggagaattggagacggtgagttacggtattcccattcgatgggaacaaaaaacagtgaaattaatatgggccattcataattgaggataattccagcgattgttttgctctcttttcaggtggcctctctgttgccctacgaggagtcggttcttcaaaggttggacaaattgtcagtgctccgtctggcagtcgcatttttgcagatcaaagcacatttccaaggtgaataaaagtgattagtacgtgctatttgatgttgggtaattatcggtgatattctgctaatgaagggtggacggggaggggggcaccgacttgaaaatcatatccatccgtcatgctaaaaggggttcatttcagtgtcgagtggggtgaagaacagctgaagagaaactgagaagttggcacttgacaaatgaggggagagggaaaggcattgccaatgggcatttaccaagatattagtaccattctcaattaatgaacaaacaaatgacataacgaaatgtccatccgagtacgaagggggcgagaaagacaaacaaacggcgaaaatggcacaaatggcggaaaggggagggggagggggagggggggggagtgattatgagaaagcgcgagggaatggccaaagcggcacggaacagtcaatgggaggggtcccttttttgggcttctcggcgggaaatttcggcaaatctgaggacaaaaaggagacaa

SEQ ID NO: 82731 - DNA, 324 bp, Heterodera glycines
atggcgtacggtaactgtgtgaagcgtgccgatgagaaggtgaatttgggaaattaaatttgtttttaaatgtccggggtattttcccaatttttctgtttgtgccggatttaatccgaatttttcaaattaaatgcgcccgtagcccctggggggaggggcggtggaagtgctaattgtttgaattgtatttaaatgctcatcaatcagtagacatgggacgcgtggggcaaagaaataaacaatgcgttgagcggaggtgggctttaaaaattatgaaataacaaataaaattcgaattttcaggcaaaattgacctgctaa

SEQ ID NO: 82732 - DNA, 1128 bp, Heterodera glycines
gtccgcttggccttggccatgctgaggccggcgaagcgccttttgacctgcattttggtgccccttttgctcagcccattgccgctgtttttcagaacgaaggcaaatttgaataaaattgtgaaaaatgaaataaaaataataataaattaacaaaaaagaaaaaacccacaaatgggttaaggaggcttcctgcgcttatgtggtgatgataatggggtcggttttgggctctgtttttcaatatataaaaatgttaatttattattaataaccctaaattttctttttcatataattttaattatattattatttttttgttttttcaataatttaaaattttctttttcttttttataaccctttttaattccaaatcttaaaacatttatttatttatttatcctttttttgttatttcccccatttagcctgtttttggctcaccgaagcattgccattggccgtcaccgctttggtgcccgttttcgccttccctttgttgtccattgacacggccagcagagtgtcctccgtttacctatcggtgcattttttaacaaaaaaatcactgaattttcaatgataattttgtttttatttttttgttaaggatagcaatttcgtttttttcggctcaatgataatggcaggtgaataactctaattggggatggcttttccatttttaatttgttcgactttaattgcccgaagaatttaatttaattgccctcatttgtcagttgcggttgagtcctcgcgacttcacgaacgaattgcgctgaatgttttgctgctgaccgggccaaacccgcgctggtatgcccataatttgcccaattaaaaattgttttaaactctttaattgttaattaggctaatgctcggcttccaattggccaccgcttttctctccatgtggatttcgaacacagcgacgacaatgtaaaaatagtcaatattaaatatttgaaattgaatggatgcaattttaggatgatggtcagttttgtggtgacaaaagggggaaggaacatttgaaacaatcaaaacgatggcattttgttgaaacaataattttaaatgcaggtgccaattgttgtggcggtgatcaaagagttg

SEQ ID NO: 82733 - DNA, 1006 bp, Heterodera glycines
atgtacaccaataaaattgcaatcaattttttttttgatttgaaactacgcgatttaggttgacaatacattctaattttacagcaatttacttcgtacctttgccctttaaatcgttcaatgaattctttattttttaaaataaaaaatgcacattttatgattaaagtataatttttggaattctcttaaaacattttattttaaatttaattataagtttcgggcggtgcctatcggcaccggtcatcattaaatattataatatcgtttactaaaaatttttaataaatataatgaaaatttctggtatttgatggtactcataaatatatttaaattattataaaccgtagctgccactgaatatttgccgccatcgaacaccagcttgcccctcatgacaaaacttcttcagagtcttctttattctaccgtttacctaaaataaagttaggatttaacagatttatgtaaggcttgatataaaattttcagtaagtttatttttaatttaatttaattaatttctataaaacaactatagttttgtaaagttgttgaatgtgtatccaattaatcattttcgtttaaatcaattttcacctttttgctaattcgctttttatcatttttttgttaaccaaatttttttttaattttttataaattaaagattttttatttttctcataaataatttttaattgttaaaaattacatagcctaaaatttttagccaaaccggaccggacttttaaggttgaaaaaccggggaaaaccgggaaaaaaccggaaatttcccggtcccggtcaaaactggtcaaaaccaggacttcggtactaagttgtccgtgttttggtcctggtcccgaccaacactacctgaaactgatgctcccccttagagatatgtagaacaatattttttcgttgatttttatttatgattgtatttatatcttattttattttttgccatgaatcattattgttaatcccttta

SEQ ID NO: 82734 - DNA, 129 bp, Heterodera glycines
atgaccatgagagtgaatataaatgtaatgctaatgaaagatatgggagaatactgttcaaaattgttaacattttcgttggataatgaagcatgtacagaggggaatagcgatataaaaagaagaacg

SEQ ID NO: 82735 - DNA, 1305 bp, Heterodera glycines
atggtcgaagatcggccatacatcaaaattatttcgggccttgaaacggtatgccaaaaaatctctttttaaaataattttggttgcattaggaagcccatccggcatttaaaaattacctgggcgagttcaaatatttgtgggtcgatttccacgccgttctgaacaaagtgttgcgcataaatacgtcaaaaaattaccagcaaattgagaacagttgccaaatgtcggaggaatcgcccgtggtacggcaaaatggcacaattcagctaatgttacggcccgaagtacagtaaaacacacggacgattttgatcatgatcatggaaagggttaagccaaaagcggggtctgttgtcccttccggttcctatttgttgatcaacaaaagtgatcgatcagtgccttcacatgagtgatcaaaaggcatttgccgcgtctgatcgggccgggaactgcgcttcactttcttacatatttatgcattccaaaaacggcagtgaaatcaaactgatcaaagaatggacaagttttatcctaaaataagaaactgatcagagaatggaacagattttattccaaataaacatggtgggggttctccattttatgagtccattaattcacagacatttattttcatcctcaatttttgttgggtcattgcttttttatggcacatattcattcaaaagttctaaaatagtagaaacagaaacaaaacaaattctcacaaaatggaaatgaaaagacaacccaaaaaattgtgattctgattaaaaatagaaaattgcaaaagtaactgaaggagattaattaattaattaattaactggacttggctgtattaaaataagttgattttgccaatttacaaactaagtaggtttcttaaattttgaatgatcaaagactgaccaatcagtttcatcacttccaattggtcaattccgttcatatgatcagtttcatcacttccaattggtcaattccgttcatatgtttggggtggctgggcccaatttctttcaaaagcttattatttattcaattaatttcctaaatttccgccctattctaaaattttcgctttttcagtcccttttttgcgattttggcaaaaaatttgcatttgtgaagcattattttgttgaactgaagagacaggtcaacatggaataccaattcattactgaggcgagtgaaatgctgaaaaagatggaagaggcctatgaaaattggatggggatttgcgggacgaaatgccgaattggaaatccaaaagtggcggacgacgtccaaatg

SEQ ID NO: 82736 - DNA, 933 bp, Heterodera glycines
atgcgctgggaacagaaccattggcacggcgactgggatgagcaaatgcgaacccatcccgagacgatttaccctgattacgatattctggtcaactcgaagccgtacttcctgctcaatgccactttaatctcacgctttcccaaaccgttgaacgggcagcagttttttgtttggttggacgccggatatggtaagcttcggcattcgatcttacaaaaaggatcagtgaattcaattctgtacgaagtgcttaattaacaggccatggatctgcctcagaaataccctacggagtgtggtcgccggtgctaaaatcagataaaatcactttggttcagctgacaccgaaaattgaccgggtcgaacgatacactttggacaaggcaagcagagcaaaagcgaaacaaacggcattggcaatccctcaaatgtcccttccttccctttaaggtgtatcggaaacaaaaatcggtggtcagtggaggtaaacaagcgtcccaatgcgattttcgcctttccaattttaggcttcttagcgggttcttccgagacaatcaaacgctttcacatatttttccacaagtccttcttagagatgttggacgagaaaatggtggacgatgaccaggcactaattaattaattaattatccatttgctttgctcttccgaatgtccttttcacttttcagacgactttgctcgtgacgatacaaaaataccaatccgatttcaacatcatattcggtggatggttcgatgccttcaaacttttgcccagtcagtgaccgttggcgccgcgcccgacgaaattcgatactcacttaatgcccactgcacatgatctaattcgctaaattcaattcatttcctattaattttaaaattttctaatgaaaaaacaatttttcattttaaccgtttaataaa

SEQ ID NO: 82737 - DNA, 429 bp, Heterodera glycines
atgagtagagttcgacctggacctggatccaggcctggatttttcctggatccaggtccaggttttgacaacctggatttttcctggacatggattttcctggatttttgtccaggaaatccaggtccaggtcaaatgtgaaaaaaaatccaggtccaggcaaaacaggaaaaaacctggattttcctggacaaaattttagaatttattatttcaagtgaccgatattttttcaagttttcaaaaaatgattaaatatatttaaaaacaaattattattgtaaattagatatttttagatgttcccaagcaattaattgaatttttcaaacatttttttgatttttaaaatgagtttaaaaaaatccaggtccaggtctcgaggagcctggatttttcctggacctggatttagtaggtcgtaataaa

SEQ ID NO: 82738 - DNA, 770 bp, Heterodera glycines
atggactgtcccaaaaaagttaaaattccccctgaacttattttggagttggccaatttccttcattacaattttcgctggttcggcatccgaatttctttgttctttgaccattttctcgccaaaaatcaaaggaaaattcgtcgcaataaaattaaggtataatgatttttcctctgcattaaataattggaaatgagaacaagggaaggtccattacagaactcattagacatttggtacctagtttttaatttgagctttttctcttgggtcctttttcaaatccgtttattttttctaatccctttattaattgtgtataattatactcccaatgctgttttcagcaactctttgaagaaatccgtgctcaagagaaagctgtggccgatgcgaaaaagttgttggaagatgcagctgttcgtttcggagaagcaactgctcgtctcaaagatttgaagcagcgctacaaaaagcttgtctcatttttatatttcgatttttattatagtgactaatttattgcaaacacagttggagtccgaaagaccggttttgacgccgcagatggttcccagcagcgaaactccaagtcctgaacccgtctcatcggtactgtaacttcaaaatttctttgctttttgtattttatggcaaggtgttccgtttaagtatctgagtagtgtcaacaggcgccgccatggattttatatatgaaaataacaattttctaatatttttcttgaaaaacttattaatttccaaaa

SEQ ID NO: 82739 - DNA, 754 bp, Heterodera glycines
gtgtgcggattgaaatggtctccgaacaaagagtatttggcatccggtgggaatgacaaccaattgttggtgtggagcctgcgacggtcggagcccattcagacgtacacagagcacaacgcggccgtcaaagcattggcatggtcagttggggacgtcccaacacgggcgatgggggaacacctacaaaatcagtggaaatttgtactccgaaatactgtcctcatattttgtaggtcgccccaccatccgagcattttggtcagcggtggaggcaccgccgaccgatcgttgcgtttttggaacacaatgaccggacaggcaatgcaatgtgtggagacgggcagccaggtggggaagaaaagggcgaggtcctccgtcccttaacatgctgttccaaattgttaggtttgtaacgtcgcatggtcaaagcacagctccgagttggtgtccacccacggctactcgtacaaccaagtgattctgtggaaatacccgagcatgcagcccatcacaaagctgtccgggcaccagtcacgcgtactttacttggtatgtttggtcgaatgaaactgaccgatttcattgtttactagtaattcacttaataatccctcccaaggcgatgtccccggacggcgagtccattgtcactggggccggtgatgagacactccgattttggcacgtcttttctaagtcatcaaatctgaaaaccgtacgttcgcgcctcaacttgcacagttgtatccgt

SEQ ID NO: 82740 - DNA, 1177 bp, Heterodera glycines
ttatcattttcctttttgttaagacagtcaacgtctgttaaaatcaccgcgaaaaccgcagagaaaagtgccgaagaatccgtacaaagttttggacgcgcccgagttgcaggatgatttctacctgaatttggtctgtttttaaacaacaactgctttttcccctgcttatttacgtaaaccactggtcagtcaccatttgctactccgtagtagagaaaaacaaaccctcaaaaatgctaacgaaattgtcaagaaaattagtcctaatatctttaaaatttgccttctttcttcataatccatctcaattatgaatttgttttcgaacaataaatgcaattaaatttgcaaataattcttggtcaaatgcgtttgtccgcaaatttggtaaaaacacaaaagatcatatcccattttgtgtcctggctttttaagtttggtccatctcgctctgttccattattttatttgttgtttttaggttgattggtcctcccaaaatatgctttcggttgggctgaacacgtgcgtttatttgtggagtgcctgcaacagccaagttgtgaagctgtgcgatttgagttcggagaacaacgaatcagtgacgtcagtccattggtcagaacggggcgatttgctcgcggttggcacgcagaaaggctttttgcaggtgaactatgaatgcctgttaatttaaacgagacatttgtctttttttcattcaattctttacatatttatccgtttttatggcttcagttccaaaacttggacaaatttttgaccctcgaattaaaaatcaatcaggaaagggctcctggttagtcctttacgggatcatatccgatctgtgctctcctaatcatactaattttacagatacatattttgagaaatataattgaattcgttttctcagatttgggacacacatgcgcagaaaatgctgcacaacttgaaaatccatgacatgcgcatcggttgcttggcatggaacgaaaacgtcatttgctcgggctcgcgtgatcgcttcattcttcaccgcgacttgcgcgacattcaacggtcggagaaacggatgagtgcccatcggcaggaggtgggctttcgagaacacacatatattctgacaatgaattcgaagcaacgacatcataatttttggggggggggg

SEQ ID NO: 82741 - DNA, 969 bp, Heterodera glycines
atgacgagaatcgtgaccggtccaaccaccgcaacacataaggcctggatcgtgctgataacctgcctggctactcgtgccgtctatcttgaaccggtcctggacctaacggcctcgtcatttcttctcattctgcgccgcttcacgtgccgacgaggcgtgccaactcggatccttaccgacaacggaactcaattcgttctggcatccaaagtttccgcggctctcgaagccggcagagtgccaacttcagcactggaccgattcctggcacgagaggcaatccattggcgttttatccctcagttgtcaccttggcaagggggagtctacgaaagactcgttgccttggtcaagagctgcttcaaacgagagcttggccgcgtaatgctctcatgggaagagctggtcacatacacagccgaagtcgaagcagtactcaaccaaaggccgctctgtcatgtctctgaagagcctgacggaatcctgccacttcggccaattgacttcctccttccaagagcaaaacttggcattgcattcactgccgatactgacctcgatgagttccgaatttcttccaccaatcaaagagatgcgcttatccagcgttggcattccgtgtcatcatcaatcgaccatttctggaatcgctggcagaaggaatacctgctgatgcttcgccagagattgcagtggaagttcaagaaacagaggaaccaaattgcgcgagagcccatggaaggagaagttgtgctgatctctgaagaaaaacttcctcgcaactgttggccgatgggacgaattgtcgagttacaacgctcacacggggagattcgaaacgccaaaattcgattggccacaggaaaggtgctaagccggcccctaaatcgtctttatcccttggaagtggcttcccctgccggacaagatgagagccaccagcagctcgacaaacccgccgcttga

SEQ ID NO: 82742 - DNA, 1693 bp, Heterodera glycines
atgacaaatgaatacaaacaaaaaggaaaatattcgcaaaaagaatggaacaaaaattatgccgaaatttgtaagaaaattggagtaagcaaagggacaattatcaaatggaagaaacagtttggcattagtcttaagagaataacggaaaaagaaaaaatggcaaaaatgaaaatttattggcaaataaaaagagaaaatccaaaaataagtgaacagaaaattgccaaaatgaccaacacttcggcgaagaacttttggaaatggaaagccaaatttggagaagcgaaataatgaggaagaaatgaaagccaaaaaagaggacaaagaaattctcgaaaattcggaaaattatattttatgtgacttttgtttttgttcattaacagggctgcaaaaaatatgcaaatgcataagtagtaacccctgccacaccttcgccgcttgacgctaattagaagtgacaggtggcggaggagggtgtcaattagtcactaattgggggggggggtgtgctaattggtcagcggtcaagagggcactaattggtcagccgtagggtgtggggtggtgtcaattaattagggaaacctaaacctatgcgaggggtgtgtaaaattttcatgtactttttttttgacataaaatttgattgatttaaaaagtgacagccgagggggagggggaatttgattggtcagcgaagtgacagatgagggaaaaattcaaatttctgatgggcggggatcggaaaattatgattgatcaacaatgtgacatttgcgggggcattcaaatttgcggggagcggggtgggagggtagagagggatatttctcatcttttctctgtccacccctgtccaaacagagcaatgcatatcgatttgacgggggaacgccgtcactttctcaccgctttactcattgccattaaatgaccaaacgaccttttccataattctcccctatttttaggtgtgttatttttccatatttttctcaacatttgttcaacaccaatggcgcccgggggcaaaacgtatgctcgacttaaaaatgtgagtaaatgaataaatttttgatttgtatttttcgtaagtaaatgactaaattttgttatgtcgttaacatgtttaggcatcaaagcccatcggctcgtcaagttcatcgtcagaggatgaacttcccagcaggaaaaaaaggccactgccaaccatgaaagcaccaatggtcagtttaagtgtttaaaatttttgaaattttttcgtccttttccgccagtgaaaaggatggattttaatgagaaaaatttgtaccaaatgaaaaaaaaaattcctttttttttcttaatactttagaacgttgcgaatcgaaccggcctgggcaccgacactgcactggtccaacagccagcaccaaaaaaattgcccattacacgcaaaagcgtgggtttaaaaaattaattaattttatcaaaataataaatattcctttttttttaataatttcccgttaattttgtaggccaagggaaatgccgccgcaccatcctcctccgtttccgtccgcaatccaacgcgccgcgctccttcaacccgtaaagctgttgcacaacaaccgcaacaacgcaaattagaaaagcgaaaagcggtaaatttgtgctgaaattttttatgtgatttttcattaaa

SEQ ID NO: 82743 - DNA, 574 bp, Heterodera glycines
atgcgttgtaccggctcctcttcgatggcagcaacgagaactacttcacccatttggagcgagcccgtcacccgtcacctcgtccacacatgcgccgtgtgtgcgaagaagtacgagttcgtgttggtgcggttcccggacactggagtcgagacgccatggcatcctgtgttacaaaagcatcgcaacattcgtgatggttggacgttgctagacctagcaatgttggtaagcgaaatttgtttcaattttttgaaattggtcatcgaaaaaaaaaatatttgaggagcccgacacaatttacgcttttgacgcagcatggcaacaatgtgttgcacctgatgaagcgattggagggaatgaaaatgatgacggtggcgatgatgagaacggcagaggaaacaacagcggaggaagaaacaagaagaagggtggccaaagacggggcggaggaggtgggcaaaaagacggaggagggagcaaagacggagtgaggaggacgaaggaagaggcgaagaagaaacaagagagagaggagacgaagaggaaacgtaagaagcaagagaaaaattga

SEQ ID NO: 82744 - DNA, 366 bp, Heterodera glycines
atgaaaatttgcttgacgaaaatcaaaaaagcacaaaaattcaacgattacgaaagtaataaaaaatataattaacaaaaaaatttttatttaatttttagctttgaaattcggccaattcttccttcttcacttcacacagaacacattgaactcactgaagcggttgtgcttaacgttacaaacaaaagttgagtttagtttctcgaacagtgcaattttttgcataaaaatgctttaatggacggttaattgagtcaatttttgttgaaatttttgtgccaaatttttcatgatttttttgaaattttctgaaaagttttgtttctgtaattatttctttttatatgtttatcaaatattaaa

SEQ ID NO: 82745 - DNA, 87 bp, Heterodera glycines
aaaggagactccaccttctgctgctggtgacgtcgtggcggtgccatcggaacgcgttgttgatgagcagcaaaaggaggacgaggg

SEQ ID NO: 82746 - DNA, 1191 bp, Heterodera glycines
  unsure (1)..(1191): unsure at all n locations
atgagaatggctttcatgttcgggtggatgaccgatgtgcgtgccaccaaaatcaaattgacagtggacaacggaatgcaacaaaatttatcaacagttcaatggcaccgccgaagaacaaaagaaacagttcaaagtcaattggtgcagttgggttcaatgatgacatacctatatgtaaatcgctgcttatttaattacaaataaaaattattttaaacaatattaattatttcaatttaaatgaatctatcccacaagtaacttcttatttcaattttaatgaatagcaaaatctttggtaatagaaataattaatgaaaagtgacaatttaattttgttcagaatctcttttgtttccaggtgtaaaatgaaaaaaatcttatgaatctccgccaaatntggtcgattgtcnccgacggtaaagacgcaactcgttttggtcaaatttgtttttaccccaaatcgttttattattccaactcttttataaaattgaaacgcgaaaaatcgaggccgaatcaattagaatttttaagtcaattgcgattcaccttttttggacgaaatttttatttttaatagaacctgaaaacatatttcctgctgttttctgggtagctagcttatcacgaataacatacatttcttccgataacaattaaaaattctcaaaaaacaatatatttctttcgaaattcaaatctgaaccttaaaacattagttcaaaatcgcaaaaattggtattgttgataaaaaatctgttaataaatttggggaattggagatgggccaaatatattttgtccagtcaacactggaataaaactttattcaagtaaaaattgggaagcgacgatattttagaaaacaaaattgagggcagtataaaattaaaagaatttcagagcataaaaaataaactaaaagcgaatgatgatgaaaaaagggatggaattgtgaactagtaaagggatgcttccttgcgatcgagttgatagttagttgaccatgatccagtccggaaggttgtctccgatgttaaaagggacattgtggcatgcttccgctgtgaattggacttcaagatttttttttaatgctaacatggcgatttgcctttactcacaaagacaaaaaaaggcacctgccaattttgacgatgaaactttgccgttaattttcgttaa

SEQ ID NO: 82747 - DNA, 1227 bp, Heterodera glycines
atgtctattagtcgagaacatacaaaagaagatgaaattgaaatacgactgctgaccaattcgttgtgggtccaccgactcgtccgaaccagcaagccgtgcactctgttcgagttcaaaaacgaactttacaaggtgctttggacgcgtgcagaaggatatgagtcggttgcagagatcgctaacgaattgtagtgagtttgttttgttttcttcacggttcttggtacatgggaaattcagtatgaattccgggatttgcgcgatttatttttcacgagaaaggggttacgatacgtttgaggagatggtgcattcggaggaactcgaaaatggtgatttttcagactgataatttaaattttatttttcccttaaagtgatcacaattgagagaattccttggaaaccatcctacattatgtaactactaaaattatctttggagaattcatttacctaattttgttaagttatcactaccgtgcaacgctaaacaacgaagggatcttttccgatattcgaaagcgcaatcaacagaaaaagaaacagtcagcagaaaaggggaattttatttgtttttaaaaattttatactacaaatttaattttaaacttttgttgtagaaagtcttgaccatttttattttgccttcgtttgtttcactttcctaagcaaaaaatgttcagttacaggaatgcttcgttccaagatttgaatcgcaaattggctggactaccgacggaagcggagcttcggatgagtgcgagaacggctgcgaagagagcacgcaaaagcaaacaaatttgtggggaaataatctcttacgaaatcgatgttggaagtgacaacgatgacgaactgaacgaagtgacggaatttattggggacgacggcgacgaatggacagaaggcagagaggacggagactcttctggagggtaagcggagaacgaaggagggggggggggggattagcagaaagtaattggctaattagtgaaatgggacaaaaacgaattaaatgcaataattttaggtatttgttttcatagaaaattaaaaattctttttatgatacaaaaatattttagttctgtgtttgctgaaaatattgccatcgtggagaaaacgaaccatcacaacgaaaaaaggaaaagggacaatgagaaagaatacgcattgaaaatgggcaaatgcttttcatcagacttctacgagatttga

SEQ ID NO: 82748 - DNA, 643 bp, Heterodera glycines
  unsure (1)..(643): unsure at all n locations
atgtttgaatttatatatttgtttcttatttttccaattttttgtggcggaatgcaacattattcaccttcatcatttaaaggaggaattataaacaaaattattcgaattccttattcaccaggtacaaaaaattaattattaatatttgaataaaattataaaaataaataaataaaaaacaaaaattcacgaaaattcacgaaaattaagaaaaaaatgaaagctttttgttaaacaattaaaactcagcaaataaattatggcgtaaaatttgtattggcgcaaaatcaaaccgaaatttgtccacagcaaataataaacgtagaaagacaaaggccatacgccgaagaaaagcggcaatttggcgacctaaagccgacaaaactccgatggcattttcctttgtttttttttgttggttttacgctcggaaggggaataatccgttgcagcaaaaagccgaagaaaagaacggacagaaagaggcagagcagaactccgaccaaataaaaggcggcgacactccgcacaaaggcgacgcgggtataanntttagatggtatgacaccctttttgaaaaatttttcgtgcaattttttcagcgagaaattccgaaacgcttccaacgcagccatattaa

SEQ ID NO: 82749 - DNA, 978 bp, Heterodera glycines
atgaaattattgtgccgtcatttctcaacaattgcccatctctttgctttgtctttttcaattttggcgatctcttcattgaatttccggccgatgacaatgccacggcatcggatggacaagcggtggccaaatggctgttcactccacacccaaacaatgtgccaaaggtgctggttgcagatgcatgacgtgaatttggcgtcgaagttggacgccttcaaagcggtgcttactaatttatttatttggcgtttttacggtctttggagtcgctgaaaaaaacccttattttttcactattttggtgttttgtcactttttcccactatttcgacattgtttggaaaattctcaacacctctaagaatcgacaaaaaattcacccctaagaatcaacctaaaattaaaaaagacacccttaagaattggaaaattttcaaaatgtaatttttgactgcgtggcgcaagtgtccggttttgctaggcggcccaatgccgcggcgcaaaagtcacaccacatctctcatcaaagtagccatcattatgggttctcgtatcgccccaacccaaaaagtggcattaatttattatttaataagtttttccacattttaggcattttccaatgcttcttctcccgtcaattttatcgctgtcatttggtttccgtcgtcttttgctgcttctgttgtgccctttgatctgatcaacgaattgactcgggaacaattggcattgaaaggaactgagtttagcagatgttttctgctggtccgttgtccaattgcgcgagacgcgagcaaatggtcaaaatgggaaaaggaagcgattaattggcgaattggtgatcagtggaacagaattgacattcaaattaatgatcaggatggaatcgaagatggatcagcgaatgctttttcaaaaatccaaaataaatttgaaaaaagaatgcttttattccaaataatgttttaa

SEQ ID NO: 82750 - DNA, 647 bp, Heterodera glycines
atgtgcaaaccaacttcgaaaagcctaaaccttcctccactgtcagtttttcttgagtacgttcgttcatcaattcaaaatggcataattttttgcaatttctgatttttaaccccgaaatcttattcttgaccagcgttatctttattttaaaaaaattcaatttcatggctataaaaatgtttgtttttcgattggtctctcattgtgcaaaaatatttccaacataattattctgccctttgtgtgaccacatttgaaataaggcaaattgtgctaattgcctgaaaatgaaccgacggtaaacaattttaaaagtcacaaattcttcatttatttagctaaaccattttcacagtttcagctgggtctgctttgacgtttggatggatattttccccctttttgaccacgctcaacttggactcaaattggcactgatttcgccacgtttcaattctctggtggacaagcatttcgatggcaaacgcgaattgacaatttggggttcagtcatagtttccaaggacagtgacgcagcggtggcaaaattgtttgtgtttattggtgccaattttgtgggatttccattgcccgaccaatcgctgcccagcaaaatacgcttcaatcaacttgagattgagtaa

SEQ ID NO: 82751 - DNA, 490 bp, Heterodera glycines
atgcgtggagcagtacaaacatttgtttgtcttctcgacggagaatttgcgctctgcaaggctggcggaggtaaaaattaaaaaaaaaagcattttttccataaatttttgggacggacggtcataaataccacgtttcgttgagtttaaaaaaagttatggccaaaaatttcggaaaatcagtttttttaaatgttttttgtcataacttttaaaattttgctgacagatagagaacactagagctatcgaatggtagataatacattggttcaatttggactaaggaaagtgggtacttgtgggttttcggcctacaccacaaaatcgctgcgaaccctccccccctcttttacaccggccctccccttcgctgcgaaccctcccctcccccctcttttacaccggccccccttcgctgcgaaccctccccccccccaaaaaaatgtatgttggtaatactgacttttactggtcccataaaaaagga

SEQ ID NO: 82752 - DNA, 211 bp, Heterodera glycines
gatgaattgatcggagaagtgctcaacttaattcacgcagaaagcccggaacagtgaccgtcttgatgcttttaaatgcacttacgagaaaaaaacaattccgcattttggtctcacttattatgctcattttatcctctcaccaacatatgacattgtccaatgcttctttttttgcatttataaacggtgagttggatcagaccgggtc

SEQ ID NO: 82753 - DNA, 1454 bp, Heterodera glycines
atggactcggcggcagattccattcgacagctacaacgtgcagtgcgcgaacagcagcagatgatctttttgctgagaagtcagatcgttgatcagagagcagtgttgcttcagaatatgacgcggattgaatcaacggaggggtacttggccaatgtaagttcaattttcaaacaagtatttaaaactaattaatttcgcttatttttataaataatcatttgattatttcagtctcgcgggaaccagagattcagcccgagatactctcccatggcgggagtggagctttcgctgctcggccgtcgacttgaggaacgagaacgccgacaacagtctcgtttgggtaggctgtaattttttttattgaaataacaaataattcaagtgcaagtggagaataataataatgctgcgggtccaagtgatggaaatgttcggcccataccaaatgaaaaccgtaaactaggaaatttttgtttaataaatttcgatttttttttgaagagcagctgactccgctaagttcacgttcgggaaacaatggggctctgcaaaatcgtactaatggtgtgctaattttgaaaaaaaaaacaaattatttttgttttttttttagagagcaatgtggctggaccaagtacggcgagtaatggtggtgacgatgaacgtgaaaacggtgagatgaacccttaataatttgaatcaaataaatgaatttttgacaggccccgttctaagcgctgtgattgaaggccacatgaaccgttcgcggatgcgtctaattcgggacgagatggttcatcgtgctgtgcagcagcaacttgagcaccagcaccatctgttgcttcagcaagcgcagcagcagcagcaacgggaagaacgcgaaagacaacagcactttgatcaacaaatggaagaagcagagcttcttcacgaacaactgcaggcagcagagcaggaaaacgacgagaacatcgaaccacagccccctcagcagcagccgcaacctcaaccgctgattcgtcatccgcagctgcagttcgaacgtaatgttcgactgcagctgcgcgagtcgcagcgatttgaaaggggagttgcctcgttagtgctcgttccgccagcccagctctattgggagaccgaatgcatcatctgcaccagcaaccgcgcacacttctacagccgtaattgcggacacatctacctgtgctcgacatgtgcggtgaacgcggtgatccacaagatcgcgacttgtatgctgtgccgtgtccgaattgatggaatttatccatttgtacgatgattgattgatgtatttgataactctcgaacaccctttatcattttgtccatcctatcattatcctattatcacaatttttaaacgatcattgattgccacttggcatttgcaattctcactcattatttaaactcatccaaccaatcca

SEQ ID NO: 82754 - DNA, 409 bp, Heterodera glycines
atgttgtgcaaatgcggcgaatgcttcgagtgcgaagatgaaaagcgccgcctcaagcgcaatcgggagctcaatacccgcaaagagcaaattaagaactgcacaggcaatcatctagcaccggctatgatggacctcaaacgccggaatatggaactgtttaaaaaggcttataggccggtgaagggcgtcatcaataaaataaccgggggtgagtttaaaaaagaaattgaaaaaaaaaaacaaaaaaaattttttaggcccttggaatgtagaatgtgaggtctgccatgagaccttcacatacttcatggtggagtgggaaaactcccggaccgacttctcgtggggtcccgggaggaccatggtcgaagcggataacatagtaaaaatttttgaaattttataa

SEQ ID NO: 82755 - DNA, 868 bp, Heterodera glycines
atgcagtggattaaatttaactgcacgctttgtccgatcggtctgcattgtttttatccgcgcaagtacgcaaagcctgtgctttgtgcgcatcccagcgtccgtaacatcacggactttttgagcaccggtcagcttgacgaagctgcaacgacaacaacaacaacaaccgcacttccgacaactgcggaggtgtcggcagcggcagaatgcgcacctccgcccgcgcatttgaccgcgtggatcgcggtgtgcacagcgctggtggcgcttttggtgattgcggaggtctgttattaattttggtcatttatccgctaaacccctattcctcaattaagcttgtgcgcgccggattcaaagtgcgcaaatttttgaaggaccgcgccttcaaaaaggggatgctgcgccgacatcgccagcgtgagtttctcgctattacattttagcaaattgtaattaacaatttgtacaggaatgagcgccgcaaggcgcaaccgccagccggcaagcgcgccgactccgctgattttgccggctatgttggccggcgtttctctgcgcccgacgggcgtcaatttgactgtggaccgggtgggcaattttaattaaattaaaatctttatatattttaatttctcactcattaaaattacaatttaaatttaaaggcagcggggcagcgccgcgcggatggtacggacgaagagcccgtgtacgatgaggtgccgcttgacagcgacatcgcggtcgagatgcgcgatggagaaaatggggaggaggatgaggaagatgatgacagtgatttttagtgattcggcaagcgatcactcaccatttaactaatcgatcgatttttcactttaaa

SEQ ID NO: 82756 - DNA, 579 bp, Heterodera glycines
atggtcaccaaggagggaatcaccttatggtgcacacgcatagaaaaagcgcagtttgtcccttttgatgttgtctacgagctccccggtcattgttttttccgcgtaaagaataaggcaagggtgttcagcgttccatacagcgaactgtcgtcctcagacaggtgcgcccagcctctaccaccaccaccaccaccaccaccaatgacaacagcaaaacatcaacggacaccggacgacgaggaggagaaaaatttgaggcgtaaggcaaaggtggcgcttgacttagtggaagctggtctagcggcagacgcaatgatgcaggatgggacgcgttggaagaaagccaaaaccgcgatcaatgtgctggccaatttgcttttggcggaatcattaacagatgtctcgccaacttttgatcaacaacaacaacaacaacagctatcgtcaaaagaggaggagaaggaggaatgcacaaacagcagcagtgctgcagtaacaactgaatctgcttccgatgctgatgtaatggacgatttcgtcaatagcattcaagcggcgacaagcaatatgcaatag

SEQ ID NO: 82757 - DNA, 151 bp, Heterodera glycines
atgggaaaagaacggaatgccaacggggtattcacgggccaatcgaagggcattctcaccaccgcgggaatggcctacaaagatcaactcagttggagaggggaggagctgatcgatcaaagagcgagcaaaggcggttctctcggaattg

SEQ ID NO: 82758 - DNA, 547 bp, Heterodera glycines
atgcggctttcgacctcacaaaggcgttcgtccccatctgatgatcaaaatcgcagcttggctgtgggctttggattcgcgattacagcattgtttagcgccgatatttcacaaaagtgataaattcaatcgatcggaaagcattggctgatcattgcttttcagtttacagcttttcctccggactgaaaacggataacggattcattgcgggcatttcgacgatcactcactgcacttatgattttgacaaattgaaattgttgactgatgacctgcagaaggagcagccacagctgaaggtgttgttcgcctattcgggaaaggatcatctgatcgagacagaaatcagcgaggaattctcgcgggcactcggaggaccaattttggtgacaatggcaaaaagtgattaaatggcacatttaacgatgttcagatatcaacgaccaatcctaaggaagaggacagtgaactgttagcaaagtttaaccaattaactgctggagagcatggacaaaatcgactttcaatattatttaccaaagag

SEQ ID NO: 82759 - DNA, 834 bp, Heterodera glycines
atgtttaatttaattgttctcctaacgatagccagtcaagtgattgcagaaagagttactattctttctgatacacaactttttgacgacaagtatctcactatgccaaagagttcggtcaatgaaagacagttcgggttcgatcgctcgagattatgtacgataaataggaatctgatttcagggtggagcctatcaatccaagaaattaattcaatagaaaagagcggacccactaatgttaagctttaccaggattttcgacaattaaagccccgagcgtgcttttattacaacgatcatagttatttaattttccaaaacgaaaagacaaatgaaacttctataacaagagggagtcaagaaatggttgtcaggaattttcccggtggggaccttagatttgatcatattgatggtcgacttttcgtaatcagagacgatcgaatagacgagattgaccttagaacaatagagaatttatggacaaaacacaatgaaaccgaaattattagtaaaccgatcggatcaatgccatcggcatacaccgatttcctaataaatgaggggcaaatttatctaattaaggaaaagaaaatatacaaagaccgatttgactcaaacgagatacttcccaaatatgtttcagacacagatagtgaattttttaattttgtcgtgttcaaagaatttgagaaaattagagtttcaagttcaaatccttgggtgtattttttgtcaattttagatttggtagtggtcgtcatctgtatttcagttctcagaattttaaaaataaagagaaaaggcaaaaattcatcatacggcggtgag

SEQ ID NO: 82760 - DNA, 549 bp, Heterodera glycines
atgacaactctcaagaaaatcgacacggcgagtgaggacggtctcgagggaggcctttcacttttcgacatccctccgacgaacgttgcaattaataaatccagtattcgggaattactccctctttcagcaataaatcaatctggaccgtatatctttagacttttttcagataatcagttttgtgatttcaataaaacttttctttatttgtcaacttcaattgagagaaaagataaaagcaattggattccgattaccaaggacagtgaagctgaccaacacgtcggtgtcattcaaaattttgggcacagctttgtcaaaaccttaaaggtgtcaatttcaggtgtcgaatcttatgattccggcatttactatgcgtttagggcatatatgatgaatgaattgggattttcagaagatgtcaaaaagggtctctgtgaagcgtcctgctattatgtcgacgatgtcgaccaggatgattatacaaacagtggctttaaaaacagagcgtcacgttttgctgatggtgcaaaatgtgaaacaatg

SEQ ID NO: 82761 - DNA, 775 bp, Heterodera glycines
atgggcgccgagctggagcgactggccgcccagtcggccggcggggtcgacttgttcggcggcacagtgctgttccgcatcagtgctgtttggcccctggatgccagcggtgggtgaaagggggggggcggagggtggcggggtgggtgcaggatacagtgagggatgtgccgaattttccaaaaggaaaaaaatggggccataatttaggccaaagtggggcgggggcgtgtgccgtggatgagcaggaggcgcgcggcaccgttcgctgccgctccttcttcccggtggtgaacccgggcgaccgatggtgcctggcgcgcgccatcgtcctcgggctggccgaccgccgcgcccagctgcaatacggggccggaagcgtacaggcggcggcccaattccgcgccttctggctggcacagcatgggcctggcggtgcgcaggcggcccggcagctgctccacatggccacactgccgctcgacaaaccagactacggcgttgctgatgcgcagcgtctacagcaggcgctggacacgcggctgggcgcacagcaggtgcgcctcgtgatcttcgagcgggagcacggatgccgcgtgctgtggaaaggcgcactgcgtgcgcacttcaacatctgcttgttgctgcagcagggcgcacaaaataataatgaaaagccaaaaaaaacactaaattatcgaaaaatttacgcaaattcatctaaaaaatatttttcatttaaagcaaagaaaaaaacataaaaagaaaaaataaa

SEQ ID NO: 82762 - DNA, 1253 bp, Heterodera glycines
atgtcgggtaaatcactatttttaattgagcacctctaagcaacccctaaactcgagaatgcaactactgctgctgcccatctcaaagtgccattcgttttaggctggtgacaaagtgcaggccatcggcgcccggggcgaacaaacgctggccaatttcgacgccaattttgccgccattcaaagcgatgtgcaacacgttgtcgtaattaaaaaccaatttaatgataattttcggacaaaaattacaaccaaacaatcaatgcagaaagtgggcactcaaataggagcataatgaaaggcaaaaaaaaattaaaacaatttttattttaactaaaaatatttttctcaaaattttgcattttttaaattcccgccccgttcacggccccgattgaaaatcattgtgctatggacataatttcccgtacggaaaatttcgacgtcgtccaagtagtgtaaaaatgcaaattcacgctgatctaagataattagcaactcaaattttttaaaagggttaattgagaaaaacaaattatggaaaatgcaaaggaaaaatataataaatttcaggcattttcttaaattcaaactttcaattctttattactttgttttgcttctaaaatatttggggtcacaaaaaagttttttgccaaaattagaatccacaaattcgcctgttgttagttaatctcagtgaattagtatcaataaaattgaagactcattttaacctttttcaggtttttcggcaaaaaaggagttaaaccgatttcaaaatcaattaaaaatggcatttccgttggcaattcccattctattgaaattcacaaaaatttgggatcaagccaggtccataattccaaacaagcaacatcaagtcttcatccccccatattttgtaaagcaaaatgccagcgctcgggtggaacaagcggtgcccatgtcagcactggtcactgtcggcatttgcttggctgtgttgctggcactgctcggactttggctgctgatcagtgccatcacggaattgagcagcatcagaaggagacggagaagacggagaagcagtgatcagcgacaacaacaacaacaacaacaacaacaacaacaacaacaacaacaacaacaacgaacacaacggcaaaatgatgaagaaattatcggcagaggaaaagcattggaggaggaataatttaaaaataataattagatgctaatgggacgaccaccagcagagggacaataaa

SEQ ID NO: 82763 - DNA, 603 bp, Heterodera glycines
atgacttatgcattaattgtggaaaatggtgggaaaatttaaatttaaaaaatattatctttagtctttagatgaatctaaaaggtaaacgataatagtaattgtatagttatttaattactagtaatatgcttagtatttttatagtttttatagtatattttagtttatctttaaaacattatccttccagataatgtttcagattatcttttaaataatcttttagattatcttaaaaattctgttaataataaaaacaaatcatttagctatatgacatgcaatgattcgggctaccaggcaatttcatttgacaaacatacacatttggccaaagttaatgaagagaattgtacgggttgcacgttgtgccacagcgtttgtccaatccctggtaagacgcaggattccggcgcagctttttaaattttaagaattttcttcagttaaaacaacttttaaaaatttttggtcgtttttcaaaaaactttaaaaatttttatctttatgaatttaccttaaatgccaaaaaggtcctttttaatcaatttttaaagattgcattaaaatggtgcctaaaacgataccgcacaaaataaa

SEQ ID NO: 82764 - DNA, 1288 bp, Heterodera glycines
ttgcagaacaggaaaatccgaaattaatataaaatatatttaaaaattatttcttggtaaggacttggtgacaaatgtttcgcctcgaattgttcgtgggacgaccagtgggccaatattcggcccagggcagggctcttttctcaacattgaattgatttcggagaaatcagctgaggtgagattttaaactagaaaaaaggtcattatttaatattctcaaaatggaaaaatattcattaaatttgtgcaaaaatgccaaaatttcaaaccaaaaaatgtacaaaaaatcgacctcaaatttttttttgttttgttaatttaatttctagatttttcaccaaaacaatttttttaaaaattttataataaaacaattaactatttttaattttatctaattacttttgtcaagtcccataaataccaaaatttaaattttcaaaaaataaatattttccattgctttagtattggttgacttgcgtgaaggaattaaaacgtgatttttcacaaaaaattgtaattgcatcaatcatggcatcgtttaaccaagtgaaattaaattattatttggaaataaaataaaatatttttaaattatagcaagattgggaatttttggcatcccgttctgaagaagcaggcgctgatgctttggaacttaatttgtcgtgtcctcatgggatgggcgaacgtggcatgggccttgcctgtggccaagtaattcaaatttcaatttttaaatatatttctttttcattctgaacaaaagtagaaaatatttcaacttattttattatttaaatattaaaagtcagtaatagaatttaaaattattaagtaagttattttctagacaattaagaccaaaaagattgaaaaatttttgataaatattttggaaatttacaattataattctatttacatacctatttacactttggtgtgcgatcagttaaaataaatttttgtttaagaatcccgagatggtcaaacaaatttcggaatgggtccgttcagcagtcaaggtgatgattgatccgctatttgtaaatttaaataattttgtgccgtttttattttttgttaaattttcctaatttttacccaattagatcccattctttgtcaaaatgacaccaaatataacggatgtacgcgttctggcacaagcggcaagggatggcggagcggatggcgtaaccgcaacgaacactgtgtccggactgatgggactgggctcagatggcactgcatggccaaatgtcggcaaagcaaaatt

SEQ ID NO: 82765 - DNA, 547 bp, Heterodera glycines
atgataaatccttctaatatttctgtaagtaaaatacaattcttataaataaatacatttaaagacttaagtttaaaataagggaaatcaaataattttaaaaatatttaaatttataatagaatatttaactaatctaacaaaaattttaaattaattattaatttaatcaaaatctagctgcagacctacatttaaggaaaatgatcaaaaaaaggcgccattaatggacttttgaatttaggtattatcaaaattaataaaaattatcccattttaaaataatttatccattaaatacattccttaataatcgcttaattttaaatttagaaataaaatattcagaaccacgaaagaacatttatgagcgaaattagaaaatatcaatattgcttttaatgtaatttagaagattctgggttcatctaataacgaaaagcagtcaaatttatattggaaattttctcacaagatcataagaattaatgtcagatttgaaatatcaaaatatgaaatttttttatcaaaaaatctttaatgaaaa

SEQ ID NO: 82766 - DNA, 672 bp, Heterodera glycines
atgaaaaagtcgtccgacgattcagaagtggcggagtcgtcgagcaacgaagcgatttggaaacaacaaattgcgcaatatgttaaaattgctgacagcgatgaaaattatgaatataaagaactacttaatgaagccttaattgaaaaaggtaaagaacgcgaaggaaacagagccaaaattgagttggcccgaaaagcatttgacaatttgctgaaatcgatgacggaaacggcgaaaatgcaatcgggtgaaggatttggcaaaaacaaaccagttttgcgttggctattcctttgaaaactgagttattctctagcgtttgaagcagaattcaccattgacgaaatccagaaaataattagtataatataaaactttttttcataatttatttttcccttttccttggtgtaagcccgggtcccggccatgggtctgaaaatcaggtcgggcccgggtcagcaattaaaatataaaactatacctgtatcttctctgttttgcttttcattggatatccttttgtttttgttgctgtagttcatcctttctttctcttttttggtataaatttttaattatgaatttacaaaaagttcgctgaaatttagtgatattactaggtcgttgcataaaaaagggcgcttttttagaaaaaaaattttataa

SEQ ID NO: 82767 - DNA, 1029 bp, Heterodera glycines
atgaacgctaataaggagcacgcacataagctattacaccagcaatttaaaaaaggcgaaaaagcggcgcctgcggcgcgaaaagtgaatgaatttctcggcgcggatgtgatctctcctcgtcaagcgcaaaaatggttccaacaattccgggcggggagaaacagcaccaaacgcaaacttgggtctggaaggccgtcgacagtggacaaaaacgttttggcacaacggttgcgacgacacccggaaagttcctgcgcagaattgtcggtgggacattgccataaaacaacaacatggcgctggcttcggaaatctggtcgtcggccgatgaggagcaaatgggtggcacaccgtctgactgatcagcagaaacagcggcggctaaacctgtgtctttcgaacatcgcaagacaccggagaggttatgtgctgaaccggctggtgacatgcgacgaaagctacatctgttacgatggcacagcacagaaaattgtttggagaaagaaggaggaagacccaattttggtcccccgacccaacctgcaccaaaaaaagcgcatgttgtgtatcttttggtcagtacatggcccactgtactgggaactgctggcacctggcactattttggacagtaatagatacataaaccaactgcgggcggtggatatcgcttaccgcatccggcgccagcagggccaatttgacggtcccctactctttcaccatgacaatgctccgccacaccgttctcatttgacaacccagtacatttcccagacattgaattggaatgtgttgccccacccgccttatagccctgacctagccccctcggattaccacctttttctttctctcaaaaactttttacggggtaggcgcttcactgaagacgccgaggtcgaggaggcggtggggcagtacctgacctcaaagatcggcacagattttttccgtcgcggcattaggaaacttccttctcgttggagaaaggttgttagggtccagggaaactattttgttgag

SEQ ID NO: 82768 - DNA, 281 bp, Heterodera glycines
aaatttttaaaaattttccagcaaataatggaaatttttttcgaattcccccccaaacgaaaattaaaaagtttaataggcaaatttcgtaacaagtagcactcaaatttccaaaaatttttcccggcggcgcctatcggcaccgccggacctacattttccactatttttacaagttttttgccttaaaacggccaaaatttggtcatttttagtgaaaaagtgcagttgttacccagcagtggaaaaaaagttattggttaatagcaaaaaaaaaaaag

SEQ ID NO: 82769 - DNA, 2787 bp, Heterodera glycines
atgttaacaacaaaattttttataagccattataaaaaagcgcccttttttatgcaacgacctagtatttgttttggtccgcaccatttgcgccatctaattcaagaaattttttaagggcaaaataaaaaattggcgttgtgttacagtcccagtgatttaaaacatcagtcaaaggccattgttatattacaatacagtaacaaaaaggaaggggaagagcatgtgatatgcatactctcctcctcctccccccatcccccggcggtttttaacccatccctcggatttttcttccttcgttcgctttcttttcccttcttttgatttggcctcattttctccttttgttatttgaggaaaatcaatggcaacggacgaattgtcacgctttttcgcttctctcttacgcactcagaatgtcggtttgccattctgattttgtcagaaatgttaatcgggcgtgttaacccaaaacatgcgggttttttggaattatatttttctatttttacgggcattcccttactatgttttttgactatcaccaggaaggccattttttacaaattcgttcaaaatttttgctcaacagctgatcgatgatcactgtctgtatgcgttcctcaacagacagtccccccacagaattgtctcccccttctgatgctgtccccggttttggttgttatcatttatcaatcactcattcattcattcgactcgcacccattggaacaattcactcaaaaaaattaaaggaagaaattattcaaaatgatatgaatggtttaacattcgtaggattttttatcagtgtataattgcacttgttaaattcgtttgatttccttatatttaatcgccattgattatttatgattttagctttttttcttcatgttttcggatgtttccgttcaaaaggttaaattattgtcccattgaagaggaggaaggagagaattcgcagtcaattcatggccggattgatggcacatgccaagttgggacggactgttgcgacacgcgagagtgtgcaggagttcatgcaacccaaagcggactcggcgtgtctttcaaatgcgagaaggacccggaaatgtcgtcgatgagagaggaccgggcccggtgggaccacgtgggggacgtggaccaggcaagcagccaatgctaattgattattggctcattatcgtcgttttgttgtccagttcttctcctacatttacgagtattaccaacaaaagggcctccggtgcatcgcccttcgttactttttctctcttttccgtttcgctttcgtcgtctttttctccacctttttgttacaatgtgtcgattacggggtcattttcaacacgagaaatgccacttttgatggcattccgttgccggagaagaaacaaattcaggttttgcggtccatcatcggctcttttcggcttacgcttctttcttaggatgtgttcatttctcagtgccaccgtcacttcaatccgctagtcaaaattgcgcttttgctggcccttctcttttgggtcggtcaattcgctcgcatttgctgtcgtctcgtccacctttgtgagaccaggaatttcttcgccactcaacttcaaatcaatgacagcgacttgcaaaacctttcttggaacgacgtcgtgcataatttgtgtcgagctcaggaacgaattcatttaatgcaagtgattttgagacattttgagtaataagcgacagagaaatacgaacagaaaaaaaggttttgtttaagaaaaataacatttaataatatcacttcgagtggtctcattatcgcaaatatcccatttatccgcacattcgatcatttttaccaattttatgtgttcagtgttaatcgcgactccatctcttcgctcgacatttaccagcgcattctccgccatcgcaattatttcgttgccttagtgcacaaagtgagtcgccctttttcactgtccaattgtccgccactttttccttaccctttccccccccccttttcagtcgcttttaccgcctcaaattcggctgcccttcgttggctctgtgcattacctttcgtccggccttcgctttaacatcgaatggcttctcttctggggtccgtggtccccgtggaagtcgtcgtacgcattaaaagacgaatttaaggaaagggacaatttggaaaggattggtaggggaaaggcggcgacgaaattgcaattgctcacccgccaaattcagctcgaaatatgcaaatgaatctgctggtgatgagtgtcgtcaacttggtctttcttccgtttgtcgtcgtttaccaagtgttgttcagctttttctcttactccgaacattttcaacgggatcgccacattttgggcatgcgcaaatactccaattacggacggtataatttacttttcccaggggcgtatctagaaagatttttcgggggggggggacccgacctgaagacttttttttttttgctattaaccaataactttttttccactgctgggtaacaactgcactttttcactaaaaatgaccaaattttggccgttttaaggcaaaaaacttgtaaaaatagtggaaaatgtaggtccggcggtgccgataggcgccgccgggaaaaatttttggaaatttgagtgctacttgttacgaaatttgcctattaaactttttaattttcgtttgggggggaattcgaaaaaaatttccattatttgctggaaaatttttaaaaattttcattttcggggggggggggggggg

SEQ ID NO: 82770 - DNA, 660 bp, Heterodera glycines
atggtcgccttgggccgtggacatcgccatgttctgagagggagaaggacggaggcaatcggaagacaaaatggcggaggacgggacagcgcattgctgcagagactgttccatttggtggagggacgcgtgggtcgacgcctggagcaacgcgagggtttgcgcgtccaaaacggacgaagtgttggcattggcaccgtcgccgccattttcgtacgaccgactggcgatgtaaatctcatgcgaaaccttcaaacaaaacaatggcattaccaatggggagaaaagccaaatgaaagaaaggactgaccaatgccttcacattgtcaatgaattcggcacattctttgggcggtgtccagtcggggtgttgaacggcgaagttcagcagcgacagctccactttgccgtacgaattgccgcttcgcttttgctttgctgctgcgaatggtaaattgtgtgtacttttattggaacttttcatgtcacggaaaagtgtatacattttgtctatgattttgtttttgtcttaccgttatttgaactgtcgtggacaaccaccgactcattgttaagtgacatcagccgaatttcgccatcgcggcaaatgtccatttgagcgaatgaacaaacgtcgccgagccctcaaaaagaaataaa

SEQ ID NO: 82771 - DNA, 1883 bp, Heterodera glycines
atggacagcgaattggacgcccgcctaaatcgcagttacgaattcgccgttcgttacaccgaccaattcgtttcgacacagtccaaaatcattgccaaaaacattgcttttgttgccgctgccgttttcgtcgtcctttgctctctcacggcttacgacgaagacactttgaaggtgtaaatgggttgtaattatgatttctcatttgttactcatcccatctcattcagattgagcatgtcaccactctgatcaccatctccggcgccatcgttttggcctgtcgcgtgttcattcccaacgaacatttggttttttgccagcaccaactgatgcgccaaattgtggccaacattcattacgcgccgaagtcgtggctccaaaaggcccattccatggaaatttacacggaattcacgcaaatattccgactaaaggccgaacttctggtggaggaattgctcagtccgctgtttactcctttcattctctatttttagtgagtttttcgcctcacttatcacaatttactcctcttctttaaagcattcgtcctcggatgatggaaatcgtcgaattcttccacaaatgtacagtccgagtcgatggtatttaattctttacttaaaacccaccaaatttttatttctttttgagggctcggcgacgtttgttcattcgctcaaatggacatttgccgcgatggcgaaattcggctgatgtcacttaacaatgagtcggtggttgtccacgacagttcaaataacggtaagacaaaaacaaaatcatagacaaaatgtatacacttttccgtgacatgaaaagttccaataaaagtacacacaatttaccattcgcagcagcaaagcaaaagcgaagcggcaattcgtacggcaaagtggagctgtcgctgctgaacttcgccgttcaacaccccgactggacaccgcccaaagaatgtgccgaattcattgacaatgtgaaggcattggtcagtcctttctttcatttggcttttctccccattggtaatgccattgttttgtttgaaggtttcgcatgagatttacatcgccagtcggtcgtacgaaaatggcggcgacggtgccaatgccaacacttcgtccgttttggacgcgcaaaccctcgcgttgctccaggcgtcgacccacgcgtccctccaccaaatggaacagtctctgcagcaatgcgctgtcccgtcctccgccattttgtcttccgattgcctccgtccttctccctctcagaacatggcgatgtccacggcccaaggcgaccatgacgaggtggatgagctttatcaaaacggtcaattgttattgtcgctcctcttaagagaagggacgcgtcgtcgcctccccctccgccgctcgcggcttcgatccgtccaaatgcgatggcggcgtcgtcctcgcgcattggccattctctgctgggcgagggcgcgctccgtccgtcgcccttctcccaattggccacttcctccttcattcagccgtcccctttggcggccattgttcagccgcgcaccatccaaggtgatcaacacattcattcactcttcgttttatgtgttggccatttcagagagtaatttccgtgccttggaaatgtcaatgcatgcccttctcatcaaccaaatgctcttcgccaattcgttcgcttctccggcccttcgttcctcccggcatcacccctttggctacggttccatcccttttggcagtgtttcccgtcgcggacccgtggacagtatcgtggacagcaacatttttggagtgcccgccggggccagtcaaatccaactgatggacgaattggaaaatgaatttgacccattgtcaaataatcgtagggtgtga

SEQ ID NO: 82772 - DNA, 960 bp, Heterodera glycines
ttgtgccattgcaacatccgatgacgtggagattgttcgtctcgctttgctttggactgtttctctttttcttctccgtcccgcctttttccgttcttccgtttgcgtcaacgaatttttctgtcgtttagccgagatttatttgattggtttcttttcctcaattttttcctttctcaatttatttattttttctcaggccccgaagtttttctctacgatgatcaaattcgcaattgcgtttccattttggtcaatgattttcttatcgatgcccgaaaaagggggccattggccctccgtctccgtcagccaattgccttccttgaccaatttatgccattgtattatttttgtttcagtttttattttgtcattttgccaattaccattttaagctttgaggaccttctccaacgctatgaaaatttctccgccggtgacgacaatttcgcccttttgcttctgatcggcacttatttgaactcctcccgactcgacggacttttgatggcccaaacgctttggtcccccaaaagggacgtcgtccgacaaatgattctttcggaggagaaagcggtgcttttgtttgcacactttcaatgttaatcattacgcctattttcaattcagggcccatttcttccttttggctttgccaatgctttttcggttgagtcgcaagggaatggcgacgacacccggcaaaagacgcttataaatgaggaaattgtcaaactgatggcgaattacgcccgcgcattaaaagagggagcggtggtcaaagaaaggaacgaggcaacccgggcaattgcaattgcggaaatcaaagaattcattggacggaacgaagcggtaaaaagttgggactcagcaaacaaaataattttaaaaattaagaacggggacaatgctgaattgttaaatgacttgcgagagacaatttcaaagatctcataa

SEQ ID NO: 82773 - DNA, 877 bp, Heterodera glycines
atggaattaattaaccgaaaattgatttgcccttattcaaaggacattgaattaggtgaattgacgatttcaacaaaaatatgacaaattaaggtacttatcaagcataaataaacaaatatttaaatgagccttttttttgcactgacgtcttttattacttttagaaaaataaaaattcaatataaaataaaatcaaataaataaaaataacaatattatgtttgggcgaaaagaaataaaagaacaatacaatattcaatatgttgttgaaaatgggatgaagtggaacaataaataaaataaaataaaaatccaatcaaaaagttttcgttagtcattgcaccttaatgaaaggaattaaaattttttatcctaattaataattaattagtaatattaattaattaatgctttctcatgcaaaatatcacagaaaaggacaaatttattgtatgtttgttgtttgttttattttgcaaagaaattcagttaagggatccttggccaacaattaaaatcgataaacattagacatattaaattttaaattcttattttggtaatttcatcaaatttacagccatacacggggctgctctttttaaaggcggactaggaaaactcgtcgccagccgaaacgtcgccgggcgaattttggaccatagctttttgccttctcaaccatattaaacattcttggtattgttaaaaacttataaaaaactgtataaacctgcaaattttcaaaattttttattcatgtaaaaagaaatcagggcaaaaagttcaaaaaactaagtttttgagttccttctggtcataacttttttgaaacttaactaaaatttttgaaattttgcctattaataataaa

SEQ ID NO: 82774 - DNA, 1681 bp, Heterodera glycines
atgacggtgacatttttttcaatgacggtgacttctttttcaatgacggtgacatttttttcaatgacggtggcttttttttcaacgacggcgacgtttttttcaatgatcggcgacgcttttttcaatcgacggcgactttttcacggagggcctttaccatttcaagaagttgcttttggaagccggtattttcactcattatctaaataagaaatgcaataaaaaatgcaagaatatgtaacgttggtgccagcccgaatttttagattctaacttttttcattgtcgaccaaatctaacaatcttgatatcattggaaagcccttcttcacgtgctctattagccttacaaaaagcgaaaatattttgatattttctaccatctaagaaatttattaagaaaaaaccccaaaaattttgcatattataaattttttggtaattgtctatcgcgaagcaatagcttagaaacatgtagcgttcgaatgataccaagattgttagatttggtaaacaatgaaaaaagaaaaactaactactagatactatgtagtaattgcacaaacgaataatccgaaaattgtttccatcatttacaaaaatttttaaattatttataaaaacaaaatggcaatttttaaatgttatttttctgccagcattcccttccggctacatttgtcggtacttatcaggggtggagcgcgcacaaaaaaatcccgtggtcgtggatcgcgcatcgcgaattcaatttgccgcggtcgcggatcgtgcaaaaaattgccgcggatcgtgcattttttccagttttttaaaaccattttttaccctttttttaaatttttttcttataaaattgtttggtagattgtcttttaaagtcatctcttctccaaaaatggttttacccaaaatctgtcgtaagggcagccgaaaattttttggcaaaattttgtgataaaagttgcttgaaaaatcgataaatcacttcgcgattagacaattaccaaaaaagttatacttgcgaaaaggtcgaaattagtcgaaattttgaagattttcttaaaaaattttttccaggctagaaaatcatttcggtgctaatagagcatctgaagagctttcgaatgataccaacaatcttggaaacaagaagactatgttttcttaattttaaagctgtttaagctatcagggattgaaaaaactttatgtttgaccccgattttagacctaggcgcaaatgtgtggggcgcaaatgtctggacacgatttattggtacatatctcgttttttcggacggtgtgtatactcatagtgtatactcataattttgaaactttatggcagaatgtcactttttcaagaaaatataagattgtggcaaaataacctggaaagtgatatcaaccaagagaaaaacacccgttttatggttgtttaaattcttcgaactttgttatttattttttaaattttctggtaaactaatcatcaaaattggggacggatgatcattgatcatgatcaataatatttaccagaaaaaaaacaaaaaaaaagactaatttcagagattttaaacaatcacaaaaacggatgtttttcacttggttggcaattagagtgccatgggaccgggaatttttgacaaaaccgggacttgccgggacctga

SEQ ID NO: 82775 - DNA, 81 bp, Heterodera glycines
ataatgagtgaaaataccggcttccaaaagcaacttcttgaaatggtaaaggccctccgtgaaaaagtcgccgtcgattga

SEQ ID NO: 82776 - DNA, 2600 bp, Heterodera glycines
  unsure (1)..(2600): unsure at all n locations
atgggcccaaatgtgccaccgtttggtggccacgtgtacctgaagggctttttcttcactgaccactgccatttggactacacaaagcaacccattgatcagcccttctattttcacattccgtttcgaagcgattgccaggcaagcgtgccacaaataactgtcgaaaaatatatttatatcgtaggaaaatttaaatgtaccgtaattttgacaaaattgtgccaagaaaaactcatttttagtttgtttcccgagaaaataaaaaaggccgtttctttaattttttttttttagttttttgaattagaaatacttctttcttatttatgcttctcaaactgcgaatttagtgccaaaattctccagttttccggcaaatttaaaccttaaaaaattatgttgtctcggccattttttaaatatcataacacatttcttattccttttatcaatttttaataatcattagaagttttttttatccaatttctgtcgtaacacaatttgaccaaatcagcagaccgatatgacgtcagcagatcaataaaaacagctgataacggatcgaagggaaccgaattttaggtgaaaagagagcggtccattgagggggaaaacggcagaaatgtgagcggactcagctacagtaccattgtgattgtccaggtaataaattaatcattaattaacttatttcaatacccattcttaaatggactgtgttcatatgaatcaataatcaattaagcaccaccgtttgtttgtgactaatcgggacaaggcgtacgcggtcaactgtttttaccatgaggcaaagggactgtttgaacgcaagctggaagttgggtgagtaaaagttggcacccacacactaatctgagtgatgagaattggggaacagtgttccatgtggggagcggagccgtgacggtgcacaccgaaacgtgggtggacgaatttttttggggcataattttgatcaattcattgaccaaattgagtattctcggcattcgctagcctagtgttttttatgttaattgagtttgttggttgcttccgaaagtacaaagaatgttgaatttggttgacaatgttatggtccaaaaatcgtccggcacctttttggtcgccgacgttttgtcgccagtgaaccaacgagtttgacaaatattaaattattttgaagggatttgtcgctatttgatgtgaacggcaccaaagaagcgccgttatgcacttatgaggtgctcaaagatggcgaacccattcgatatgcaaatgttggcgatgtgttggtccatcgttggagttgcgacacgggtgagggagcggcgacttaaaatggccaaaaccaaaataacaattaaaagccattgactcaattagtgcagaaatttatagatggtaaaatgccatattaattcttcgtcctttgctttaaaaccaagagttcagcgacaaaaaggcgaaaatacgccaaaattaaaaaacaaacgatttttatattttaaataatcgcattaatattgatcgattggtttttgaaattaatcaattagtttttagtggagcttggaatgctggtccattcgtgtattatccgtgacggacttggccacagtttttccctgttggaccaacgcgggctgggtaaaaattaaaaaaaatgcaaattaatatgttaatttaaagaaaattaaaataacttttaaaattttgtagctctctttattaaaaatagttcgaatttattttttggtcctgcacagatgtgtcaccgattcatcattgttggccccactgacttacaccagccaactgaattcctcctctacaccaataaagtaaaaacactttttaaaaaaatatttaattatcaattaattagttaattgttttttattgcatttttgtagcacctttaaatatgccgaccaaatgattgtctattttgcgtgccaaattacactgtgcgacaagcgtgagaatgggtgtgaggggatcaccgttcgtaaaaagaaattaaacgaaataataaatttttaaaacttgtcttaaaaataataaaaagaaaaatcttagaaagttttaaaatatttattttaataatggtaaaagcgctaaaaagcaaacaaaatcataaaaataatgtcaaagactaataattttaagttttatagttttattttgttttttaatactaattatttgccgtttaaattacagcccncaatttgtgaattgactccgctcccctcggaaggcggcncagcaatgcccgttgttgaggcttctcgtgaccatccgccaacaatggcacgggtcagtgctttttaaaaaggcttatttaagtacaataataagaatgacttgtcaaagagacagaaaatgtttattaaatgaaatcacattctattactattttaataatatatttttaagctgatcttattaaatgacccgcttagagtatcaaactgttagctaaaaaattaatctaattttaagtgccattttagtcattctaaattcggttttgttttcagatcataattttattattcatttcgtaaatccgccatttttcaaataaa

SEQ ID NO: 82777 - DNA, 695 bp, Heterodera glycines
atgacaaaggaagcagcagcaacagcaacagatggccaaataaaatttttaaggtgggaaatattttaaattatcacaagtgacttccgcaaccaacggaaaataccaattcttttcgttagaataacaaaaacccctaatatgtttaaaattagtatttttagagaaaaactacatattattaaagtaaatataaaaaaatcaaaatttcccggtgtcaataccaattgaccctcaatctttcaaataattttaaaaatcgcttttaaaatatttctagacaaagaacaacaaaattcagaaatttgattgtttcgagcggaaaatttaatagtcaaatcttcaattatttttataattatttccaattttttaatttaacaaattatagggaagaaaatcgttggactctacaaatataaaaccaaaatatattccaaatgagaatgaaactgaagaccgatctctgaatttattaacagcatcaacgaatgcgaaatccaagcaacaaataaaaccaaataatgatggcaaaggaagcagcagtagcaaaagatggccaaataatttcattaaggtggaaaaatttttcaaaattttatctaaaatgatagccgccacaaccagaaaatatcagttctttgacgtcaaagtcttcaagattaggcaataaaaaaattgcacatattaataaa

SEQ ID NO: 82778 - DNA, 1369 bp, Heterodera glycines
atggaaacttttgaatttcaatcttgttagaataatttaggttaaaattgagtggatatccattaaaaaattttcgattcctaacttgattaaaatttaatatgcttttaattagatttttgcaatttatagacaattaaaaacatttgtattttttaaatccttaacctcccgattcaacaccatattaaattataggtcataaattgcttttgaacggatcgtttttggttggatctgaattggaagggtccgatttggacttgatttgtgttgtgtccaacaaaataattgttcaaaatttttatggatcagacgacggaacattatttacaatcctaaaaaaggttagaaatgaaaataataaatagggccgagatttatatgaaaaataaaatataaaaatgctaatatgaaaaacttacttagtgaaattgttaagtgttgtttcaacctaaaaattgactttttgatttaaattacgaaattttattatttttttgaacaaatactttgtaagaaatagaacaggaaaaattttttataacaaataacctaaaattggtatttttgattttaattttcccattttattgtgtattttttgatcgaaattacgcttaagtaagtgcttttttctattaatttaggcctataaaatattttttaattatctaaataataaacattaatttaaatggacagaaattggcaaatgccaaagtcaattgcatttcgggaaggattcagctgcttagaattgagcttgaaagtttcgaaattgatctgtcttttgtgccagtgccagaaaaatatttagaacaaaatgacggcggtgatttatcacgggaaaaaatcattgaggaaattaaatacgaatctggcatttattcgttggcgggtgaacaaaaaataataattttaaatgaaaattcaaaatttaggttatcaatcggcacattttcaactctcaattttgccggacaaaaatgcatttgtgaatttattgaaaatcgtcaaagtttgggcaaaaagtcggttaaatactactaaaattattagttcaatttaaataataattttataaaaaataataatttttatgcgaaatttgataattttttttcagctcgcctcatttattcgggcatttttggttattttaatggcatttcttgttcaattatggcatccaaaatttgtctgctctttccaaatgcgcctttgtcatatttattgtaccaatttttctcgatttactcaaaatggtactaaaattaaaatttgaaatattaaattaaaattgcctaatttagggattgggcgcgtgttccgattatgcttaatgaattaactccaatcacaaaga

SEQ ID NO: 82779 - DNA, 418 bp, Heterodera glycines
atgatcagattatcattggacggcccaaaaaaaggatacggtatgagtgattacggtataagtgattagaaattcgatttgggaagaaaaaaaaataatgccatttgatctgggccctgacccaattttggaataattatttttggaaaatcgcccaaaatcgaggagaaaattaaatgtgaaaaaaataaaataaaaatagtgatcagaaatgtgaaaaaatgtaattatttctgattaaaaatgcatgaaaataaattgggtataatgaatgcataaattaacacattttaggccaaagcccatttaaggaagggactttaactcaataggcaaattaaattgaattattagcaatgcgcgcaaactgatcagaaatttttgagggagataatttcaaactgggccataacccaaa

SEQ ID NO: 82780 - DNA, 370 bp, Heterodera glycines
gatcagccaatcggagggaagggccgcccctcccgttcactcccggggcccctccttataagcccgggaattccttcccaggcagttgagtcgcgacgatcagctatatcctattcaattccccatccatcgatctcgtcccccttctccagcccagggagagctcagcgcgcgggctacggcccgggatggacaagaggggatccgtgggaccggcacaactctaactggtagcaccggatggttctgaccaaatcctgggcccaaggatttggttcggagtggaattgaaagggtgctgatcaccccggggagggctttggccctgagctcaatattccggccgatgccggccaacaaacacaaaaaa

SEQ ID NO: 82781 - DNA, 382 bp, Heterodera glycines
atgccggacggacactttgagaatgccaaacagagatgggaacggcgatttctgatcttcaagggggccaacctgtgcttgttcgagtcacctcccgtaggcctaaaaaattttaaaaatttaaaaatttaaatttcagttaaatgccgacgaattagaaaagtgtttgtccatgtacaaagtgtacgagacggcactgcgcacggcaatcaaacggttcgaccgtcgtgagcacgtgttcatgctggccacagtcagaggtgtgccaacaaacgatggcattgcggtgccagggatttcatatgcatttttggcatcttcctggcattaaaaaacttgggcatgatcctgtcacaaaaatgattagttccacataattaaa

SEQ ID NO: 82782 - DNA, 421 bp, Heterodera glycines
  unsure (1)..(421): unsure at all n locations
atgagcagatctcatgcattatacgactttacagtacacccgtgnggacaggtaaaaaataataattaaaaaaattatatgtttttaaggattaaccctatgggattattgtgaaattaaagaattggggagaattaacgttaaaaagtcggataatttttgtaagttaaacaaaataatattttaacaacaaaatttttaggtttattttatgcattaattttgagccagttttaccaactgatcgatacgaaagaagatgtgtcaatttctagggaccaattcaaaaaaataattaaaaatgagaaaagacaaagggaagcagtgaaaaaactaataatcgatgcaaaaatttctatggatgagaaaaattatggtcttaaacatttacaaatagttcaggattattgggtatgtcaaa

SEQ ID NO: 82783 - DNA, 324 bp, Heterodera glycines
atggctccatataggattgttgcttatgatttggagtgcacggtaattaaaatgctggtcaataaataatatatttagtttagacgaatacaattttggatgaaaattcacggagaaaagaaacgattcataagccgaattttgttagcgtgagatttacttgttcattatgcgacggagaaacaaaaaattgtgaaatttgtgggaccggaccgcggcatttaaaatggtgtagcaaggatggagttaagccgctaaactgttttattaaatggattattaattttgaaaaatatgatacttatgcatacgcacattttagcg

SEQ ID NO: 82784 - DNA, 595 bp, Heterodera glycines
  unsure (1)..(595): unsure at all n locations
atggccaaagaggcggaacggacggtcccatactttgtgatgggtacggttttggcaccgtttccccaggcattttgggcctcggacatttctttcgcccgtgcccaaaatcggttaaaaatgtcacattttttaattcgagtcaacaacaatcagcaagaaattaattagctgacagaaaaatgtccggggacaaaatgttgggtaaccaaacgattttggcactgcattttatagacaaattgggaaattagggtccataaaagccccccccctctccaccttttccaccgtggtttttgctttacaaattgtttttttaaagttttttgcggctttttcgggtcttttaagagacaattcctcattttttcaaatggtgacttttttttattattttcaaattttatttttttaaattaattttttccaatattgcttttgttgctgttacaggctttttcttcatgttcggctttgcggtttacacgctgctttgcggcgcgttcatctacggcgtcatggactgggctaaaccactgctcgcccttgngatatcaaaaaatgtttgcctgacatgagcaatttcaattaa

SEQ ID NO: 82785 - DNA, 863 bp, Heterodera glycines
  unsure (1)..(863): unsure at all n locations
aatttgtggaattggtgtcaatgatgtgagtttctaaaatttgagttacacggaatttgggatttcatttgggattgacattcggggacccaataatgcttttccccctagggcaaaatcggtgtaaattttcaactaatttcacgacaaatttgcataaaaatatgcaaattttcttaaaaattgtgccaaaatttgattgttttggcccaacaatcgctctttccacccccgaaaatttgtagaaagctgaaaatttttagttttttaactgaaaaaatgccaaagtttacgggaggaagtaatgtttcaattatttattactaaaaaaaattgtgagttttataaatcgtcaacattttccaggcctttctgatggcccattcctggaatcggttggcccatcaaaaattggcagcccccaaacggattggacttgtctttgaagaggtcggcccttccatcaccatcaccacggtgcggactcgttcgactatatttttgatttcgtttattgaaattgaatactttccaaaaataaaacaaaacttttgttcgattatattttttagttgccgtatttcttaaaatagagcgccggagggtttattcaagcccctttagtgggggataaagctgggtggggggagggctcaatttttcanacccctggggctctatttcacggngactctanatttagggggtcggctctattttaggaaatatgctatttaaaatttactcatttttcatttttgcagttgactaacgtggtcaccttcgccatcggcgccttaacaccaaccccgggtttgtcttgtgattgtccgccgaagagaagaaggatgtgcgaggaataa

SEQ ID NO: 82786 - DNA, 225 bp, Heterodera glycines
aacgtaggcatcaagaatacgtatgtgttgatggacgtacgcatttctggagcgttgaatatcgtgagtatgtggatgcgtacgcacacatctaccgtataacattaatctaccatagtcatgtagacaacgtaggcatcaagaataaatatgtgttgatggacgtacgcatttcaggagcgttgaatatcgtgagtaagttgatgcgtacgcacgcatctaccg

SEQ ID NO: 82787 - DNA, 557 bp, Heterodera glycines
aaatgacagtacagttagaaattttcatctaaattaaaatgaaaaaaaattttacgcaacaattttattaaaaaaaaaaacaacaacaattaaataatggaaaacatttaaaacataatagtgagcatttcaagcgggaaaaaggttttgtgatctccgcctccaaattcgacgacacacggcaagttgggatgatgcaaacggattccatgttttatgtagtaatgcattcgtacctaaaatctttaattatgtccaccaaatttccaaaaaaaaagtaccgtaattcccaagaagccgcggtaggccggggctgagtgtgcgtcgagaatggagaggtcgttacagcgcaccgggaaatttcgaacaaaagggcgcaagtgggcggttcgcagctgagcagagcgcaagtgctcgacaatgtctcggcgcttctccaagtttcggaacaacacgtgcagctcatgcgcgctacagttgaaccgcttgcatagatgctcgacgagcggaatcgggcgaggtcgttcggcacaagcacaagtctttggggtacctaa

SEQ ID NO: 82788 - DNA, 4079 bp, Heterodera glycines
atggattcgtttccaatcattgatcacgtggacttgcaatttcgtcatccattcacaatgattgtgtctgggagtacaggcagtgggaagtcagagtgggtaatgcgtctgctacacaatttagagaaaatgatctctaccccaattgagcgcgttatttatggttacggagagttgaacactaatattttgaatttacaacgcactggtaaaattggcaatgtgccagtcactgtgcacagcggcgtcccatctgcggaacaggtgcgcgattgcgccaaaaaagaaaaactcttgctaatattggatgatttggtggtggggatgagtcaacagtatttggacgcgctcttcacacgcggctcacacaattggggcgtgagcgtaattttggtgacccaacacctgttcaacaaagagttgcgcgtctctcgtacaaactcacattatttggtgttaatgagaaatccagcgggcgcccttcagattcgcacaatagccacccacctcttcccgtcaaggaccgcatactttatggaagcctatcgtgacgcatgcgctaaaaattttggctaccttttggttgacatgcacccggagagttcggaagagattcgccttagaacaaatatatatgaacaaaaacaaatagtttatatgccaaaatgaaagggtcgcaattgattgcaagaaatgaatcctttttggagacactgtctaattccaaaaaggcgaaaattgttattagagacgcatccgatgaacaaatattatgcatggtcgaaatttgtctgaacattctaaagggccgagttccattgcgtccacgtcatttaaagaagctgaaagctcacgcacagatgcttcgtcgtctcgcccgcacacgttgttctcgctctgccaaaaacgttttgctacagcacggagacggcctcccagccattgtagggctcattgcatcgattgcccttccgcttattgcgaacgtcattgaaaattatacatagtgcttgataaagttttaaaaaaagtaaaatgcaacatacaaagcgctatttgttggtccccgaagagatttatcagagtttggcaacactgtcaccgtctgacggttcaccaattgggctggtccgtgccagaattaaacaaataaaaaatgatgacgccataaatgaggcggaaagagcagtcaaatatgagcaggaaattaagcgtctcaacaagctcaaaaaggacgaggatgaacgtcccgtcggtgttaaattagaaaatttgagtgatgttgttgacgccatgccaaaaccattcaacattaaaagaccgattgttgtagctactcgtcgccatctcaaggttgggcgtgcgcgaaaagaaaatgttgaacaattagaagatgatgatgatgaagatgattatgaaactccacgcgcgtcgagtacaaataaacgtcccacacaaatggaaattttaaatttaatttataaaaacgctcaatctctgggggtgtcggaggaaggacaggtcttgagagcgggtggacggccatttataaccagcagtgtcgatgatattgttagtcacctgctgaataaggacaagcgtggccaaaaagagccaacagcattcaaagaatttattgaaagggcaaagcagaatcgacaattgagtaggtatttattttccgaaggccaatccggcaaaggaatttataaaaacactttacttaagtttaaaccatccatatggatttgaaaaactttcgtttgctcgagttcttgtacaaggacttaagttcgcctgtctcattcacgagcgttgagccgcttctgaaagaggcgcggaaaagtcaaccaaaaattaatcgaattgatgttcaaaattatttagctacccaacgtacatacacactgcatcgccaggcaaagcggcgctaccgccgtttgccaaccttggcacccggcttgcatactgaatggcaggccgatttggctatttttgaccgaattgctaaacaaaatcgtggctacaagtacttgctagtctgtattgatacccttagccgacaggtgtttgtcgaacccgtaaagaccaagacgagcgctaacatgatcaatgcctttgaacaaatattcaaaaggtctaaatatattccttggaaggtgctaacggatcagggaaaggaattcactgcccgcgcagtgcaacagtttttccgcacaaaagacgttgaacacttttgtatgctcacttctccccaatttcatgccggaatggctgagcgtgcgaatcggagcatcaaagagcgactttatcgctactttacggagcataacacgtacaagtggataggtgttgtgcaagaccttgtttacgcaattaaccactcgcaaaattcgagcattggaatgtgcccagcagacgtgaactttaaaaacgcagaagcattgagacaaaaattacatgatgcagcttcaaatgttctacgacaccagccaaaataccgtgtgggggatcgtgtgcgcattgaaaagtataagcacgtgttccaaaagggttacctcccacgcttcagcaatgaactcttcacggtggtagaggtacactctgagcgttcaccagttgtctatcggttgcgtgatgacaataatgaaattattagtggttggttttacgcaaatgatttatgcaaaacgctagaaaacaaacagcaaaaaatgtatgaaattgaaaaaatattaaagaaaaagaggcagaacggtgtaaaatatgcacttgtgaaatggaaaggttacgatactcgcttcaatagttggattacagcacactcaattagcgagaaatctatataaaaagcagtttttaataaattttaacaaaaaatgccttcaaattctttttatgttgtccttccgtctaacaccaatatagaagggaataggacaaattctttccgagtgcgtttacctcgcaagttgcaattcaattcggaatgggaggtgggtcttgccgttattgtgtatccccactcttggccctccataggcactgtggagcaacaatttgttcagattgagtggcagacagggaatatggtgcggattgagcttccatcatcaaatgtcaccaacccccacgagcttagcaaaaatttatacaggctcttggctgacggaagtgatcccttggcaaaaaaggttcgctcaacacagaattctttcatgcttgcaacaaacaaggctcgccgctgggccagagaagagtacattaggcgaaaaacgaaagaaaaactgggcgtccgtgacgaagagctgctcctacaggccctaatgacagatactggaccattggttggtctcaacaccgtgacgcaaggccttctggcacgcgaaaagcatgctgaaacaagcaatatcgcgttgagaacgccaactgacgataacgattcgtaccagaaaaaattggatgactacttttctaaattaagtgagaaaaacttgagcattgttgatgaattgggtatgataaaattgaatgccgaaatcaaaaatttgacagaagaggaacgtgtgatcctcgaagccacaaaggaaatgggaacggaagcatggattcaagcctaccgtgagatacgtctagtctgccaatttaattatgacatcagtaggaatcgttttgttctgaacactgacccacggtacgttaaaaaggttgaaatctcgcctcaacttgcttacattctcggcttcaacaacacagagtttacacagcccaaaaaggaggcaagattcatgccagacatgagcggcggtgtgtcatcctttcacgtttacactccagaccttattgaaccaatgatgattggcgacgtcacggccccagtgttacgcattgtaaccatacggggagaccccgaccaagtggttgaagaacaattttttgccatacagtatcacaaaattttattaaaggaagtttctgaaattctgattgagatccgtaccaatagcggaagcttgatgccattccaatacggaacatgtacattaacactgaactttagaaaaatgtcctatttttaa

SEQ ID NO: 82789 - DNA, 1334 bp, Heterodera glycines
atggatttaattcttgctaccgattggatacataacgcttatcccgaaatggaccaacaggaccataacaaggaaccgccaaaaagggaccagcaggaccataacaaagaaacgccaaaaaacgaccaggaggatgaggaggagacgaaggagcctagctggatcagcctcattgacgaagagcagaagcaggaccagttcaccccaatttatgatgagccgccaagagcaagtattcagttttcttttttttttaaacaaattgattaatttaggtaccccaaagacttgtgcttgtgccgaacgacctcgcccgattccgctcgtcgagcatctatgcaagcggttcaactgtagcgcgcatgagctgcacgtgttgttccgaaacttggagaagcgccgagacattgtcgagcacttgcgctctgctcagctgcgaaccgcccacttgcgcccttttgttcgaaatttcccggtgcgctgtaacgacctctccattctcgacgcacactcagccccggcctaccgcggcttcttgggaattacggtactttttttttggaaatttggtggacataattaaagattttaggtacgaatgcattactacataaaacatggaatccgtttgcatcatcccaacttgccgtgtgtcgtcgaatttggaggcggagatcacaaaacctttttcccgcttgaaatgctcactattatgttttaaatgttttccattatttaattgttgttgtttttttttttaataaaattgttgcgtaaaattttttttcattttaatttagatgaaaatttctaactgtactgtcatttttaaaattaattcattgaacacgcaacagtttttgactattgcacaacgtggaattaatacagaatataatccacgccgtttccacgcaatcatcatgcgaatccggtatggagcaaaaactgtggctgcactcatatttcaatcggcacgtgtcgtcctcactggagttccacaccctgatcaagcccaaaagtttgcagcaagggttctacgacgaattcaatacactcaatgcagaacaatgacaatctatgagctgcgtgtggtcaacattgttggagttttaacgtttgaccaaagaattcgagtggagaaactacaacaatctctgggtggcatctatgaccctacgatattcccagcccttcggtgcaaattagataatggagccacgtgtctcatttacatttccggaaaagttattctcactggggtgaaagatgtagaaaatttaaaaaattcatttgattacttgtctaaaattgttcctaattattttcgataa

SEQ ID NO: 82790 - DNA, 912 bp, Heterodera glycines
atggaccgtgtcgtcgtccggaagcgacccgagttcgccaaagcaccattgaccaactgccttccagtggccatcttcgtcacttcgtacgcacgcctccatctgtacggatatatggagcaagtgttggcattgaacaacgctgaggttctctactgtggtttgtcttctaccgtttaatgttatcagtgacggtaattcagacacggactcaatctattacgtcaacaagattggagctccgtgcgtaccggagggcgaagcgttgggacaaatgaagcgggaactcgtggacaggcgcatcgtggagttcgtcgcaggaggcccaaagaactacggcatccgacacacagcccgagatagagcggatgaacgtgcgaatctgaagatacggagcttccgtctctcctacgcaacgcagcagcttatcaatttcgatgcaatgaaggagctgacgctgtctacgtacaacattgatggacccatgtaaaaagtttccactttaattttttaataataatacaaattcaatttagtgatgatgtcattgacaacgacgacttgttcgtctacggtggtggagcacatcgcgccatccgcgtctcctttccacagattgaccgtaatgtccaggccgacctcttcacccgggaggcccacaaggactatcggcccttctacgcaaagggacgtgtgcgccctgggatgcaaacgcgcccatttggttatgtggaagacgctccacagccaatggatgtcgaacagcagcccccgcccccgccaccagtacgccgaaagaggactttgattgaagcggatcccacccaacccgggtcattcgcgatggttttaacttatttttcaatgtattttttttttgtttttttttttgtaagcatttatttgtattaa

SEQ ID NO: 82791 - DNA, 426 bp, Heterodera glycines
atgcgaatccgatatggaacaaaaactgtggctgcactcatatttcaatcggcacgtgtcgtcctcactggagttccacaccctgatcaagcccaaaagtttgcagcaagggttctacgacgaattgaatacacacaatgcagaacgatgacaatctatgagctacgtgtggtcaacattgttggagttttaacgtttgaacaaagaattcgagtggagaaattacaacaatctctgggtggcatctatgatcctacgatcttcccagcccttcgatgcaaattagataatggagccacgtgtctcatttacatttccggaaaagttattctcactggggtgaaagatgtagaaaatttaaaaaattcatttgattacttgtctaaaattgttcctaattattttcgataattttatttaatacaa

SEQ ID NO: 82792 - DNA, 207 bp, Heterodera glycines
aaataacagtacagtttgaaattttcatctaaattaaaatggacaaaaattttacgcaacaaatttattttaaaaacaacaaaaattaaataatgaaaaacatctaaaacataatagtgagaatttcaagcgggaaaaaggttttgtgatcaccgcctccaaattagaagacacacggcaagttgggatgatgcaaacggattccat

SEQ ID NO: 82793 - DNA, 1889 bp, Heterodera glycines
atgtggggctgtcagtggaaggagcgcctccgccgtgaccacgagctgaagcaacggtacgaggccgtcttcacgccatgcccactggacccccgcaatgacgcattgaggggaggccgcacggagcccttcaagctccaccacgtgtgcgccgacgacgaagaggtgctgtgcatcgacattgtcagcctctatccctacgttatggtttgcattttttttatgggttcgtttcaacaattaaattttagaaggtgaatccctttcccgtggggaacccgatggtgctgacgcgtgaagtgctcctccatccaccgacggcacctcttccgtggacatgcccagaaaacaacaccttccgtggccttctccttgtacgggttctggcgccacgaaacatccgtgtgccacttctcggctaccgtaccaaagacgagcgcttcacatttccactgtgtggcttatgtgcggaccgtcggcaacaacgaccgtgtcggcatgatgacgacaaacgatcgtgggtgtgcgcgtacacccacgtggagctgaacaaagcacttcaactcggctacgtcgtcacagacctctttgaggttgtttttttaaagcattttttttgaaccaatttcaataggtgtgggactacgctgagtgggacgacacgctattcagtagctacgtcaacagcttcgtcggtctcaaagtgcaggcgagtggatggccggagggatgcgacgccgaagagcaacgtcaggccttcgtcgcagagtttctgcgtacggaagggattcatctggacccgacgaagatggccttgaacccgggtctccgtctgatcgccaagactttggcgaactctctatggtattttattttttctacgatatattaaaaaaaaaatgatttgaaggggaaagctcgcgcagcgcgtcggtcacactgagatacaatacacgcgcacgcctgccgaattccacaagctgctcgacgacccgacttacgacaaactggactttgtccatgtctcggaccacatggaccgtgtcgtcgtccggaagcgacccgagttcgccaaagcaccattgaccaactgccttccagtggccatcttcgtcacttcgtacgcacgcctccatctgtacggatatatggagcaagtgttggcattgaacaacgctgagcttctctactgtggtttgtcttctaccgtttaatgttatcagtgacggtaatttagacacggactcaatctattacgtcaacaagattggagctccgtgcgtaccggagggcgaagcgttgggacaaatgaagcgggaactcgtggacaggcgcatcgtggagttcgtcgcaggaggcccaaagaactacggcatccgacacacagcccgtgatggagcggatgaacgtgcgaatctgaagatacggagcttccgtctctcctacgcaacgcagcagcttatcaatttcgatgcaatgaaggagctgacgctgtctacgtacaacattgatggacccatgtaaaaagtttccactttaattttttaataataataatacaaattcaatttagtgatgatgtcattgacaacgacgacttgttcgtctacggtggtggggcacatcgcgccatccgcgtctcctttccacagattgaccgtaacgtccaggccgacctcttcacccgggaggcccacaaggactatcggcccttctacgcaaagggacgcgtgcgccctgggatgcaaacgcgcccatttggttatgtggaagacgctccacagccaatggatgtcgaacagcaccccccgccaccgccaccagtacgccgaaagaggactttgattgaagcggatcccacccaaccgggtcattcgcgatggttttaa

SEQ ID NO: 82794 - DNA, 651 bp, Heterodera glycines
atgtacactgacccaaaacattatcattacaattcgactcaaattcatgttaattgctttgtgagttgggtcttaattaatacatcatttctaaaaccctgtctaataattgactaattttacagaaggcccaaggaggtaccgtaagcttttggggctacagtaacccggagaccagagaaatcattcgggtggacgaagtccactgtttgactgataaagctgctggagtgccaaaacagttcaaaagtttgcaagccgaagaacagccgccgatgaaattgagtccaacgcgtccatttttggccaataatgcttcatcacttatgcatgtgttcgtgccatttggtgaccatccatgagagaaaaggggagatcagtgatcagtgggcgatctttattctgcacctgatcagttggccaattccaatcagcaaatttttattttatttttatttttttgaatttttaggggtgtcattcttttgaatccatttctattcagtactatatgcattttgagatttgaattgcgaggatttgtgtgaaattccgagagaattgatggccaattattcagcagtgttattgaaggcggaggcaaaatgtggcgggaattggccgtgccgatgccattggcgaattaaggca

SEQ ID NO: 82795 - DNA, 474 bp, Heterodera glycines
atgccgtcccagcgtaacatggcgttggtggacgaagacaacaatggcacggctaattacggcacacacattagcgcaacggatgaggaggagcgggaagaagaggaggtggaggaggaggagaggaggagcgggatgaagaagaagatgaagaagagccacgtgtgcaaattgttgagcaaaagaagtctacatgaacgacccaccacaagtgatcagatgaatagtgattgatcactttttaagacaatcaaaatcctggtcagtccagtttttgtcgatttaaaccaaatatttgaaatatttttgaaaaagctgatcactttgcctcgcttttaccaacaaacgattggccaacgcgaacgaatctctttcaaaggtgcggccataattaaccgaatttattgcaaaggcaaatcaattaaatataattaagtgactttccatttgttcagactcatgcaaaggccatga

SEQ ID NO: 82796 - DNA, 547 bp, Heterodera glycines
atggtcaaccaactggtcaacaatgccgtgttggactcggaggagattatcgcaaaatcgaagagagcagtgttggagaaagttccagaacaaatcggttccgttgaacttgtgcgaaaggtcgctaccgaatatggaatgatggacgaggtgatttttgaagagatccatcgacatccaaaattacaattgccttcgggcgaaaaccgaattgtcaaggttccatttgtagacaaaaaaaccgaaagattttccttaaaaactttcggaaaaccctcacaaaattcaatcaattcccaaaaaatgtctcgttcaggcgggatatcacccggcctgaactcaatttgctttatgagcttcgccgtaaggcctatgccatgaaccaaagtgaaaatatgtttaaatatgtcgtcgttgacctctccattattactttgaaaactccgcaccctcttcgcccaaaagaactcaataatgttacccgagcaaaccaaactataaaaatggaaaatccttagacaaaaatccatgggtttcctgcctatta

SEQ ID NO: 82797 - DNA, 547 bp, Heterodera glycines
atggtcaaccaactggtcaacaatgccgtgttggactcggaggagattatcgcaaaatcgaagagagcagtgttggagaaagttccagaacaaatcggttccgttgaacttgtgcgaaaggtcgctaccgaatatggaatgatggacgaggtgatttttgaagagatccatcgacatccaaaattacaattgccttcgggcaaaaaccgaattgtcaaggttccatttgtagacaaaaaaaccgaaagattttccttaaaaactttcggaaaaccctcacaaaattcaatcaattcccaaaaaatgtctcgttcaggcgggatatcacccggcctgaactcaatttgctttatgagcttcgccgtaaggcctatgccatgaaccaaagtgaaaatatgtttaaatatgtcgtcgttgacctctccattattactttgaaaactccgcaccctcttcgcccaaaagaactcaataatgttacccgagcaaaccaaactataaaaatggaaaatccttagacaaaaatccatgggtttcctgcctatta

SEQ ID NO: 82798 - DNA, 954 bp, Heterodera glycines
atgccaaaagtatcgcaaatatttgcacattttctactaatatttattccgattatatgccgaaggtttgtttttgagttaacatttcttttttctatttaaatggttttttcgcagattttgccgaaaaataccaaaatttttcattttatgccagttttttaagaaaattagccggcgttgccgatagtcccctccgggaaaaactgagttttttgtacgatttgataacagattttgcaccaaataatgccattaattaataaaaaaaatatttgtataaatttcaaaaaattgtaaaaatttgaatgtttttttctaatgccgatttccaaggacatcttggaaatcggcactctttcaattttccaagaccctatgcccaaatccaaggacgtccttggatgccaaggacgatggcagccctggatttattcaattaatgcttgcttgctaattgattaagctaaaaatggtgaggaatcgaaacaattggcaacggtgaagccaatattttttcacgtaacaacaaaaatttgtttaattgatgttgtcagaaaattgaatgaaatttcaaaatgtttatgggaaaaatatcaaagcaaatctttgaatatcgatgctattcgcaatatcaatttggaaaatgaggaggaattaaattttgaaattaaagaggataaagatgggattaacgaaaatgtacaaaagaggagaaaacaaattaattttgaaaggaccaacggacaacggaaaacttcggaaagaatttgagaaaaaaatggaaaaattatttgaaaatgcaaaaaaaaatgccaaagatgaaaaggcctaaattggaaaaagcaaaagcaaatgcggcaaatgatgaagaaaaagtaaatctagaaaaaagaatttaatcgcaaattttgcatttttaattcgtcgccatttttataaaaattaatttta

SEQ ID NO: 82799 - DNA, 135 bp, Heterodera glycines
aattgttttgaagaaaggagctcaaaaaacgcatttctgcattcattaaaaattttcgattctaatgtcattatcgttcactagaaatcactattttggcgagttcgtcactaaaatagttaaaatcactatttt

SEQ ID NO: 82800 - DNA, 307 bp, Heterodera glycines
atgtcgtgccattggttgcgtgatgtcgtgaaagatttcccgttaatgagaccaattagtgagtcgcatgaaaaaatgttaagcaatttaaaatttacctaaatattttgttttattaggaaaaaacccgtgaaattggactcatttctttttaatgataaacaaatataaaaacgaacattttaatgaattacaaagatttttgtaaaatttaagcaaaaagcttgcacttttattttatggagtttggatacagattagcaaagaagattttataattggtaattaaaacaaatttatcgaaaaa

SEQ ID NO: 82801 - DNA, 990 bp, Heterodera glycines
atgacaagtgttgtttatttgattgttggatttgtgataaaaaagaaaacagcaggtaattttttatttcaaatttacagaattttatttattaataattaatagtgaagatcggaaagttctaatttgcagatccctaaattttgcgggaccgggtcccggggtgatttatccgcaaaatcccgcaacttcctaaaaatacagagattagtactcaaaatttttgcgggatgggatcttgcgcgactaaactcgcaactattaaaaaatgcgggatttcggactgggaccccgcaatcccgtgctgctctctaattaattggggactgatttatatggacaaaaattttaaatatgaattaattagttaaaatataggaaaaaaatttcattgtattcaaattctaaaaaagtttattcaaacaattaaatctatgactaaaaacaaaaaaaaagcattaataaaattaaaattcacgattttatggatacgtttacatattgcatacgaaataaattttaaaaaaaaaattaaaacccgcaaaaattcattctctaatgatcaaattttcgtcacattaggtttgccatcagctggtcagatcaatcatcgcgcttttcgggcacttatttgcattgtcagtgtcaattttggcggctattgtatctatttgttctacaccgttctgatcaatccgacaatttcgtctccgatcactgcttggttcctgcaattaattgccgcaattcctttgaacattggcgccgcatcgaacggaccaattttatattttacgaggtggcatttttgaaaattaaattgaattttttaattatattttagtacggaatatcgacaggcattccaagcggagttctcatttgttttaaaaggaatttcaaaccaaaatcaagtcgaaccacagccaaatgtagttgctccaaaccattaattagtcaaacaaatcctgaaattattggcaaattaaa

SEQ ID NO: 82802 - DNA, 652 bp, Heterodera glycines
atgcggtgtacacaaacaaaaaatgtccttgttggtgaagcaattcaaaaagagagcaaagcgccaacaggtaattaacggtgccgcgaagtgccctaacaaaaaagtaatttaaaatttcaataattattaattaggctgtgaattttagtcacgaaattacgaaaagtcattaaaaacgattaaaaagtcagaaaataatgcaaaaaagttataaaaaattaaaggcactaaaagtcataaaaagcgctaaaaaggcacaaaaaatacagaaaaaatgttctcaaaaaattagcaaaaagtaaccattaagcaaagtataaaatatttttaactcattttaagcacatttaaagtcagtaaaaaaaagttatttgacataaattcacagccctaattactataaataaatttaagaatttccacaatactttgtcctaatggttacataaatgacagaaaaattcaaaatgattccaaacagagcaataattccaacaattgaagcgcatccaatgagtgaccagctgggattttcatttttgaatgtcaaataaaactaaatatttattaaaagtttaaaaatatattgaccatttaccgtattgttaattgttgtgtcagtcattagagccaattatttaatttaata

SEQ ID NO: 82803 - DNA, 577 bp, Heterodera glycines
atgataaaacaaaaattgtcctcgaaattattaagtaagtaattgaacaaagtctaatatttaaaaaatttatctaataattataattaaaatatataaatattcttaaaacttattttcttaatagaataaaaattgcctattaattatgacaattaaaaaaatattttttttgaaaaaattttctttatttttgctttaggccttgatgtccccccaaatgctttcatcgcagccgatgactttgacacagtggaagaattggctgattacttaacgaaacttcgaaatgacaccgaacgatatttaaagtaaaaatgaaaatttataaaaatgctaattacctaatttaaaagccaaatttttagattttttgaatggacaaaaacttaccaaaagaatcatttcgccattatgcattcgccgttttgcaaattgtgtgaattcgcccaccgacagtatgacgaagacctgaaaagtacggtggattttagcaaacattggacgacgagagactgtataaaaggatttgtgcagaaatttttaatcgaaaagaaacgataaaatgtttttttta

SEQ ID NO: 82804 - DNA, 689 bp, Heterodera glycines
atggctaataattttatttcaatcattgaacgatgccttaaaaatgaagaagaaattgaaatcgttgaagatctcgcatttgatgaaaatgcagataaaaagtttaaatttagtatgtggaaagaatttacaaggaaagtcactcaatttgttattgtttgtgaaattgatttaaatttgcacactcgggacaatatcattaaattgcaatcactgatacacaaccagctccaagcaagccggtttaatgcttggataaatttcgcatggcgaaaagctggattttatgggaatgactccttcccaatttttacgcacccagttaaatattgttttgatgcaaaaaagcagccacatcaatgccaaaagaatgaatgtgccaatgttgttttaatccggtgcgctcattgcgaaattttcctatgttttgaacatttttttgtcaattaccatatgtgtactgattaaatgattttgatttagagaaaattaaaataaaatttattaaaaaaaacattttatcgtttcttttcgattaaaaatttctgcacaaatccttttatacagtctctcgtcgtccaatgtttgctaaaatccaccgtacttttcaggtcttcgtcatactgtcggtgggcgaattcacacaatttgcaaaacggcgaatgcataatggcgaaatgattcttttg

SEQ ID NO: 82805 - DNA, 542 bp, Heterodera glycines
atggctattcctcgcgataaaatggttcaaataaaagtcagttatcacttcccaaggccaggccctattcagaaaggaaaaaatcaaaggtgggcgcaaaatcctaaggctttttttggctcttcgcctaaaaattaaaatttattattttccaaattaggggccaccaaaaagaggcaatttttgtccatttattactattaacctcaaatatccgatttgatacttgttgttcaaactttatgaaatttgaggtccctaacaaaggagagtgttcgggttatggtggaacttccaaatgaaactttgtaggtgggtagaccacccctgggttgtattgccaaattttttttctagctgcggaataagcttctgtgccgagatatgaggctttaaatatttaataattatattatattaaatttaaaaggagaagcaacaagcgaccggttggcagggtggttgtgtgtcacgatttcatttttgtaatggaaagttcgagtcccccctacgcaaacattttttttattgtttttaataaa

SEQ ID NO: 82806 - DNA, 1243 bp, Heterodera glycines
  unsure (1)..(1243): unsure at all n locations
tatccgtccgtccgttcagctgcttcttcttcctcttcttctctctcctcctccctttcncatggtccaacagacaaatattccgcttgaacctcggaaactctctttcgtcctcctttttctcgtcgttgctgctctctccaattgggcagctctttcctatgtgcatgacttcatcggtcggttagtttttgctcgattattccaatttcatcaattaaataaccacaaaattattactttttaagcggggaaatttgtcctctttttgagggaatttttccgagattatcgatcgcggcttttttaaactaattaaatgggccgaatgatcctttggcatttgcttctcaaaaagctttgaatgttttcagatcacctcttccggacattgtgttcactttcattgatgaacagccgtgggcacaccccgtgggcgattttatggttggcaaagcaattaaaatttgaattcaatttaaatctgactgacatttcagatttattttaaactatttaattacatattaatgaatctaattaataaaattttattttttttttattaattcaccagtttaagttttgtttgacttattttatttatttccattcgaccattgccatttattgcttttacaattaattttaattggtaattaattttaattatttttaaaataaatttattttataattatttaattatttattttaattatttattttttaatttagatttatttttgtattattttaattctgtccaatttttgctttgttgattattttattattttcattattatttaatgcttataaattgttttaatccatttgttgattttataattgaatttaattgataattattttaatttatttaaaattaattatccctccccttttttgccaggtcagtctttcctccgcgtcgctgattttccttttcgtcctgcacaaacaccgcgtgttggtcatccgtcgtacgctgttcatcaccgcctgtctgtactcgctgcgcactttgatgatgctaatcacccaattgccctccggctacagcgacaacggcgccaaatgccgcgcggaattggcacccgaacagcggacattgcgcgtttacattcagaggacgttggagcagacaattcatgtcggatttcaggtgaaagagccgtgggggaaaagaaaatggggtactaacgcgttttgtcgtacccttttaaaaatgccatgaccc

SEQ ID NO: 82807 - DNA, 267 bp, Heterodera glycines
atgggccatttgctccgcttctgctcattgcttctcctccctttgctgctgctcattccgttctctgtccgcccacatggtcaccaacatttgcgtgaatcggcgccacaccagcagtttcaactcgcgttcgtgaacatcgaattcgatcggatgggcgaatacgacggaatggaactcggtgttgagcagttcgccaaggcgtgccaaccggtcgttgtccacgcagcacacgcagcgacctgtgcgacggtcgcgcacctttaa

SEQ ID NO: 82808 - DNA, 1728 bp, Heterodera glycines
atgggccaaggcgcgtacacctgcgagcccatcaatgtcaagggccgcgtgttggccactcccgactgcatcgtgcgcattgtgtccattcccgcgccgcagacgccccaacctccgccgccaccaccgccagagccacaacgattggcttgcaattcacagggcgcgtacagcccgtacagcgacgcgcgggggcaatgccaatgcaaagtatgccgtgggaaaattccaaaaatgcattcgcaataattaaatttccataattgattttgattgaaaattcccacggctttcagccgcttacttccggcccgacatgtgcccaatgtgtgccgggcgcttaccatttgagcgaccgcgccccccaggggtgtctgaagtgtttctgtttcggtgtcaccgaccaatgctattcgagcggattgttccgcacaaaggtggacaattacaatttataattccccccccccccccaaaaaaaacattttgaatttcctcaaaagcttttctttagttaattaattacaattttatttctttcccaattttcttttcgtttttctttcgtttatttttagttcatttaacttttgggcttatttaacgctttcgcttcttccttttcaggacattgcttgtgtaagttgcttgctaatcggaataagtttactttttgtttggtttttggccatttccctccgcctttctcacttttttaacatttttggttttataattattttaaattatgttttaaaataaaaaaaacaattaaattagcgatttccaattagtgctgcctaaatgcttattgttaaatgagtcgctttccttcacctctttcatccattaatcacttcacaaattcacccgaatcacttttgtttgctttttcctcattttgctgataacatttttcagtttttttaaaaccattaattaattaaataataaattaattgtttttgcttaattactctcttcagcaaaagctcttcttcgccgacgatgcacaaggcgttgaactgtcaaatgtgcagggacagactcagcccggtgttcagttcgaattcgaaaagtacggctatctgacgcacacggagccgcacttttcacaaacgctctattggaaattgccgaaacgtttcctcgggaataaagtaaataattttgagcctatcaatgtaaacaactaattaattgcaggtgaccgcctacgggggcgatttcactgttcagttgcaatacgatgggcaagcccaaattcgggaagagccgcttgtcgtgatccaagtaggcagcaagccatacgtcgatcagtgccgatcgatcaatgcgttaattgcgtccattaagggcaatggggtaacactcgtgcacaaaccgaccgaccaacaggcgcagttcgtgccgggacagccctttaccatttccgtcaacacttacgaggcaattaaccacaatgcaaacgcatcattaataaatgcggcttttgtgcagcaaaactttgaacatcagaacggatcaccggccagccgggaggatttgatgatggcattggccggactgaaccttgtcctgatcagagccacgcacacggacgaccaaaccagcacaaggtgggaatttgagaaaaagaaccaattctatatatattaaattattattctataaataatgtatatgcaaataataataatatgtcggggattgaaatggacaattaaa

SEQ ID NO: 82809 - DNA, 743 bp, Heterodera glycines
  unsure (1)..(743): unsure at all n locations
caccnagccaaaggnaacaactgcaccccgcagcaacagaaccatccagcagatgctgcaacaacaacanccagtcacagcaacagaacgcggcggtggccgcactgatgggccaattgttcggggcggcgacattccaacagcagcagcagcaacaggtggggaaaggggggggatagcccatttatcttgtaattaatcctcattaggcggctatatttgccctccagcaacgtgcggctgctccgcccgctgttcagcaacaacaggcacctccaccagcccatcccccgtcggcactgccgtcaaacactgctcagcacattggcaccgcacaaaacggaccgaacgtggctcaacaacagcagcaggcgatgatgcttttggagatggccgcagcggcggcaatgaacccgcagcaattgatggcactgatggccgggagcggactcgatgcgaggatacttgacgaattaagaggtcgagcgggaaacgaaacatattacacacaaattcaatttgacgcttaaggacatctgctaaaccagcagcagcaacaacagctgacagcgaatgctgctgcagcacagcaccaacaacagcagcaagcattggcagcacagcagcagcaagctgtacatcagcagcagcagcaaatgttggcaatgttagcaacttcaggtgctttgacgcctgaacatctacaaatggctgtcattggccaacaacagcaggtgacataa

SEQ ID NO: 82810 - DNA, 220 bp, Heterodera glycines
atggacggcaacggaagtcaaaattcggcagaaaacatttggccattggcacatgtcgacaatgccgaattggatgatggcacatcgtcaaaggcgaattcgactgaattttgtgaggaaacaacggaagagggaggcgaggaaaaaggggaggacaattcttcggatgggccaaacgaagaaccccagtcagaagatggatctggcaatgaggacgaag

SEQ ID NO: 82811 - DNA, 1263 bp, Heterodera glycines
atgccccgtgctctgatcaatcgtcaaccgccggtgatcagtgcttcgacgaaaaaaacgggccgcaaacgcatgtcagcttcgtcgagtgcctttgttcccgaagacgaggaagacgcaccggccgcctatcgcttgccatcgaatgcgatgggtgacgcacggggacagaagcggaaaaggtggggaaatgaatgatcgagtcgcactgtgtagggctttgtgtttcttctttctgtccatatgccgtgcttctcccacctgtccaggtccgtctcttcatccagcagttcttcctccgtctcctcctccgattcttcttcttcctccggctcttccagctcgtcatccgcttcatcacatactccactgaaaaacgcaaaaccaaatgcatcagaacatccatcaaaaaggacgccgaatgagagggagaaaagcaacgacatgagcggaagtggtggcacgaccattagctgctcaactgtggaccaattggcgctcaaagtgacaaaggcggagcaacaggaagtaaatgcgcaaaatgtggcgcaaatggatgacgaaagtggacacaaagtggcacaaaaggcagaaatgcatttgaataacaaaaattttagcaattgagcaaaaatattgcgacaggagaaagaaaaaacgtcaaaactgaaaaagctccctgcaattcttcccgtttggccgatggggacaaaaagacgagcaaaacgaaagatgaaagaaaaggttggggcggaaaatgaaagcaaaatgaatgccacaaaaaacacacatttatcgatgcagatgaaccaatggatgaaaagagtggtgccgcgccgtcctccgtcgatcatagcaaaaagcgtagggaacagttgctgagacagctccaatcggtggaagaagccattgcccggaaaaggtgggcagcgaggaccaattagaattttctgtgatttttgtcgtttaaggcagcgcggggaggggacgagttgaagtgaattggtcccatggaaaatcgactaattattcgaatttgttaaaactgatatttatttgggttttctatttgaagggattttgtgatattagtttcgtctcattgacttcaattttgatgtcgtacgtagtgtttgttggtggtctgtcattcatggcaagccaattttggctcgccaaatgtctttaatatttggcaatttctatgttttgttcccaacttataacaataatatgtttaattaagtatacatttttgcttga

SEQ ID NO: 82812 - DNA, 2219 bp, Heterodera glycines
atgaaaatttacaaactctcccaattcaaagccgtcgcagccgctgaacttcaaaagtcggcctttgttttggtggtttcgtacgaggaattgaagtcgaacaggtacaacacaaagagtagagcattttaagaataattgaaacttttcccatatttttcatttttctcaggctttccacggtcacttccgaagggcaccgttggaattatttggtgttggacgaaggccattgcatccgcaaccccaactcgcaactgttcgacttttgctgctctgtccgtgccgcgcatcgcctcattctatcgggcactcccgtgcaaaattcgccggctgatttatgggcacttttccagtcattaaacaatttcgctggccatctttttaatttggtttctagctttttgatgcccggttatctgtccacccgtgccgttttccaagcgaaatttatgcggcacattttggcatgtcgaaatgcacgcgccacggagcagcagtgcaaagtgacgaactggtcaatgggggaaggaattgcgtttatttgcaggatggggaaaaagcacttcaactgctccatcgccaatgccttccctttgtgatgcgccgacttaaagtgatcagaaaatggccaaacatccggtgaattgccattgtacgctcgctttttcagactgatgttctgacggaactgcctgaaaagattgtgcaagaccaacagtgcgagttgagcgacttgcaaaaggcactttatcagttggtggtggacaattgtgccgttggacaacagccaaattgtgggtgaatttgccaacgaaaagcatttgatcaattaatcgttaatttggggatttccttccctcatttggaagggtaaacccaaaatatacagtcaattagaaaacagattcttcacattcagcagcttccgatcgcaatcgttggttttcgcctcttcaagcattgcacatgctgcgcaaaattgtggaccatccctcactgatcaatgccaatttgattgatcaaatttgtgccggaaactccgaggcggcagaaatggaaaaacgccaacgaattatggaagaaatgaaaaaattagtgagcagagactaaccgataaataataattcgcaatttaattctgttccaagagtgttgatcagtcgggaaaaatggtggccttccgtgatttgcttatccaatgccaaattggcgatcggacagtggcaatgggaggcgataccgaggacaatgcaaatgatcaaaaaagtgattgatcggggaaggggggggcggtggtttctttcaatggcccactttttcagaagcgccttcgacttcctttgccgttcctccgcccgttgcccctccgcttctctttccgtccgtttccggcggtgcccatcgtgcgttggtcttctgccaatggcgtgcaactctcgaggcgtgttgcattttttgcatggcaatcagttaaacatgtcccttttctccacttttagttgatcattcactttttggaccgcggcgctttcggagcggagatttcttggcttcgcctcgactcgaccgttccggcaaaggacagacaaagtgtcgtcgaccgattcaacaccgacccgtccattgacctgctgttgctcaccactcatgtgaggacgaaaaatatttattcaaatacgttaagtctggttggttatgttttccacaacattttgtccccttcagatcggcggagtcggactgaacttgaccggtgcggacgtggtcatcttcgtcgaccatgactggaacccctttcgcgacttgcaggccatcgatcgggcgcaccgattgggccaaaaacgaacagtgaatgtataccgactgatcactcgaggcactgtcgaggagaaagtgatgcgactgcaacggttcaaaagcgacacggcaaatgtgagagctgactatgatggatttcttagattaatttactcaatttaacaggcccttgttggcgctgacaaccgatcattggccggcatggcaaccgacgaactgttggaactgttcagtttgggcgatggcgccgatgacagtgccggaaagcgaaggcgggaacagcccaaagcgaaacggccgagaatggacgcagacgaagccattgcagccgcgggacagtgggcgatggaggagttgtggacggtggcgggcgatgaggacgacgagaagacagagca

SEQ ID NO: 82813 - DNA, 808 bp, Heterodera glycines
atggatgcccttcgtgtcattttccccgctttgcgttcgtccgttctccgacgtcgaatcattcgcgaaaggattgccccgcacattcagaattgcttcgtccttttgtcctccgcgaatcccgctgttcgcttccgagtgcccttttttctttttgcaataatcgtttttaaaaatcatatattaattgttaaaatattatccacaagaatcgccagccattgaaatttggtcctttcccaaaggtttctcgctttttgtctgaatttgcatccgccgaactctgtccaatcctcaaactttgttaccagcgtttttccgactttatctcaggtttcttctttttggttttgctatttttctctcttttaggccccctctccaattccaattttgctcgttgcggtgtcattgagcttttggtccgtttggcagccattggcgcgccaaaacttttaggcattttttttaattcgtaaatttaaattcgttttttgctttcggtgtcgtttctctgctgactccgatcgcactttgtgcaataagcgaccaaattgtcgaggttttggtttcttttttttccgttttcatttccatctcattttttcggttcgcaattctgccgcttttgccctccgtcagctgattacgcttttgccattggaaaatgtttgtttccctccctcctccccctaaatattcatttcgattttaaatggtttctctctttttcagcgttactcccatttcttggctgaactcgccgatccttccgatggcaattcacagttggccaatgcctacgccg

SEQ ID NO: 82814 - DNA, 2361 bp, Heterodera glycines
atgaaaattctacgcaaaaatgcgttattcgtcgccatatttttcctttttgcctgggttttcctttggttttttctttccccacaaaacaaaggtccgaatggactttctcttcgaccgcttctccttttttacaacagagtaagtttttcaagcgttaaaacattaaaaacagttaaacgcttgtattttgttattttggatttaccagaggatttaaatttctaaatttcgttatgtttcgcttttcctttctgttcagatacccaaaacgggttcgacaacatttgtaaatgcaattgcctacgatttgagtactgtcaatggtttccatgtcgcccatttgaacttgacgaaaaaccgttaccaaatgaacgcaattgaccaggcgcggctggtccaaaacctcacaaattggcaacggatgcatccgcttttcctccacggacacttcgctttctttgattttgagaggtcggccaatgtccaaaatcactaatttatgcaaattgcctctgtccgtcctcgcctttgggtcccttctcattaatacattttccccatattttctgcattcctcattattttcagattcggccttccccctcccatttggattaatttgcttcgcgagcccttcgatcgctttgtctcttatttttattttcttcgctacggcgacaattttcgggtcggacttcgcagaagcaaagcggggaacaacgaggtaaattgtgaacatttagtgagttgaattggccaaattttgaagggttcacttagacttttgacgaatgctttcggcgcggcggcagagagtgcgacccaagcgcaatttggctacaaattccgtacttttgcggcactgcccatttctgcaggtcaaagaaaacccaaccatttggccgccattgaatgaatccacccactaaaactagaacaatttttaataaattcacaaaattaggctttttctccggccctaaatcctttctattttcgaaattatcgccgtattgtccaaaagcaaaattttctaatgggttttctcaaaaaatgagcaattaggtttttacaaggcacaaaatttgatttttattttttacattattgaaaaatgctgaactttgggctttttcacccaaaatacggaatttacccccccccccttttccattatttgtcactcactaactaattgtttaattggtaggctttacgacttctttttttctgatttcctcacttttcttccctttttaagcattcccggcaatgcgcaggcccttcagttggcaaagcgcaatttgctggaccattttctgttggttgggctgacggaacgcatcgaagagaccgtccttttgctggagcaacttttgcccgcctttttccttggcgccggcgaacatttccgcttgctaaatggtgtctttttttacatattccctcataatatttgttggaccaattccattgttaattattccgttaatttgtaagatacgaaaatttatggttaaatgtgaattattttttcctacgggcactgaaagtaactgatttaaatttatttttaaaattgaaatagcttcgctattaaacactgtctctagagggcgctacgcgccaaaaacctttataagatggcaatggattttttggcatggaattcaattaattttttcattaaactctaacttttaatatgaccacttaaaaactcttccctttctcttcctcttccactttctattcatttattaaacaacccaataaaataacccgtaaaacccgtatcgtaattgtacggataagggttacgggtttgacatcgatacgggttacgggctaaaaacccttaacccgtaaaaacccgtatcagccgaaaaaaatacgggttacgggcccgtaaaaatccgtatacgggcccgggcccgtacacgctctctattgaaaattatggccaataaaaatctacttaaatttcgacaaaaaatgccaaaaatgttttatgattttgagacatagaaaagtaaggtgtctcaggacgacaattatttattattcccggattctctgcctcattagcgcaattaaacattaaatttttaagaggacagaaaatctttgcggcacactcttcggaagtttccgccaaccattgaaacattgcgcaaattcaagcagcataaagtttatcggatggaacgcgaattttacgattttggaaaagcggaatttgaattggcgtggaaaaggtcaattggggaaaaagaaaacgacgaggagagaaagggacggaggaagcaacaaaagtttatgagtggacaattccattttgagaagataaaaagagga

SEQ ID NO: 82815 - DNA, 154 bp, Heterodera glycines
atggattatggcaaaggctatttccgatcagaaggcagagactattgcaaattcatttgtcgagatggtgatgatccaaatttggaacaggaggaggcagaagaaagtgaagaagaaggattcgagattgtcttgagtaaagagaaagaaatga

SEQ ID NO: 82816 - DNA, 2162 bp, Heterodera glycines
tcattggtgccaaagacaaatggcaagctgcggttgtcctttgactacaaagtcacggtaaatccttggttggatatacataaataccaacttccacgccccgaggagctgttcagcatcttgaatggaggcgaaaaattcacgaaaatcgatttgaaggacgcatatttacaacttttgcttgacgaaaaagccaaaagttgtctcacaatttgcacgcacaaaggacttttccacttcgctcgattgccattcggagttgcttcggcacccgcaatttttcagctagtaatggaagaagttctgcagggcattgatggcgtggcagtttatctggatgatattctgatcacagcagccactgatcagcaacatgtcaaaagaatcgaccaggttcttaaacggttgtcagagaacggacttcgagtcaagcgtgaaaaatgtgaattcctcaaaccggaaatcgaatatttgggacacattgtggacaaaaaaggtcttcatgcgtcacctggcaaaatcgaggcaattttgaaaatgccgaagccgaaaaatctgaaagaattgcagtcatttctgggaatggtgaactactatggaaaatttgtgccatccctggcaacgctttcagaaccgctcaatgaattaaggcgaaatgacgccaaatggacatggacaaagagccaacaaaaggcattcgatgggatcaaaaaggttttgacatcaaccgaagttttggtccattatgacccgcaaaaaccactttttctggccgctgacgcatccgactatggagttggagcggtcatttttcacatagatgaaaaaggaaaagttggtgattgcgtatgcctcccgaacgctaaattcttcggagcgcaattactcgcagattgaaaaagaagcgagggcaatcatttttggagtcgacaaattcaagcagtacttgtacggtcgaaagttcgtacttcaaaccgaccacgagccactaaaaaagatttttgggccaaaaggagagctcccgattgtggcggcaaaacgacttcatcgatggtcactgacattgatgaacttcgactttgcagttgtgtactgctctacaaagaatttggcaatgcagacggtctgtcgcgattgccgtgtccggaagagacaaccatcgactgtgttggactggaacttcagcaagttcaggccgaaaatatttcatgcttgccggtcacagtcagtgccatcgcaaaataagtcaaaacggatgaaattcttcgaaaagtgaaagaattcatcgaaaaaggatggccacaaaaagtcgaagaaggactaaaaagttttcatgtcctccgaaatgagttcgccttaatggaagggtgcatcatgtttggaaatcggacaattaaccggaaagaccgtggaaacgaatacacatcgatttctgcggaccattttggggataaatgtggctgatcatcatggatgccaaaagcaaatggcctgaagtggtcagaatgcgaacaacaacggcattggccacgattgaggcgctaagggttgtcttcacagcgcatagacttcccgagcaaattgtatccgataacggaccgcaatttagttcaaaagaattcggtgattattgccaatcacggggaattgtccacacattgatcgcgccatataatccaaaatcgaatggagccgctgagagatttgttcaaaccttcaagcaaggcatgaacaagctcaaaaaggaggagatgaagcaagaaattgcattgtctcaatttctcctgaagtaccgtatcacgccgcacgcagcaacggaattggcaccttcagaaattctcttcggccgcaggcttcgaaccttgttggatttggttaaaccaacagcggcgaatgaagttgaagcggccaaaatgcaaaaaagttcctacacggaacgaatgaaaaggaatttcgaccgtgagacaaatgcgcgaaaaaatttcaaggtgaaccaaagagtttacgcgagaaattatcgcgacggatcaaaatggatccaaggacaaatcacccgacaaattggcacggcaatgttcctcgttcgaacggcgagaggaatttggaagagacactttgatcagttgaaagaaaatggaccgaagagccttcggacaattctg

SEQ ID NO: 82817 - DNA, 373 bp, Heterodera glycines
atgcctattaataaatttgaaggtgaaattgcaaaaaaattgggcactaatcgctacaaaatttataaattgaagaaaaaattaggacaaacccggaattacaacgaatatatggacataaataaggacacaaaaagcgaattgatcggaaaatttgatcaaatgagaaaagaaaaaatttatggatttaaatatgacaagaaaataataaatgtaattgaaagaagaattgctaaagatttagaaattaatcgggatataatttacaaatggaagagggaatttggtaagaaacgaatggcataaatgaattttacttattctaaggtagagagaaaatattttcaacccaacagaaaattgaaaaaataaa

SEQ ID NO: 82818 - DNA, 198 bp, Heterodera glycines
atgattttggaacaaatgttgtctgcccttgaaatattggaggaacaaaatgataatttaaaaataaaagtgccaaaaattgaaatgaaacaattgaacgaagaacaatttaggaatgagtttgatgagcaagctgatcagaatgtttcttctattgatcatagcaattctgcagatgatgaggattacaataataag

SEQ ID NO: 82819 - DNA, 532 bp, Heterodera glycines
atgtggcgaagtgacaaaagtatcaatgtggataagaagccaatggtttcgagagcagtgctgcgtgagggggaaaagctagttatcacacagtcccaacataacccggaatgtaaagcagaaacaatggtaataataaaagctgaacaagtagatagaaaacaaaaaaaaagaaaatcttcaagtgtaatacggatgttaagacaatctggagacaaggtcttgaaaaagttagggaagaagatgctacaagcacaaggatcagaagcagcagacccctttgatgtgccgccaagactccagctaacaaagtttggcgctataaagctcataatgggaaaaacaattgctggaagtgaatggatgatttataaaaataaacaaattggtgttactattcgcttccaaaactcaattggaagcagcaaaaaactgtcggaaatgtcgccgacgcgacattcgaactcacaccaaaaggtttcagacagatttggctcatccatggcttggtatatatttattatttaaacga

SEQ ID NO: 82820 - DNA, 89 bp, Heterodera glycines
tgataatcgctggaacgccaaattatgaccaggatgtgatggcggtagtcaatgacccaatcaaagagcacaatataatgtaataaata

SEQ ID NO: 82821 - DNA, 378 bp, Heterodera glycines
atgggtgaaaaggagaaaaagaaaaaggaaaaacgggaaaaaggagaaaaaggtgtgagaaggaaaagaaaaaaatagcaaaaagagaaggggaaaggaagaaaaagaaaaaaggttagggaaaagagagaaagaaaaaggaaaagggggaggacaaaaaggaaaagaaaaaaagggaaaaagaaaagttgaaaaggaaaaatgtaagggaaagggagaaaggacaaagaaaaagggggaaaagagaaaaagagaaaaggagagaagggagaaaaagagaaaaaggaaaaatgtaagggaaaagagagaaaggaaaaggaaaaggaaaaagaaaaaaaggaacaggaaaagagtatgagaaaagtgttgaccgaatga

SEQ ID NO: 82822 - DNA, 873 bp, Heterodera glycines
atgcggtaatttgcagaattgcggtcccgattaaaaataaatttaaaaattttaagaaaattaatcgggcataaaaacttatcgatagatgtgtagagctcaacaagagctttggaattagctattgaatgttaagaaaagttaagttttttgttttttacgagcctattttacataccttaattaaacaattttctatcaattgatatttcttttttacagtggcctcacaaacggactatttgtattactgtcaactttccatttctcctttattttttgtgcatgcactcccggattcagtaaatggaagttcgatttccctcataagataatatacacattgtatgtgagtcccctccatccatcggaaacagaaaaatttcacacagtccactcaatgtgagtccgctgctagactgactgactgaccgacctctcatcagccactcactcccacactcacttccatttcttacattctcgtgcccattcaaacaacaaactccttcaattgtgtcttattctctcgccatttctcctcacactctccctcacatcagtaacgtccatttgccaaaatggtgaggaccaatccattgctcttcgagcttgtcttcgataatggctaactggtcgaatgcttgttgtgacagcttttcttccttgtgcttagctatcggaggaactctccatttattacattcttttcttgtcggcccttttgaggtttctgatcaattattaatcagaaatagattttatgttcaaaaaatgttctagcaaaaagtcgggtcggtcaagttactgattgtccgagcgatgatttagttggttggacttatgaagtgaaaaaaaccaaatgaaaataaa

SEQ ID NO: 82823 - DNA, 829 bp, Heterodera glycines
atgatggctgctcaaaggattttaggcgctcttggacaaattggtgttggacttactgccgctggagttcttgctcaagctgcactttacaatggttgttttcgagaaatctaaacttctaatttgtacaatgtgtgttcagttgacgctgggcaacgcgctgttattttcgaccgttttaccggagttaaaccgaatgttactggcgaaggaacgcattttttgatcccatgggttcaacgtcctatcatgttcgacattcgctcgacaccaagggctgttaatactatcactgggagcaaaggtaaagcggcacgtcttacttattttacttggtgcaaaatttagacttgcagaacgtgtcgatcactttgcgtatcctccatcgtccagacccatcaaaattgccacaaatctaccttaacattggcacagattatgctgaaagagttctgccatcaattacaaacgaaattctgaaagcggttgtggtaagtgtttttaattgaacgaggctctcagctacatttggatgtaaagtacaaactttgatattaaactccaattttagctataatatataaaatttagagtactcattcgttttttaccgtctatataggcacaatttgatgctcacgaaatgattactcaacgtgaatcagttagccaccgtgtgtccgtcgaactcgcagagagggccaaacaatttggattcattcttgatgacatttctatcgtattcttttgattttacctttctttttgcagaattagtctgattctgcaaaacttttttggggtctcaatccttcgcccgggtcgacta

SEQ ID NO: 82824 - DNA, 621 bp, Heterodera glycines
atgctaaacggcagacaacttgaagacatgcaaaatgtgttgaacactcagccaaattgggcttcaaaagaggttgcggaaggaagtgccgactttccccgttttgcacccatcgccaaaaaggcggctgccacgggggtactgaacaaattcggaggaagtggggcacggaactgttactttagcccagtgagctgcatgcttcttcatgtaagcatttatttgcaaattgaaaaaatagtaatatttataaataatattttaggatgtgccgaagtacaaaaagctaatcgaaagcactcccaacggatgggctccgcttcatttcatttgaattttgaagccaaaaagaatgccaaaatttttttctctcacaaaacaatttgcgaactgtttttgaagataaaattaatggtttaaatgttaaatttcgatgtaatggcaattataattttggatgcaaatttatattttaaatagaatttaatgaaatattgtggaattattggattgcttgatcccctttcaatttaattagatgtaattccgttaattccttaattatttgcaattttctttttggtttctaatttagtaattttttggataatttcaaaaata

SEQ ID NO: 82825 - DNA, 198 bp, Heterodera glycines
tttggttttattgcatttttgttaaggaattttccaaaaaatgtcgaaatagtgacaaaacgccaaaaatagtgatttttaactattttagtgacaaaaccccaaaaatagtgatttctagtgacgaaaagtgacgtccaaatgaaaaaattttaacgcagaaatgcgttttttgagctcctttcttcaaaacaattg

SEQ ID NO: 82826 - DNA, 755 bp, Heterodera glycines
gccgaactggcgcggtggttgaagtgcatgagctgcagcagaaggatgcggcccagcaacagcagcagcccaacgaatgtgtgaatgtgtcacaaccgatcacacaatatgatgtgcactttcgaaaacatggcacggacaaacaccaacaggtgggcatttatttatttcaaatttcgtgaaaactgtacaggaagtttgacagaatgccaaagaatttcctttaaagtttttcaacataattgaaaaagactaaattaaatttaaaattaaagaatcattttaacaacggacattcgtgaaaatgaaaaatattagatttacaaataatccaaatttgtagaggaaggttggcagaatgccaacaaattttcctttaatattttaaatataattaagaaaaatttaaaaaataataaattttattttattactctaaaaattgtctgcacttttaaaggagaagatcaagaatgcccattcgagcagcaatcgtattgtggtggacaacggtgtgctggaaaagtacacagagtaagtttcaaaaaaaataaattaaaaatttcaaaaaataccgtacttttattgattagctacgatgttacggtaagctggctgaaccattactgtccagcgcaaggccaatcggaggccaaaccgttgcacaccggttttggctatccgtccgcgcccaaggacccaaaagcgttggcactgacgccggacacggtgctgctcagctggaccttgcctga

SEQ ID NO: 82827 - DNA, 771 bp, Heterodera glycines
gtgattcaatgttcctccgctggaatacattgatggccggtgtggatgtctcatcatcccaattagtccaaatttccatccaatatcgtcaggttcttatgaaatttatgaatttaccacttttttaatttaaatgatttttaaattattaatatttattttaaattatttttttcagagcggtgtggacgcctcgtggacggatgtgcgcaattcgaccttttcgctcacggatttgccccaacgttttgtgtatgttgatcaacttcatccggccactgcctatgactatcgatatgccgctgaatacaccacaatatttggtataaattttttttaaattaaaaaatggataatttatttaatttaatttaatttttaaaaattaaaataccaaccgttttatttttatggaaaaaatctagagctcgacattttgatggaatttttcaaaaatttctctgggaaggtggccatggtctccgctgtacccgcattaattaattagttaattaattattggttacacagatggcattggcactatgccaaccgctggaagtggtgccgtagatggtgcacagcagcaacagcagccgacagtcccttccggcgacgccaaagagtctcagcaacaacagcaatgggacggcaagaagtcaatgcttgccgaaacgttctatcagcagagtcaacaagcacgtacaaaagcgggcacaccgtccgcaccgttggaagtcaaactgaacaatgagcaatgctacagtaacg

SEQ ID NO: 82828 - DNA, 1446 bp, Heterodera glycines
atggcctccttgagaaatttgactctattttcctcacaattgtccttcaaatatttgattgccacccgtacggatgttggtgggatattatttgtgagcataagaccctaaattaaaaggttataaaatattatgtatttaatttaattgttttaatattttaataaataataattacaattaattaattgaaaaatcaaaattttgaggaaatttacaatatttttttctttgaacttaaattatctttattaattaataaatatttaaacaaacaaattatttctgtataataaaaattaatgcatttaaatattttttaatttttgaattataatttttttttttagttttaaaataaataaataatacaaattttaaaaatttatttaaagtaaatattcaattttctttaaatattcatgaaaaataatgccatcacctcgcaaactctgccaaaactgcccatgcccaactctttggttgccttcacactttccggtttaagccgaggcagtgctaataatgcgaatttttttttaaattttaaaaaattccttttattttttactttttaattcgtttagcacttcctgtgagaatttgtgtgatgattgtgggaattggatttgttgtccaatgctttccaaacagattggtttatgcaatttttcacgtatacgtctgcgttcggccaccttccaacgcactaaaatggtgaaagaaattgtataaaaattagtaattaatgcatcaaaatttaattggtgttttaattaaattttaatccaaaaattagctaattaattaatcattagtttattttgtatattttgaaaaaattatatgattagatggcgggacagatcattagtgactaattgaccgagaaaaattattattttttttttaataaaataggtgaatttttacgaaaatttataaaatttcttataaatttgttaattaaaattaaaaatgcagaaaatcaggcataacgcgcttaggtaaatgttgccgaattttaattacagtattttgtttattcttacagtatccgcacgcgatacagcatgagaacaacatcagcgagaacagtatcatcagtataagcaaccaaaagctgatgccgccggggccattgcctgaagcgcttttgtcgctcaacggtgtgtagccaaagtcgccgaagccttccgcgttggcggcacgcacacggaactgtctaaaaattaaaaaaaaaaagaattttttgactacatgaaaatatgcaaaaatatcttcgttttttacgaaaaaaaattctcatttttacgctatgtaaaaaattctaaagagttctttttcaaatttccagatttttttgaaaatcgtaaaaaaatgcaattggacttgaacctacccctggacaagctcttcatcacttggcgttttgccacgccgtga

SEQ ID NO: 82829 - DNA, 1650 bp, Heterodera glycines
atggcattggaccgaccgccggattgtccaaatgaactgtacgatgtgatgaagcaggcatggacagtctgtaccgaaaagaggccacagtttgcggacatacagccccggcttgagacaatgcggggcctaccagcatttcaagtgggtttaattagctgataaatcacggctatatggatcaagcaaaaacaaacttcgtttagctaattgatcgatcaagaaattttcaaaaaaaaaattcaaaaaatttttataaaatgaatttaaggaaaaaagaatgaaaaataaattcagagattttttcaaaaatattatgaattactaaattttctctaaaatttttcaataatcgatggaaaaaatattaatgattttctgatttgatcatcaactaaatccattttaaatgttcagtctcgagacccattcccgccatcatcattatgcggcgacaatagcttttttgacgcttcacaaaattcgagcacctcaaaaggagaacagtcgtctaccacgacaacaacaaacggtgatggtgaagagtcgtacacaacagcatgccaatttgacaaaagtggaggtgattcaaaatgtcaaaattaaaaaaaatatatattttggaaaaatctattaaattaataatattttaaataatttcatcaattaattcttattcattttttattgtttgattttttgtgcttgatcattttttgatttgattctgtattaaaccgagctgattagatgataattttttaagttatgaattaaattgaaaaaataaataaaataaaatattttctcaaaaagattagttagttctccttttcctaaaagaattacatttttttaattttggcgttttacagaaagtttctccgttcgacggaatgccaaacgatcgcgccgcaaaatgccaagtcggtccagcgttgaagcaagtactggcgccgctggcacggctggtggtggtggtccatccgcttcatattcatttgggacaacaagcaccggtgtggattcatcagagtatgaattgccgaggtcaggggctcagcttatgttgacgttgccaggatcacggtgaaaatgaaaatcatagattaataaaaaaaaattaaaattcttgagccaggaaataataaaattgccgatttcgttacaaagaattttctaaattagccaaattatttttaaaaatatatttctagattattaatttttttatattgattttaattgcattataagtatggaaaaaaaattctataaaatatttcattttgtatattttttttattaattaatttaccaaagtattttgaaatattttattcttaaaatttttttagcatttagattattttaaattgtttattttattatcaaatttaaatgtgcaattcaattaaatttaggccaacaaatcaccgacgatccgcaaccacaggatttcatcaaaatgacgcatttgtggccgattcatccgtggatgaaagcgccaacggtagcaccggcggggaccaacaacgcttcacccggtccatctctttggctggcacttcacgtgccgccgctgatgagccactgacgacgccattccgacaatttggggcctcatcttctcggatcagtcgagtctaa

SEQ ID NO: 82830 - DNA, 598 bp, Heterodera glycines
atgctctcctggaagatggccgcctgcctcgccgcggggaataccgttgttcacaagccggcccaagtgtcaccgttgacggcgttaaaatttgccgaactcagccatcgagcagggttccccccgggggtaattaacggagggaatacaaaaattgaaaaattaattaggtaattaacattgtgaccggcaccggctcggagattggccaggcaatttctgaccatcctcggatcagaaagttgggcttcaccggctcaacagaaattggggcgcatattatgtcctggtaattaattagtcgctgtttatttaatgggttttcccattttccttttctctgcttacatttcgctttttcagttgtgccaagtcaaacgtgaagaaagtgtcgctggagcttggcgggaaatcgccactgatcattttcagtgacgtcgacgtggacaaagcggcgcgaaaagcaatggacgcggtgtttttcaacaaaggcgaaaattgcatcgccgcgggccgactatttgtggaggagcgaatccatgacgaatttgtgcgaaaagttgtcgaaagtgggctaatgggcaagcaattaaaataa

SEQ ID NO: 82831 - DNA, 392 bp, Heterodera glycines
atggttatttccaagttcgacgaaaggtgcgatggcaataccaagtgctgccaatctttagtgccagcttttgttcagagacaccgaattggtcgtcgagcgggcaaatcgcaccgaattcggcttggccggcggagtgttcaggtaagcgtagttaatatgtgccgaatctccccccatttgatgacatatgctaattcagcagtgatattccccgtgcgcttcgtgtggcgcgtcaactccgttgcggaacagtgtttctgaacacttatcagaagactgacgtcgccgcgccgttcggcggcttcaaacagtccgggttcggcaaggacttgggggaagaagcattgaacgaatatttgcaaacaaaaacgatcacaatggaatattag

SEQ ID NO: 82832 - DNA, 534 bp, Heterodera glycines
atggtggccaataaaattgcagcggaaagtgcaaaattgaccctttcttcgaccaaattcaacacattgctagaactaggcaactcaattgaggaaggaggaggagcgaggagatgggaaaattcgaagaaagtccaaaagacgttggacaattgttgggactctgaggatggcggtgaattcgctcactaaggcattagcatttccgccttttgcagcaggtcatgttaaattgacaccatcggacagtggcgacccgggcttcatgcgcattgagttgagctcaaaacttcgactcgtcggccaaacatcgaaagatgccgaggaaaaggaagacgaagtggtaaaaaggaggcgatgaattcaaaaccgtttaactgctaattacagccgagaagtgtttctgagcccaaaattgggaccggcaatgaaggaattgccaactcggccgccttctcctgctctaagtttagcacattggccgaactcgcaaattccctcgcgaaggaggacaaagatggaaatacgcattga

SEQ ID NO: 82833 - DNA, 64 bp, Heterodera glycines
atgtccgggggcggaatgacttttgatcgctttggctcttcttttttcgtccgcaattgctcgg

SEQ ID NO: 82834 - DNA, 1639 bp, Heterodera glycines; identical to SEQ ID NO: 18236
  unsure (1)..(1639): unsure at all n locations

SEQ ID NO: 82835 - DNA, 531 bp, Heterodera glycines
atggtttaattaaaaaaaggtactggaaaaaacaacagaaaaatggacatcgaaactttggcactgaaaattgaacaccgccaaatattaaactattaaaggaaatttcatttacgtctttaactaatattaacaaatcctatattcgaaaataaaccgcttattgataaaattggccaaatattttcttcggctattgcagttcacaggaccataaaaaacacaaccataaatattttggcaactttaataaaatttggtagctactttttagtgttcttaaatacccaatttaccctttttagtagagaccgagatttccaaattctccgggccggaccggactggtattttaaaaaatgaccggatcccggatccggtctctcataatccggtcaacccggattttcatattgccggatccggaaccggattggtaaacatttaattttcttgtgttaatttggaaaaaaacccgcaaaattttcatcaattatatgtacaaatactaaatattataagtttaataaa

SEQ ID NO: 82836 - DNA, 1056 bp, Heterodera glycines
atgtacttacaaaaagttagggctaaaatacgcaaaactgaactgactttttctgactatctttgtcatagaattttagttgaaatttaaaaaatcgtccagcaataatttttgatttttaaaagttttaatattattatttttttcaattccacaggaaatttcaaaagtacgccgacccaatgctggactgctggcgacagtgttttggagcggcttaaccggcactgacaaagcaaacgaattggcaaatgcaatgaatcagttcaacgaaataaatcgtacacaactttttgtggtctcacttaatgcaaaagccaatttgacaaggcttaaggtgattattattgatactgattataattgatcaaaaaaatatttttaaattttgattatttttgagtaaaaaaacattaaattatttaaatttatgttaaattgttaataataaaattagttaaaattaattgcataaataaatttgattagtcagtgtaagattggaataaaaaatttaaaaaaaatatattttaaggaattggccggagatcaatggcacgtttttgtggagggacgcgccagccaatttattggagagggtaattttttttgtttcttaatttttgatcatttgttttatttatattcttaagttattctttgaaattttatcatgaaatttcctaaaaattttttagtgtttgatagagatgccattttttgtcatgataatttcataaatcaggattttttaaaaagttcttaatgtatgagattttatgaaattttccaagctgataccttcatgcaaagttaaaaaaaaacccttttttcaatattttttaacattttttgtttgaagcttcacaacatcttctcgactgtgtgctgcctcccagcggtgcccaaatgcactcatcaaacaacaatgacgagccggaactgctggacacccatgagccattgaccagcgttgaacgtgttgagcatctgcaagcggctgctcgtgcattccaaaaacatccgcttggcaattgcaaagatggtaataattag

SEQ ID NO: 82837 - DNA, 2122 bp, Heterodera glycines
atggtgcaaaaagattttgtcaaatttgtgagcagtgaaaaattggcatgcattttgatgaacaatgtgcagcaattgaggtaaaaacaaaaaatgggcgcaattcatttttcctcaaaaaaaatttctccaaacttagaaatttttcaaaaaaatccatgaatttttttacaatataagaaaattaagaaaaaaaaaatttttttgagaaattttcagcaattttttggaaaagcttagcaattcatcataaaattttagaaaaattttcaaaaattttttttttcttgaaattttcttataaaattttttcttacaattagtttttttgaaaattttctttttgacattttgctgaaattttagggtaaattttgaaatttttagggtacaacttgagaaaatttacgagaatatgggtggaacaaatttggatgcggattcaaacaaagtgttgaacaatttgcagaaaaaggtgaatcccaaataattttaaattatttaaaaaaatttaaaaaaatataatttttacaataattttttataattaaaaatttgattaagcttaacaatgtgttggacaaactgtcagcccaatttgtggtcagccttgagcatggcattcaggagcagatcaacaaactcggcattttgctcaccaaaatcaaaggcccacaattgcagaagagtcaaatggccggggtaattaattattccaccgcattaattgcccttaattaggcttaattaacctttgtttttgccaaaaaattatattcaatatatttttgttttttgctcatattaaaatttatttattttggttttaagcaaattttattaatttttttaaattaatttttcatttattttttgtgccttaaaatttttcaaaatttgtttttattatcttcgagatttattaaattgcaaattaataatattaggaggttgatctcgtgttggaaccgttgatggatttgttggagggttcgctgcaacgttacgccaaacaatgcgaaaaaactgtgctcaaatatattttgaaggtgccgtcctccatcaatttaattttatatctcgataattatgcaaaaaaattaaaacctaattcattaattaactaattgcccctaattaaaaatatagaattattaactaattgtcaataattagacagttattaaaattttaattatttaactaattacccctaattaaatgatttcttaaacatttcttcatatttttatgcaggaactttggaaaatcaccattgttagcatggaaaaatttgttgtgcttcccccgttgggttcatccgaaaaagcggtatcattttaaaatttaaatttaattaaaattttatttaattattgcaaaaaattggcataatttcagttgctcaaacagttgccaaatgcgaagattggcggcgtcaccaagctgatgtccacccatctgaaggagggcgtgaagagcatgagctccgtcaaagatatgatggtaagctcgacagggttcggttcgtcgatcaaataatgaaacaatttgtggttgagatgccaaagtttaattgaaaactcaaatttaaatttagaaaatggaccgaaattcaaataaaaattccaaaactgaattaaaaatttggaaataaaatgcccaaatttcatttgaaagtaccaaaaagttgtagtctgatccacagatcgaattaagaaaatgccgaaaccgaattcaaatggcaatgattgtattgtattcctaacgaagaaatgccaaaacccaaaattaaaactaaaaacgaaaacgaaaaactgatcaaagttgttgccaccagagttctaagtcattttcccaaaaacttcctcccacgagatttacagaccgatgaacagagagagccctgttcaaaaattttatacaatattctctgatcaaaggattacaataacaataattccatcaaaaggccaaaattatttgtgtttaacccaaatttaattttggaaaaaaaatttaggaagttgcccgggacagcgaacgttcactgacgcccaaacagtgcgcggtgctcgacgccgcattggatgcaatcaaagaggtccgggcaattaattaa

SEQ ID NO: 82838 - DNA, 699 bp, Heterodera glycines
atggatttaattctcgccactgattggatgaataacgcttacccggaaatggaacaggacaaggctaacatgtcaccaaaggaagaccctagttggattagtctcattgatgaagaggaaaagcgggagcctatagctattgtgcaaatcgatgaggaagaggagaaacaaagaaaaagtttgtcttttagtgttattttttttaattaaaatttagatcctcccggaaattgcgactgtcgagagaagcgtcgttgctttattccgcttgttgaccacttgtgcaagaaatttgagtgttccgcccacgagttacacgtactcttcaaagacttggggaagcgtcgcgccatcgttgaacacctacgctcttctcaattgtgcacctcccacctgcgtccatcgatacggaatttcccagttcgctgcaacgatctctccattttggatgctcactcagtccctgcataccgtggttacctcggaatcacggtgtttattctttttatttttttatttctcaaaatattttaggttcgaatgcactattacatcaaacacggtattcgattgcgtcattcaaatttgccttgtgttgttgaatttggcggtggagatcataagactttcttcccattagaagctttgaatattgttatttagatgttttctgtatcaaattgtactgttgtttttaaa

SEQ ID NO: 82839 - DNA, 2796 bp, Heterodera glycines
atggaggaaacttttgatcatacggatgtacagtttcgtcatccattcacaatgattgtgtcaggaagtacgggaagtggaaagtcggaatggataatgagattattacgtaacttggacaaaattatttcagtaccaattgagcgtgtattgtattgttacggggagctgaatccgaatattttaaatttacaacgcaatgggagaattgacaatataacagtcactgttcacaatggagttcctgctgaagactacattaaaggaaatgccaaaaaggaaaaattgttgctggtgttggacgatttattggttggtatgagacagcaatatttagacacactctttactcgcggttcacataattggggagttagcataattctagttactcaacacctctttaataaagagttgcgtgtcgcgcgtggaaattcacattatttggtgttaatgcggaacccaaccggtgagcttcaaattcgtactttagccacacatctttttccttcaaggacagctcattttatggagtcataccgtaacgcatgttcaaaaaattttggttatctcctagttgacatgcatccagaaagtcttgaaattttacggttgagaacacatatatatgatgaaaagataattgtttacgttcaaaaatgaatgtttccaatttaattacaaagaatacaaattttttagagagtatttgtaatgcaaaaaattccaaacaacttatacagagagcatcagatgaacagcttttatgtatcgtagagatttgtcttaatattttaaaaggacgggttcctctaaagcctgaacatttaaaaaaattgaaaacacatgctcagattttgcgtcatctagccagaacacgttgttctcgttccgcaaaacgaatattattgcaacacggtgcgggaattccagccatagctggattgctctcttcaattgttttgcccttggtttcaaatttaattgcaaattataaataacgccacaaaaaacaataaataattttaaaaatgcaatacacaaagcggtatttgctcgttccttaggagatttatcagagtctgacgtcacctcaagatggaagtcctcttggattagttagatcacgaattaagcaaattaaaaatgatgatgaaattaacgatgatgagagggcatttaaatatgaacaagaatttaaacgcctcaaaaaattaaataaagatgaggaggaacgccctgttgatgttaaattgcaaaacctacaggaaatgacagaggctatgccaaaaccttttaatctggtaagaagaccggttgctcgtagacgtcgtaatatcaaacttggtaaaacaagaaaagatgaagaaaatgaagtttttgaagatgcagaaacatttgaccaaggggatattataaattacatttataaaaactctgaggccttgggaatcaatgaggatggacagattatcaaaacaaatggccatgttcttagaacgagtaatatagaagatattgttgcgcatttgttaaacaaagacaagcgtgcaaatgccaaagaaccaacagcactcaaagagtttgttgctagagccaaacaaaatccgcttttgagtaaacgtctcttttctgaaggtcaaattggcacgggagtttataaaaaggctatgataaaatttaagcctttgttatggatttgaagaaacagcgattactcgagtttttgtataaagacataaattcaccagtcgcattcacgagccttgaaccattgttgagagaggcgaaaaaacggcaaagaaaaatcacgagagcagatgttcaaaatttcttgtacacacaacgaacttatacgttacatcggcaagccaagcgtcgctacagacacttaccaacattagctcctggattacataccgaatggcaggcagatttggccattcttgatagacttgcaaaacataatcgtggattcaaatatttgttagtttgcattaacactctaagtagacaaatatttgttgagcctgtaaagtcaaaaacaagtataaacataattaaagcatttgataatatctttatgagaagcaagtacattccatggaaaattttgactgatcaagggaaagaatttacagctcattcagtaaaaaaatattttgatacaaaagatgttaaacatttttgcatgctgacttcccctcgattccacgctggtatggctgagcgtgccaatcgtagtataaaagaacgtttatatcgttacttcaccgaaagagacacttacaaatggattgagatagttcaggacattgttaagggcattaatcagtctataaactcctccattggaatgcgacctgctgacgtaaattttgaaaatgcagaggaactgagacaaaagttatataatgaagcgaaaaaatttccaaaaaagagtcctaaattcaaagtgggcgaccgtgtgagaatagaaaaatacaaacatgtattccaaaagggttatttaccacgatttgccgatgaaatatttacggtagcagaagtacatacagaacgctcgcccgttgtttacagattaagtgacgatagcaacgaaattataaagggatggttttattccaatgatttatgcaaaattctcaaaaacaaagaatcactatatgatattgaacaattttgaagaagaaaaaacaaaatggtattgaatacgttctggtaaaatggaaaggatacagtattaaattcaatagctgggttccattgagttctatctccgagaaaaatatataa

SEQ ID NO: 82840 - DNA, 952 bp, Heterodera glycines
atggcacagcgcgtgggtttcacgcagataaagtacacgcgcactccagcggaattccatcaactcttggacgatccaacattagacaaactggactttgtccacgtctccgagcatatggaccgagttgttgtcaggaagcgtcccgagtttgcaaaggcacccctcacaaactgtcttccagtcgcaatatacgtcacatcgtacgcgagacttcatctctattcatacatggaaaaagtgattgcactggaaggggctgagcttctttattgtggtttgcgaatacaatagaaaaaaaaatgttagataattttagacactgactcaatctactacgtgaacaagatgggtgggcggtgtgttccggaaggcgaggcacttggacaaatgaagcgtgagcatgttgatcgtcgaattgtggaatttgtagctggtggtccaaaaaattatggaattcggcacacagcacgagacggaactgatgagcgggccaacctaaaaatacgaagcttcagattatcgtacgccactcaacaattactgaattttgaagcaatgaaggatctgacactggctacatataacattgacggacctatgtcagtttttttttttttaattttcacaactaataattttaaattttagtgatgacgtcatcgacaacgatgatctctacgtgtacggaggaggtggagcccatcgttgcatccgagtaacttttccgcaaattgaccgaaatgtccgttctgacgtatacacctgcgaggcccacaaagactacagacctttctacgccaagggccgtgttcgaccgggaatgcaaacacgaccatttggatatgtggaggatgtatcacatccaccaatacaacctacagctgaacgaagaaagagaacattgattgaccctgacccaactcgaccgggttattctggatggttttga

SEQ ID NO: 82841 - DNA, 224 bp, Heterodera glycines
atgctaacattggagaaagaagaaaacaatgatgaaaatgtggatgaatacgacgaagatgatgaatatactaattgcgattggctgttcaagcgatggcagattgggaagacaattcaatgggaggacaaaaagacggacaatttgaacaatgtcaacatttcgatttgtcggtttgggtgagtggcaacaacttttaccattgttaaactgtttccagctga

SEQ ID NO: 82842 - DNA, 623 bp, Heterodera glycines
atgtccatttttggctgtccaattccgcaaattgtattgggtggtgagcaatgaaaagcatttatttttttaatcgaattttgaataatttgcgcttaatttaggccattgtatccgccaccaaagaagaagcggtacaaagcagcgaaaatggcgcctaattatatggaaattaattaattgggttggagaaattggctatcaatttgaattattcaatgaaaattgttgcttttataattttttcttttaaagtgtttattttgttggctgaatattttctattcgaaacatttataattccgtatttacttttaaatttggatgagatttcggatccactttttgaaagggacacttcattctttataggtttaccgattttgagctatatcagttgtgccattttttctggggccttgattaaagttcacccaaacaatgcataaaccttcatttttttcaacaaaatcaattggtttacattttatttgtcgcctctggcaaattctacacaatttgattttaggatcaatgaaaatttaaacattagtaccgaataatcatttcggttgtaaaagtcccaaaacccaaacgaattaaactgcattcaaaggaataaa

SEQ ID NO: 82843 - DNA, 1962 bp, Heterodera glycines
atgaagaatttggttgtgcgcgctggtcaaactgccaaatgggtggtgaagtttggcggcaaaccggcgccagaagtgacatggtcaaagaatcaacagccaatcactgatctgagcggatcaatacaagtgggctaattttaaaataattcttcaaattaatgatacatttcttaattttttggcaatttttgtttcaaacaatttgcacttattttaaaccttcatcattttttcatcgaatttcttaatggtttcaattttttaaaacatttttaatttcaacgcctactttcaaacaaaaacaaaattttgagcaattaatatttagaattccgattaaaattaatcaaaaattatttatttaaataaacaaaaaaatttttttttttaccgctaatttgtgattttgtcatcaaagtattgtcgccattcttaattttaattgaaaatttactttaaattgaaaattttttcaatcaatgcctcccattagctattctctgaccattcaacattttttccgatcaatgttagccattccctgatcattcattcatttatccatttgttcccaggtggacaccaaaaagaatgatcacaccattctgtgcatcccggctgctgtacgtgctgatcgcggtgcatacgcattgttggtgaagaacagcagcggcacggacaccgtaacggctgatctgaccgtgctggacaagccgagcaagccgcgcggcccgctggaagtcagcgacgttacggaggacggctgcgcgttgagttggaagccgcccgaggatgacggtggactgccgattgatcactacgaggtaaaagtgatcgggaataagggggggacacgataacatatccaagaaaggcactttttcattctcgtcataagactttttttgattggttgtttgagaccgtcagataggcgaaaacgcaaaatttattattaaaattagtcctatttgacagaattttaaattaaaaaataaaataaaatttaggatggacgaattactaatttacaaaggattacaaatttataaaaagtcaattttttgatgaaaacccacccgaaaaaataatggtttgaatgaaaattaattttatgaaattttttatatcatttatgtttctaatttgtcttaattttggtcttttttcctttttataattaggtcttttatagtaatttccactccgatttatctttgcaaatcgcatttttttgaattttaggtggagaaattggagggtggcaaatgggtgccatgcgcaaaagtgccggactgcgcggcacaagtcaaagggctgaagaagggccagcaataccaattccgtgtcaaagcggtgaacaaggaaggcaaatcggagccactgagcacagagcaggaaattgttgccaaaaatccatacgacgagcccggcaaaccgggtagagaaaaaataattttttaaaataattttaattaattgattaaattaaattcataaggtgtgccggatattgtcgattgggatgccaaccgtgccgatctggtgtgggagccgccaaagaatgacggaggagcaccgattgaggactacatcattgaacggaagagcaagcatgatcggaactggaaagagtgcgcccgtgttggtggaccgacaacgaaagcgaccgtgcagggactgaaggagggagaaggttagataaattattgattttttaatagaatttgggaagattcgagaaaaatatagatttattcaagagtgattttctgacatttcagaatatgaattccgtgtgaaagcagtgaacaaagctggaccaggcgaggccagtgatccgagccgaaaattgttggccaaagctcgtcaccaaaagccgaagattgaccgaagtgccatgcaaacagtgaccataaaggtgtttagggagaattgaacttacctggacataataaa

SEQ ID NO: 82844 - DNA, 1289 bp, Heterodera glycines
atgccaatgtcttttgttcctttagcgacttctgccaattcctacgagcgcaaagcgaaaagggaaacgaacgaagcgaaagacgacgcaaatgcgagggtttctttttcaatttaaaaaactattttttgtaaatttttaattttcatagaatccccaaaggcattaaattcgcgattatgaaaattatcgtttccggaagcaaccaaattcgaaatattcttagtggcgttcgacaaccgtacaattaaatttccgtcagcaaaatttaatttatttcgtttttcaaaaaaaaagtactaatgaaaaatcagtttcttaaattttggccataatttttggagtagtgaatgataccaagaaaagttgctttcgcttctttttatgtgaaaatttttgtctacccctcaaagaccaatcaataattgtccctttttctctgtcttccctgttgtcggttttttgcgtgtctgtcccaaactcaatcaataattctgccattaatttctctccctttctctgctcagattgaggatgccatagcgtcggcgatcaatggcggcggaagtgcaacggtggcggacattgcgctgctgcgcaacgggcgactgagcggcgcgtcgtccgtcgtcgccgcgggcgccaacgacgactttgtgcggcgactggtggacctcgtccgacgcgagccggcactgtacgacccgagccacgagcactacgggaacagacacgccagcgcacactttcgaaccgcaatttggcaacggttgtgcaaggagttggactacccaggtgaaaagcggattttatgggagtggggaaatggataaaaatgaaaggattaaaacggagggactgaaatggtcgaaaaacaggggccaaagcgaacggaaggggtcaaatgcgtcccagggaactttaaaaggcttaactttttttctcatttggccaaattttccaattttggcagcatttgaaagctctatatgtttagaagctgctttgaaaagctattttctaagcgattggacaattttaaaaaattgttacatgaataatgaatgattgggggactaaaaacagtgccattttcagatgatccgcaggcactgcaaaagcaatggaaaagcattagggacaaatacatcaaagagaaggagcggagaaaagggggcacaacaacaatgatggtaagcatttgagaggtttttaaattttgtagaaattttactgacattttcaggaccattccgaatcgatgacaaatggcacacgaaatttcaacg

SEQ ID NO: 82845 - DNA, 1123 bp, Heterodera glycines
aaatatgctttggaagctgtcaagggcagttctctggagaggatggttaaacgccttggacaaattgcgcattcggctcatcgacaattgtctgaccttagccccaatgaagtgagcaataatgcataaataaagcataacgcgtgcagaaatgccaaaaccacaaaattgacagtttatctccttccatgctctctcttccctttttcagttccatgattttgctttcaaattgtctgaagcactttattctgctggagaatttgaagaaatgcttcacgtcgttagctacgcttttctgcaccccaaaaccaaaaactttaggttgggtatttgttattctttttttcattttatattttccattaagttcacatactttcaacaatttgctgtttttcgccagtctgaaggccaattaccatcaactcgctttcgaatttcttcgatttcatatgacttacattttggtatttcagaaacctttgactgccaataaatttgtattttacagcctaaattaacacctgcaaataaagaaaagggcaaaagaaccgatgagtcatggcaattagggcgtatttattcggcaatgaattacattttttgccagcaccaaagtcacatttctccattcccatcatttttcgtttattttaggtgtcaattaccatcgttttattatgcgacaattggcaaaacagtcggactcacaaattctgcacataatttctggcaacaattctttggtcaccggcgcttatcgacacgccctcggcaagaaattacacgcaaaaaaagttaaccaaaattaaaaccctcaaaaaacaggcgagttttttactgtgtatttgcgtgataaaagcaatccgcttgtcgcttttctcatcgccctcacattcactcacatttcctgcaaaaaggacatttcttcccgtcacatggtcgccctgagggtttggtcactgtctccgtcggcaaataattttctcttcaggcattgacctttatgaagaaatacgccgactttcgttcgtccgtgccaactcaagagattcaatacaatatggggccggatgttccatcagatgggtcttttcgcgaatgctctcaaatgttatga

SEQ ID NO: 82846 - DNA, 620 bp, Heterodera glycines
atgtgtgtaaatgaaaatcataaaaaatgtaaagcaatattatcattgaattggtcgataaaagtaataaaatgacaataataataataattattattattataaatttgtgtatcacaggtgacagtttgcgggatattccggggtgagaataaaactgggatttgcgacatacctaaacattatcatctttcactcatcaaacgaagaaaagttatggcctaagaaactgatgatgaacatcgattggacgattaaacctcaaaaccatttttcaatgaaaatctgttaaaaaacggttaaaatttctattttttctcccgcgacgcctatcggcacagccgagcccccaaaaactcttattttttcataaaaaattggctcaaaattataaaaaactagtcattttggtgaaaatatgttaacaaattgcactcaaatgttcaaaaaaaaagtgatcacatttgttcgtcacaattctgatttctccataaataattgtgttttgtagcataaattatttaaagatttacttcaatggatcgaaatagaaaatcataagcaaaatgtaaagaaatatgaaaatgctcttttataaattggattggtcgataaaagta

SEQ ID NO: 82847 - DNA, 450 bp, Heterodera glycines
atgttgacaaaaggtcggttaacataatggtgatcatcgttgttgggaatgtcggcgtaatagttctgaacctttgcaaaattctggcatcggcatgatacggtattttttcgttttttgaggcgaggcggctcaattccttattgacttgtttatgattgcaaaaaactaccaatccagcatcggttacattccggtaaatttcggaactcaatccaatgcattgactgcctttgtgagctcgccaatcgaaacaaaagtaatcgatgtcagcatttttgctgactcagcaagaattggcttaatattaaaacgtttaaaatgaataaaggttgagaatattgaatttcaaaattgattacaacctgaatcaaattttgctctcccaactttttcttcatgttacgcacaaaatgaaaaaaacaaaagttatggcgcaattcccattga

SEQ ID NO: 82848 - DNA, 1741 bp, Heterodera glycines
atgtcctccactgtccttcaaaatgccctccgtctgttgttcattactctgatcgttttcaactgttgccatgggtaaacaaaaagcacagcccaacggcggatgttctattgcaatttccacgaccttaaaactttcggttttctccaagttttaaaaaaaagaaacaaatgtgaaaaaaacgagtttttaaattccgtttaatttatttcccgtgcaattttttaaaggtcgagaaaaatgcaatagagccgcctcaattccgttttctgattttcctatttttccagcgcttcgactcgtgttaagcacaagaaaccaaccgatgagacgacttcgacaaatgaatttgctggcctcagtgtcaagttatggatcatcattggtgtctctgttttgctcgtgtgagttttccagggctttcattttgccaatgccatcatcaatcacaatcattctcctgtttccccctcttttcagcctcgttgttgtgtgtgccattgttgtgatttgctgtttgtgccgtaaacgccgtgccggccagcaggacaacgatgagctttcgacatcagtgccaagcagttactacaaatcgcggcagggaccaacggattcgatggactggccgccgccctcagctgctggccatggtcgtggaggaagaagcggtggtggtgcgatgacggcggtgccgagcggaatgatgtccaagatgccaacaatgaagacgaagcagccgttcttatttcgaatgctgatgccggaaagcttacgctcaattggaccatcacgaccagcgccatcaacagcaacaatggaacgaggcggggcccagacaaaagtgaagacgacgacaatgctcggaggagaccagacaaaagtgaaggcgtcgtcgacagtgccgtcgggaggagaacattacacaacgtggtgatgcgcaatgaatgaaagcgacggacggcaatggcattcgataataatggatgaagaatcgagtggttgttgcttcaaatgactaatatgggaaatttatgtttaattatgctgccgtaaagaaccaaaattatataattaaatttgtgcattttatcaaatttaattttcctaattaaaattacctattaaataatatctttgtactcgtttttcagttgggcatggcccgaccgactgggctcggatgttgggagagggaatatttttattttttcaaaaatggcaccacaataacagtgaatgccgtcccagtccattcaactttaaaaaggactctataaagtcaaaaacaatcgaaaaatctcatctgtcagtccgctttaaaagcatggcttacgctttccttttcattgcgtccgttgcatctgttcccatcacaagaattgtgctccgtcggcccattcatcgcttggcattcatttagtccaaattcattaaatggcagtctaacagtccacaatgttttcatggtaacacatcctttggtgtggaaaagcgtcgaattgtccgtcccaacgcaacgcactgagaagcattgcgcatcttcacaccttaatttgccctctttgaatttacataattagtataattaatgctaatatggttccctcaacctcccacaaaatttcttcacattatttcggtgaatgcttcgtcattttcctcgccatgattcactgttccattcaaacacacaacaatctctttaaatccaaaattttcaaatgaaatgcctcaaaataaa

SEQ ID NO: 82849 - DNA, 819 bp, Heterodera glycines
atgtacgaggagaacttcgaggggggccgcgagtttctgagagttctcaacgaagtgatcggcgactttgacgaattgctggacagagcggactttgcccatgtggagaagatcaaggtgggcgtcgttctgctggtgcttctacggttcggcctcccttcagaccattggcccctgttacatggccgcttccgggctgaaccccgaacggcgtcgcctttccctgcacccctacgaacatttgtaccaattgatggaatttgccattgcgctgcaaaatgcattggccttcttcaaccaaggtgttgttgtgccttctccacccatccatcggcattaatttaaatttgccttgtctttctgttttaatttcatcataaattgcccccccccccttcagaccttctcaacttcgaattcgaggccaaaatcggctttaacattggccctgtcactgtgggtgttttcttttttttgcccctttgtaatttcattccaataaataaacatttttaaggtgtcatcggaactacaaaactttactatgacatttgggtgcgtttgaaatggcaatgttttgcaaatattcaccatttgacagggggacactgtgaacattgcgagtcgaatgtacagtacgggcgtaaaaaaccgtatccaagttcgctttgggtgcgcttttgtccgaattcgtcgtctttaggtctcttcgtacactcgcgatttgctcatcgaccgatacgacttcgaataccgcgataggatacaggtaaaagccataatcactgctcatttcgccattaagctgcttttgctcag

SEQ ID NO: 82850 - DNA, 300 bp, Heterodera glycines
atgttggatttggacgagaaagaaaaaagtatagtggaaaaacatgtgctggcgcccaaccgtgcgcgcccaactgaggtagaccgggcgtttgttgtgcattagttaaattgtttttgattttccatgatcaaatcgttatgtagtttaaccctccgaatacaaacaaacaaatttaatttgcaggaggacaacctgttcgagcagttcatcctgtccactcaaattagctactgttactatgccgactcgcatcgcattctgggcaacacctttggcatggctcgtgctgcaaggtga

SEQ ID NO: 82851 - DNA, 630 bp, Heterodera glycines
atgattaagggtttttcgcacgctcgccaacttgagagtgaaatcgcaagtttacgcgagcagaatagaatgctgatggcagaacgagtcgaggtaagtacaattttgggggtccgggttcgaatccaacataaaaataaataaatttaattaaatttttaacaaattaaagattttaaaaatacatttttaaatatgaaaaatgcattaaaattatttctttgtttaaaataaatgtgtactgtcattgtaaagtggagaaaaatcgatataaagtgaaaaaagttgaaaatgagcacagaagcacgaattttcgagtttcgaggccctgtaacttttgaagcaggcggaatgcaccgctaaaattaaaaattcacaatacaagtcgaccccgctctatccaatggtatatagcttatatgcattttcccactcacagctcggaatgttcccttgttaacataaacatgcttggtttccaaaaaaaaattttccaggcgcggcaacgcccgaaccccgctcttactaccccttttttttgaaaattctgacaccaaaaagacaaaaattattcatttttcgtgaaaaagaagactacaaattcctgccttttttcatacggagaataaa

SEQ ID NO: 82852 - DNA, 77 bp, Heterodera glycines; identical to SEQ ID NO: 69776

SEQ ID NO: 82853 - DNA, 918 bp, Heterodera glycines
atgtatgaggaggacttgcccagacatggtcacggggagccgttcaaagtgccgtaagtcacccatttaactgattctaagacattggccttcgtattggtagtgttccgaaaaattgttcatttttggtgattcccaatgatttaggatttccgtggcttggcgggtattcaaaagaaaaacaattttcagattcgggtttcttgtctgtttagaaattttaccccttctacggggaggggcacggggcattgagccaattctttttgatgggcacaaatttggtcaaaaagcaaacgaattttgcgcaacgggttcaaaaaatcgaaaatggtgtgtttcatcggtattgttttcgctttatcaatggcattccacgaaattgttgttgttttaggcactggtcgatatacaacgattggcagcggagtcctcatttggtggcatatgccaaacgattggagcgcatgggtctcaaggacccgtggattcggtaaatggacattattgagcattctttggtcggaattatgggacaaaaattgaaataacaaaaaaatgtagtttttgttcagtaacatctactggatgtacaacccggacaacccgtgctcgaatgtgacaaaacaatacaccaaagttggctatgcgtggaaggtataacacgacgggagaggagggaaaagtggtcatttaagggccaattaacatcatttaaaggctaattaataagatatttttgcaattacggtgtatgaatttcttaattctttgtttcatgctttaattcaatgtgcctaattgggcctggcgccctcgtgcaaaatttcgaaaaaaaattttttttggggaggggaagggaatttgacaaccacaaagcacacatattctgttagtaccatccagaatcccattaaa

SEQ ID NO: 82854 - DNA, 1085 bp, Heterodera glycines
atggccaatttgccgcccgtcgtcgcccagcaaaaagtctgtcttattttatcttaccttgaaaatatgccgggttttgagaggagtcagtgccggttttttttttgccaggttttgagagtccgtgacaggttttttgccggctttttcaacacatgtgtcggatttttgggctttgagtcttacgtttcaaatatacccatttgcacttatagaattcaatggcggatttctgtccatcgattcctctagaattatccatagtaaaaaatattaaatcgcttcttttcatacataaaaaaggggggtgggtcggaaaattttttgcgaaggggggtcgggccgcccgatgacctttttttgtttttcaaaaaccgtttttttcggcgcaagtttttccaaaaaattttcgggaacaggggggccggcggtgccgttaggcgccgccggagaaaatttttaagttttgggtgtgctttgttaacagattttcaccaaaaattgccaattttttaagaaaaatttggattttggggtccggcggtgccgctaggtgccgccggagaaattttttttccgatttttaatgaatttgttaagaaaattttcaaaatttgcgagctgcgaaccctctcctcccacctcttttacacggaccccccccccctaaaaaatgtgcttctttttgcatcccttactaaattaggtaagtaagttcataacggcaatcaaacccaaaaaattcacagagtgccgcgggcggcgatgtgtcgtcggagttggcacggctccaacagtcgctggccgacacaaaacccatcggcccgttgctgcaccggtgccgcacactgtgccaggccaaggcgctgctccgcctactcgacctggtcaccgacaaaatgtccaactcaatgtgcgcaatcaccgcggcgcgtgggcgcggcaaatcagcggccatgggcctggcggttgcgggcgcggtcggctgcaatttgacgaatatttttgtgacgagtccaacaccggagaatgtgcgcacactgttcgaatttgtgttgcgcggctttgacgccatcggataccaa

SEQ ID NO: 82855 - DNA, 1774 bp, Heterodera glycines
atggcggcacagcaaattctcagtgctgcggctgaacggagcaagtgcaatagcaaagaccaacaacaaaaaagggaaaacgatgccgacgaacattgctgttcccagcggcacaacgccgtcgacatcgacgagcgcacaatggtggttggcatggcacgcgttggatgggccgaccagcgggtgaacacaaagcatttgcacaattttttgttttttgtgtcgttttctatgaatttaaattttattttagattttgcactgtcccctcggtcaaatggcatccgccgatttgggtaagttttttggctgattgtgacatttcattttctatttacatacaattttcaattttatgtgccattgctatttatctcgtaccctttggttttttaccatacccaattcattgcctcacttccaaaataaagacaaaattttctttttttgatttaaagatttgttttagggaataaaacgatttttttttgttgttgaaggtttgccattgcatgtgctcattgtgccggccactgatgagaaattgcatccaattgagcgcgaaatgcttcagctcttctcacaatcagtctaataaaaatggggcaccaacggaacacacttttttattgttattgttaacattaattttaaatttataattttactataaattcgctctcttttgctaattgtttatttgaatcactcggatttattccgtttatcttattttccacactttttttttattaatgccatttaaatattcagctgtttacacgaattgtgacctctccgatgctacaacgagcttatgttggtgagtgatgaatgggtgccaccaaaaaaatatatttaaatggtcaaaaatgtaaaaaaatttcagcgaatttttagaaaaactaattcaccataaaaatattgaaatcgctaggaaaaaatttccattttttgttttataaaaaatgctacgattttgaaaaatttctaaatttgtactttctcaaaaattggggggtggggctgatatagcaacaacaaaatcaaacattgaccccttttcaggcatgcaatgcttctgggtgattaaattgcccatctttttggcaccaatttcgttgctgcttttagggcgtggagtcgtcttttgccagcatggccggtgttctgcatacgcgggtcggctacgcgggtggcacttccccggcgccaacttatgccaacatcggcgaccacaccggtccctccgtttaatattactgattgtgaatttttatttaattatttataaattttcgactcaaatcagttattagtgtttttagaggtcaccgaactccagttcgacccctcctgttgctcttatgagctaattttggattggtttttcgaccaccacgacccaactcaacggcataaaaaacagtacgcttcggccatcctttgggtatggtaaataaatgcggcggcaactcgtcagaccccccccccacgaaaaaagttttttacgaaaattttaactttcttggaggtttttttaccattaagtttttttattataatttccaatgaaaatttttttttttcattttttgaattaaaaaaaaattcaacgtttttcttttttgcaggtggacgaatcgcagcaccaaacggcggagaaggcaatggaaaaagcgaacgcaaaatacggaggacgagtgcagacttacctgaagaaattggaccagtttcatcaggctgaggattatcaccaggtgaaaaaaataaa

SEQ ID NO: 82856 - DNA, 733 bp, Heterodera glycines
atgtgcaaaatttcctcatttttaatgatttttttcgctgtttttttgtccgttgcaaaagttgacggaatgagtgatgcgtttaaatctaccaaagaatgggtgaagaaaaaattatcatcaaattcatcacaaccattatcatcatcatcctttcatagaccattattagatacatcagattcttcttcatcatcattttcctttaatcctccaatatataaaagtaataaattcataaataaaaaggtcgaaaaagattaataaattagaaacaattactataatatagataatttagaggacaactcatcttcgtcatccgtatttggaactcatccatttcgtaataaaattaaaaaggaatattttcaaaatttgttaatttaagaagctaaatcttccacttcggcgtttggaaaaaacagtaaaatttaaaaatattaaacaattaattcaaatttaaatttgaagttaaatcttccacttcggcgtttggaaaaaacagtaaaatttaaaaatattaaacaattaattcaaatttaaatttgaagttaaatcttccacttcggcgtttggaaaaaacagtaaactttaaaaataataattttaattccgtcaatttaaatttaaaaaatatttgaaaataataattaaattaaataattgcttttatctaaggtggcaattctgactcgtcatctacatttagaactcagaacatcaatagtaa

SEQ ID NO: 82857 - DNA, 282 bp, Heterodera glycines
atgctgttgaccgtcaaaagtgatctgatcggctccatcgcggtcaccatcgtttgcatggcggtcgtctgttccctgttcatctacagtcgacttggcgtcggtgccattgcgctgtgcatcacctcaatttgcttcagtcagtagtcgtcaatgttttttattttacggcattttatgccattttgcgctttttgtctgtcattcatttcaaaaatcgctttttcagcgctcgtcggtgtactcagttggtgcggcgctgacttggacccggtgacaatg

SEQ ID NO: 82858 - DNA, 56 bp, Heterodera glycines
tttagaactaaccctgtcaaaatcaattttttcctgctgtgcgctacattatcgat

SEQ ID NO: 82859 - DNA, 88 bp, Heterodera glycines
atgatcgattggatcggaatcctcggctgttctctgatcgtcgctttgctatttgacaccgctctgacccgttcattccgttggattt

SEQ ID NO: 82860 - DNA, 912 bp, Heterodera glycines
atgagtttcatgtttgctttgggcatatggactgaggcactttttggtgccgcaacagaactcacaattatgacgttaatttaatttaaatttaattttttttcaacatttaaattatttttttgattttttgtagcattagtttcaagtttttatatctagagcagtcaccaaattgttagttgttccgatttgagtgcctcatttttcagcatttaccttattgtttttgtctatttgttacgttatttttgtttaaaaacttttaaaaacggcccaaaaaaaaatttcttagggcacttgatttgttctttcacagcatgattctgcttttttttaattgaatcctatcctattttttaaatttcaatattcaatataaaaattttaaatttctttaattttaaatttcttttcttatttaggcaccacccattattgaaacggcgactgatcattcttctcaagaaaatatttcatttgaatcaaaatcaaattggcgatgtgccaacaaataccatggaattggcccctaccgttgcaaatccaacaaacggaggagatgaaatggctgctcatttcaaaatgcttcaacaattatggaacaaatgaaatgttcatgaattaattaagttgaattcataaatatgactttagaattaattaaatataaagcattggtttcaaaattgtgtcgaataattattattttccatattttttcaatggattctttacttttcttaatttttgttgccataagtaaatcaaaaagtaagaaaaatcatttaatttataacaaagatattcctgtttatttatttttaattctatttgttttttaattataatttggccgttatttttcccagtaggtgccgaagaaccacatttatgcaaaattaaaataaa

SEQ ID NO: 82861 - DNA, 747 bp, Heterodera glycines
atgacaagggaatccccaaataagaaagcgatttttgttagtaaaaaagaaaatgtaattcagcgactccatgttcgtaactatttcgttgtgaattccgtcaagttcaatcagaagtacttgtgtgagttcacactcatgccattaaattcactggtaaagaaagaatgattaaaaataaaattaaataatcttttggggttaataattgtttattaaactaaacacttaaggactgggatgttcttcagattaaaaccttcgttaattcgatgaataagtggcgcaagatgatggaaaaaatagagcggattcttttgagtgattgaattttttgaaatttaaaaattttgaaaaaatcagtttatggttttgctaagcttaagctcagatcgtgttcagcttttttagcctcgaaaattttataaaatttaaaattattttcgcagaaaccacaaactaccatttttcaaaattgtagaaataaacacaaccatcttttctaattattattattattattacaaatattttaatagattcaacacaatcaagatcctagtccaattccgagcccaacacctcaggcgtcgtcgtctgcctcgagtaattcttccggcgaaaacaaattgccgtcgattgatggaaatcctgaggagggaaattgaatgggacaatcgattgaatgttgtgtaaaaatatttgttgtttctttcacatattcgaaattttatataattgaataaa

SEQ ID NO: 82862 - DNA, 189 bp, Heterodera glycines
ttgcttttcagttggtttcaccctcattaaacatatgttcaagcagaggaggaaaaaaatggacgaattgtacagggaagaagcggcgatgaagagaagtcggcaaaagaagcaccaatgatgaaaaacagaataatttgccgcaatattacataattacatcccatggaattaaatttgcacaatttc

SEQ ID NO: 82863 - DNA, 1570 bp, Heterodera glycines
gtctgttgcttttgcaacaaacccacgtctggtgctcaccgatgtcgaaaatgctccaggccttgtcacgccattccaccatgctcactctcaagcgatggtgaaaaaggatacggatcaaaagtcatctgtggcggatgcgacctcattggtgacagtgacatcgacggaaatgcaaatgccgttagctcggcacaatctaccagcaaagcaacaaccgaggatatggtgttttcacaactttcgcgaaagcgtcgaggatttaccatcaaggaaaaattggacatcattgaacacgcaaaaaagacatcaattcacgctgccagcagacatttcaaagtcagccgagacaacattcgctgttggaagaaagaagaagcaaatttgagaaaaatgtaaaactatgatacctaactacttttttaaattgattgtaattaaggacagaatcgtgtaagcgtaagcgcctctttggtgccggaaggaaattgacagacgccaatttcgatgatgctctagcgaattgggtgcgcgaacttcgacagaagaagttacgcgtgacgcgcaccatggttttttcaagggcacaacaaaccagccccaactacaaaaatttggaaaatttttctgtaagaattcgagtaatttaaatcatattttaagtttttaggcaagtcatggatggttggaaagctttatgagccgccacagcttttcgttgcgaaaaccaacaacacttgcacaaaaaccacccgatgattatgccaaagcaattgtcaattttattgtctatgttcaaaaattatggcacgaaaaaaagtaatgataagcggaaaaagtgttaagcagattataattttagttactctggtgtctttgcgtgcgatgagacagcagtttggcttgacccaacaggcgcaaattgtgtttcagagaagggtgccaagtccgttacggtgctaacaacaggccatgaaaaggcaagggtgacggtgatgttgacggcaagatctgacgggacgaagctgcgtccctttgttttactgcataagaagagacctgtgcctgacattgccaaacgttttaagaacgatttagtgttgtgttggtgtggccgtacatggatggacaacgaactaacaacaaagtttttagaggaagtgcgaatgtttatttatatttttaaataaattaggtatgtaattaaggtgcttggcaattttgcgttcgggagacggcttcttatttgggacagctttcgttgtcatatcagtgacgatacaaagcagacactcaggcggttatctattgaatctgctgtcattcccggtggtactacgaaatacattcaagtactagacaattcaatttaaatcaaggaaaattattttagcccccagacgtgtgttggaacgcaccgtttaaaaacaaaatcaggcaaatttacgatgaatggatggtgaatggagagaaagaaacaacggcgtccggaaatatgaaggctcctccgccaatggagacgtatctgcatggattgtcaccgcctggaactcactctcgaaggaactga

SEQ ID NO: 82864 - DNA, 68 bp, Heterodera glycines; identical to SEQ ID NO: 64422

SEQ ID NO: 82865 - DNA, 239 bp, Heterodera glycines
caattgtttgaagaaaggagctcaaaaaacgcatttctgcgttaaaattttttcatttggacgtcacttttcgtcactagaaatcactattttggcgacttcgtcactaaaatagttaaaaatcactattttggcgttttgtcactattttttcactatttcgacattttttggaaaattctttaacaaaaatgcaataaaatcaaaaaatacacccctaagaatcgacctaaaaaaat

SEQ ID NO: 82866 - DNA, 793 bp, Heterodera glycines
atggtcctcgtcatcgaattttgtgcccaaattctcggctgttccccgaaatcactccgcgataagctcaatcatcctgaggaccgagtgaaggcactgaaggagctggtcggaaaaaaggttcggacgacataccaggaccggaatggaatgcagaaaacattttttgtcgacggaatatcggaccatggagcggctttgaccccagcatacggcagactcagacaaccgtacaacattaacattgctgcccatttctacgctcgccaccgtatcaagctgcatttcccatacgtgccgtgtgttgtggagaaatactccgggtgtggcgaagacagatactacccaatggagctactcgaaattgtggatgaagactacaccaacaaagagcgatggcttggcaaattgtttaccgaaattgaggacgacttcattcctgtcaaacgccgtggtcgagttgacgaaaacgaagaaattgacgctggtcgttttgaatgcagtcaaccgtcttacgtttattggtaaacacatgtatgttaccttaattatgcacttttctacctaaaaacgacaaattcgtttttaagtttatacaaattgcaacttccgctccttaataatttacaaattgtgtcttctttctcttaattctgcacttttctacctaaaaatgacattcccaaatgcttaataatttacaaattgtaacttccattgcttaattctgcatgcatgttaatgtccttaattatgcacttttctacctaaaaatgacaagttcgtgcacata

SEQ ID NO: 82867 - DNA, 4162 bp, Heterodera glycines
atggacaatcatccccgaaagcgcttcactaacttttccattgaccatattctctccgcgcccaaaaagccccgtcaaggcttcctgatcaatgaacttggcgtattccatttccatgaatcagttcaacaagccgatggaacatcgaatgtagtcaaagactacgttaaaaaattggagaacaacatcgagcacatggccaaattccattacgtcaaagtcaagtcaaagttcaccattacggatttgccgagcacgcctgaggcattgttggctgggattttccaacactgcatcgacgaagcaattgttgaaagccgtgagcgaaacatcgaacctacacacctcggctgtatgatcagcagtcctctgctggaaggcggagatatcccaatcccgatacgacaaatgacaaacaacactctcgacaccattctcaaccagttcaaaaaagtggcgcagtccaaacaacagaaaaatgtatcgttatggggtgagccgtttaccgtcaccatcacgactctggaccgtaatggactaccatccaaacgtcgagtcaacgggggagctcgtcgccctgtcaaaacggccgttcaccaccgaattaatgaccaatgcctgatcaaaatccgcaataacgacaatcacttctgccttttctacgcactgcaggcaacaatggtcgccaaaacatgcaattggcctcgctggaagtttttcgactatgtgaacgacagaaaaggacaacagggacaactttatcatgatgcggttgagctcatgcagcaggttaatgcaccaatggacttggatggctacgacgcgaacacttttgtgcctcacgtcgttgactactggaacaacgcgcagcgacaacaccgctttgctgtgttcatctttggatcgttgggacagtataaaccgatctacaagtacattgacaccacttacgacactccgctgctgttgtacttcaatgaggaccatttcgatggtgtgcagaagcagggcggtttgttcggcaggccttattgtctggagtgtgagcgcccgtaccgaagaatgtcagagcacagcaaaacatgtaaagcgcgctgtgtgctatgctcacgtgttggaccgctgtttccgtgtcagccaacggatggattcatcaaaaagtgtaaagaatgcaacaaaaaattcaccaacaacggctgctaccagcatcatctgcagtcaggctactgcaagcggtcgaaaaaatgcaaggattgtggtgctgtttgggacgtagcggttaacaacagaaatggcagaaaagggcatgtttgtggtgaacgcttctgtaagatgtgcaacaactaccacaacaccgagcggggatgctacatccaacccatcgagcccaaggaacgcgacccctatcgaattgtggcatttgacttggagactatgcagcacatgccatctgaaaagcccgaaaagcgtgaacatttgcccaactttatcgctgcgcgtgtcgcctgccccgactgcattgaaaatgagagctggcgagaggcatcgggagggtgtgaagtgtgcggtcctaatcgtacggtcgcgttctgccagcgccgcttcaccgaaacaacagtcgacaagcaagtggtggcggaaaaccctttggaagcgcttgtcagctggttgataaacgacttaccgctcgcctacgacacctatgccttctctcactttggcggtcggttcgatatggtgctggtgttccgcgaattgttcaaacgcggatataacccggacatgttgcgcaaagtaataattgactatttttcaaatttgaataattttcaattttaaggggaataaaatgtacgaaatgcggattcgaaggcagaaaaagcgcaaccccaacattgtgttccgcgactccttcaaccttatgccaatgtccctcgcttctttggtcccatcatttggcttggacgtggaggacaagccgttcttcccgcacatggccaaccacccggacaactacggaaagcagatccacccaatgccggacgactatttggtcagcggaatgatgccagataaacgacaaaaattcgacgagtggtatgaacaacaccgtcaggagccatttttcctcgacgaagcattgacaagctactgcacaaacgacgttgagatactgatggctgcgctggtagcttttcgtcatgagttcctggatgtgacgaaacggaatgaaggaatcgttgcggagcgtgcggccttctatgagcatcacgacggcattgatgtgcttagggagtgcatgacgatcgccggcgcatgtatgaagcattttcgcaccaaccatctgccgaagaagcatttggctatcgtcccggaacgcggctacgacaacgcccaaaaccagtcgttgctggcacttcgcttctttcattggtatgcggaggagcatggtgttgtggtgcagacggcgcattcggcaggcggagagaagaaaattggccaatattccgtggatggctgggtggaggaagaaagaagagcaatcgaagtcaacggatgtgtatggcacggctgcaaggaatgcttccccagtgacaacatgctaatgccgaacggaaagacggctggagaggtgcgggagcgggaccagaagcggctggaattcatcgaaagccaagtttctcgtgtggacgtgtactgggagtgtcaaattgaaagaatgctgcaccgtgacccggacatgcgcgaaagttttgctgattacgtggatgacgggccattggacattcgcgaggcgttcatgggcggaagaactgggccgctgaagctgtaccacaaggcgggagagggagaaaaaatctcgtactttgacttcacttccctctacccgtatgtcaagtgagttgttatacaacactaattttcccacattaaatttttttattttcagtttctccaccacttatccaattgagcatccaaaagtgctcatcttgaatgaaaatgtggaatggacaactgcacgggacaacccatacaaattgtctctgctcaaggtgtgggtgatcccgccacggaagtgcgatgtgccagtgttgccggttaaagtcaacgaacgactctgcttcccgctttgtatgcagtgtgctcttgactacccaaagggaggcgtggattttgactaccaatgtgaacacgacgaccaacaacgcggatgggtcacaacatgtacatccattgaattggatgctgcgcttgaagagggctaccgtgtgaccaaagtgttccgactgttgaagtacaagcatggcgacgacaaactgtttaggccctacatcgccgagttcatgtcgcagaaaattgaagcgagcgggtttgacgccagcatcaagggaaatacagagttggagcagcagttcatcagagagtgtgctgaaaaattcggcatttcaatcgacaaagacaacatgaaagtcaacaagggcaagcggtcgttggccaaactatgtcttaacaacttgtggggccgcttctcattgcgaaactttggcctcgcgcaaacgctgatcaccgacgatcctgtggtgctggccgaatacttggacaaccgctcagttgacgtcacttccatcgacgagttggatgcagaccatattttgatcagttacgtccagaagaaggagtgggtggaggagcacgagtgctccaacactggtgagacttttaaagaatttttgtataattttttgggatttttcagtcatctcactctggacaacatcaaaggcccgccttctacttttgaaagcgatgcagaaggtgatgagaacacctggatgccgactgttgtacacggacaccgactcgctgatttttgtccacccaatcggcttgaatccgctggagacagggccacacttgggacaattcaccgatgagtatcctaaccatgagattgtggagtactgtagtggcggagcgaagcaggtaaatttatccttttaatgattcataattgcaatttatgatttcagtatgggcttaaacttcggcgtaatggacaggaagaatttgtgctgaagctgaggggcatcacactcaactacgacgtgatgcagaaccaatccctctgctacgacacattcaaagaagaggtgttgcg

SEQ ID NO: 82868 - DNA, 1348 bp, Heterodera glycines
atgaaacgccctaatcctttgaaccttccaatgagtgagaaaaagcccaaacttcgtcgacgcctgccggctgaattgaacaacgaattggtcagctttattccattggtctgcctttttgccaatgtgaagcgggctccaattggtcctgtttgttaccaattcgagtgtttccgtagtcaacgccaaaagtgctttgaatatttggtattttcaccatttttattttattacataaattatttatagaagggtgttattgcattattcgatgtgatgtttgaggagaaaaggacaccgaagaagaagaaagtggggagactgcttctacaggaagaactgccgcatgacctcagccgaaatgagctcctgcactacctgtgctacggacgactgggaacgaatttgttcgagacttattttgtgatgacccatgcaacaaatgtaagcgaaaagttttaaatttttaataacaacacaaaatttttagtcaattgccattgggaatttgtttgggcttctgctcgattttgcaatgagctcaccaactccttggctcatgaagcgacccatttgctgtggaattttcttccgacaacatttgccgtggattctgcaacaaccgatgaacgtaatgctttctcatggcttttttccggaggtccgaagtgatggttttgaatttttttggctgttcaacccacacttgaaaaagtatgctgggtatgtcagaattctccctgagcttagtcagcctgacaatttgcattttttccttagcattttctaagcattttacttgaccaatttattcatcattatcattacatacagatcggaatttgtcgatttttccattttctcaataaattgttgaaatgaatgaccttgtgacatatgatacacaaaaacaatacagtgtggggcacatgttgacactaattgggattgataggaacgaatattttttcttaggcccatcggaaacttattcaggaatgatgacacaatgacagatgggattttttgggctaagctgtcataataaatcactggttcttccattcccttcgcataaattgcacaccaatgagaccctcccttgtaatgtgggtcccggttaacaattagagctgcgggatactgtagagtgaccggaggcggtaattgatcactggcgaagcagccccgaaaaagctcgtgcggtcccccggttttcgttcaagattgatgtgatttgcacgctgtccattcttcagccaaaaaatagagcaaagttgatggagaaccaggctgacaataagcatcaagtacaatgcgaacaccgcccagcaaacggcttgttgga

SEQ ID NO: 82869 - DNA, 973 bp, Heterodera glycines
  unsure (1)..(973): unsure at all n locations
caaagggaagaaatcaatttataantatatccaaaattnaatgtcatccctttgaaatacctaatctgatttatgaagataaatgctatcataatagtgctgagaaatgtgaaatatttgccaagttatttgctaattcgtttaataattgtcaaacagacccaagcaatacatgattgggtaatattatagaaatttatcaatgctttatatcggatataaattttaacatcatcgagacccaaaatcttatgaaaaaacttccgaacaaaaatggcacttctccagataatattagctataaaattttaaaaattgccattcttctctgtcaactgttattacagacttgtttaggatctcattagacactggttcacttccagacatctggaaggaatcaattgtttttccgctttttaaaaagggtgacaaaaataatcccgaaaactataggccaatttcattaacctgctcactttgcagggtaatggaaagatttcaagcagacatatttacaattttctactaaaaaacaaaaaaatttcggaatatcaatttggttttgttagaaataggtctacaacaagtcaattaataacagttgtggaagattggtatgaggcaattataaatggaaaaatgttgactgtatttatattgactttcaaaaagcatttgactcagtgccccatgaattacttttatacaaattggaaaaaattggtataaggggcaaacttttaatttggataaaggattttttgagtaataggacttttcgtgttaaaattgaggatgctttatcctcaaataaaaaagtgctatggcgtcccccagggctctgtcctgggccctttattatttttggtctatattaacgatcttcctgatgctttgccatcaggagtaagaattaaattatatgctgatgatgttaaattgtatatttgttataaagcgagagctgaca

SEQ ID NO: 82870 - DNA, 679 bp, Heterodera glycines
atgactgaaaacggaacatcaaagcaaattgctgatttggaaatgcacgaagttgagcaggggtcgcgcagcttaccggaaaaccaagaggcgtacaaaaagtgagtttgtaaattggtggcggtggtggttatatttgcatgtcatgaataattattttgcctttgctttagtttcgattgttatttatattttgcttattaaacattgtaaaattaaatgtaatgtttgaattttaactacattatctctaaacagaaacatggacaaaggacataaattgatgttggctcagtcattttacgatgcgtccgttgtgcttcgtaaggcggccaaattttcgtaaggctttgcacgtcaattattttaattttgatatattagttcaaaagaggtggttttggaagcagacgatggggaggccgagcaagacggagacgaggatgacggtcaaatcgcatgggaaaacctcgaagtggcgcgaaaaatttgcgaaaagtgtcgatattttcatttttttatatttaaatgcaaattcagtcaaatgaaaagctaccacgcgaagttatggacggagcgaaaatcggatgtgttggtggctctaggcgattgtatgaccgtttcggagaactttccgcttgcgttggaagaattcacgagcgcactggagattcggaag

SEQ ID NO: 82871 - DNA, 767 bp, Heterodera glycines
atgattaaaagaggtacaaaagtgattcaaagaggtatatcagtgattaaaaaacgtacaaaagtgattagaagaggtgcaaaagtgattagaagaggtacaaaagtgattcaaaaacgtacaaaagtgattcaaagaggtacatcagtgattaaaaaacgtacaaaagtgattaaaggaggtacaaaagtgattaaaagaggtacaaaaataattaaaagaggtagaaaagtgattcaaagaggtatatcagtgattaaaggaggtacaaaagtgattaaaagaggtataaaagtaattaaaagaggtacaacagtgattaggagaggtacaccatggttaggagaggtactaccattggggaagaggtacaacatggtttgaaattaaataaataaggtaaaagttttattaaaattaaaaatacaatgcattttaattttaaaaaatttttataataaaaactctttttattaattaaaaacaacgttggaaattattaattgaatatttatttaatttgaaattaattaatttttttacaaattcaaaaataaataatgaaatcctttaatttaaaaaaaataaatttaaataatttaaaagaaatcttcaaattaattatttgttgaccttacagagattagaagaggtacaactgtgattaaaaaattagtaaatggtttatgaaaaatagaattaaaaaatgtattaatattttttaaaaaattattaaaaaatgctttcttttattaattaaaaataaa

SEQ ID NO: 82872 - DNA, 502 bp, Heterodera glycines
atgcaagagtggcacagtccatggccggaaaatggaccagtggataataaatacgtcagtgaatcagaatttcttgaaaaacgatatacggaagttgcgccaaatactgtatatattactgacgtattttcagcgatttaaaagattagatacggtcgtctcggtgtggacaaattcaattgaatccaaccaaaataagtataaaaaggttccgttaaaaaatcacccaaaaccaatttcaattaatctcatcatttttgttgagattcatccaagtagaataagaaccgtaaaactcaagataatcagggtttcaaaggacatcaaattgactcaaaatgggatgtcaaaatccaaggactgataggaaaactttaatttaatgattttaatttgtaagcgagggttatttgttgtctctccatcactgtcgttaattttatttaatttcttttttataatctacgccgacagaaactgggaatcagcagaggctcccaaa

SEQ ID NO: 82873 - DNA, 2214 bp, Heterodera glycines
atgcaattcagcgagacgctggaagtgttggagcaaatctttgaacagcacaagctggacaaccgggatattcaggactttcgacaaacggtggacgaatgcattgccagacaagtaaaaaaaattgccaaaaataatttaataaaacaattggagtgatcttacaatccattttttgatcgggggaaggtgagacaccaaattaatgtgataaaaatattttgaattgtttctggcctacaaaattccaaattgttagagtcaaaatattggaatattttaaatctctgatattgaaccggtggttctaccgtatatttcatataataatctcgaccaagatgactatgatcaagaatcatttcctcattccttccaatgtctgcgttctctgatcacttttcactttctcaggctgaagtatcagcagaagattcatacgattattgtgagctgttgaaaatgatggagtcggagtaccaacagttgcgcgaactgtctgccgggcgcatggtcgatttggtgggttgggctttataccatgcttaattaggtcctttaatagggcaattaaattatgcgttagccatttccttaattttgccatggtctcttaatttgatcatattttctgtcctgtttactactgatcagcccaatgctctctctctgatcacaggactcgctgatcgccttcatccgtgctgctcagcttgaattgctttggatccatcagcgtgaggaattggaagtgacacgcaactggagcgacttggagcgcctggacataccgatgctgcaaaactacttcaagcaggtggttgcgcaaattacagctaataggcgcgaatggcgcatgactaattaggtttaattggccggaaaataaaatgtttaaaaaatgttttttttgttagattcaggatctagcttttaaaaattattgacaatttcgtcgattagtcatcaaattttcgaaatttaagttttatttcgtttgtcgtcggcattatcaatggagaacaacaacttatcatcggatgcaaaatgaaaaaatttattttatagtcaaacctactaaaatttcataaattttcaataaatttaattttttttaattgcaaaattaagttttcctaaagttttgattaattttcaaaattcttataaatatgtttagaatgatattattttatagaggaataaaatgatttgagggaaggaataatggtttaaatcccattatggaaaaattcaaagtagaaaattacaaagttcactcggatttaaatgccgagaacctcactcatgcaactattaatatttaatgatttatgatcatgaaccatttagctgctccatgagattgagctgcacgagaagcagttcaacgacgtgcacaaccagggcgccgcgctgatcaaccaacgccacccggcgggcgaagtgatcgaggtgtacctgcgcaccatgcagaaccaatgggattggatgctgaacctgagcaagtgcctggagggccacctgcgcgacgcgtacaatgccaaggcatttgtggaggagtcggagcaggtggagcagcagatgcagcaacagttggtcagttttgcgtgatgtatgtcagcgggggggggggggtttccggctcagaaaattttggaatttcgggattctgaaaaaaatttaaattttttaaattaaaaaaataaagagtatgattatgattgaattcaattctctcattaaaccataattttgtcaaaatctccttttttaaaaacatggtttctgctttaatcctctttaagctgaatatatgaaaaagtgccaaaatccaaaccgttaaaatttatttaaatgattgggcccctaaattatcgcaattgactccattccaggaccatcttgatcgtgaatattctcgtactgatttttcgctggacgatggtgaacagatgttgcgacagcttgactctgtccgtgaatacatccaacaattgcatgcgcgactcctttcactgaccgacaggtgagcaaaagcctaacattttttggcacgttttttgcatggcattttcattttttaaatttattttttttcaaggtgtgcccaaatttcaccgctttggcaacgtggcgaacccatttcaaaaccgctgccggtgatggcactttgcgagtacaagagcaaggacaaaattcacatcagacaag

SEQ ID NO: 82874 - DNA, 1363 bp, Heterodera glycines
atggatgacggcaaagacatgttccactggaaggccaccatcaaaggaccgcccgagtcgccgtacgagggaggcaccttccatttggacatcgttttccgtcgcgactacccattcactccgccaattgtcaaattcgaaacgcccgtttaccatccgaacgtcaacaagcagggtggcatttgtctggacgtcctgaagacgacgcattgggcgccgtcgttgaccatttcgaaaggtgaaagcgacgcgggaaagagcagacaaaacgccgacaaaatattgagacgacaaaacgatccaattcgaaacgaccaccaaaaccggactttttggaaaagtgtcgatattttgtcgtgtgaataggatttttcaaattcggaaatgccgttttaattcattgtctcccctccatttcagtgctgctctccatctcttcgcttctctgcgacccgaatccggacagtgcgctggagatggacatcgcgattatctaccgcaacgaccgcgagcagtacaaccgaaatgcccgtgaatggacgcagaagcacgcgatgaaatgagacgacaaacgaccgatggatgggagaggatacagaagacaaccgccgaagagggaggaggaggaggatacattcaactgaccctattcccatatatgccaactgtatagattgtattattgtatctcactgtatgtacagtatttgtcgcccggttatcgtttaagcgaccataattgtctgttgttggttgatcaccattatcaatgtgttgtatctctgtgttatcatttcaaccaatttgtgatcaattgttgcgcctaatgtgtgtaaataatgtgaagaatccaaagatttgtttgtgtttttgctccctttttcgtgccttttcatgacttattcaattttttggtgcctattatagtgccttttttcccaggcttttccatgctctaaataagtgttcggaccccgaccccgaaccctactgattttatttatttttttaaactgaggaaattctcaagcaattagtgagttttcaagaaaatatacccttaagaatggcatttcttgggataaaaggcaaacaattatacttgtatttttttaactttttaaaccacttttgataaaattttatgtgataaatagggatgccaaaaatatgcacataaaatcgtaaaatatgcacataaaaagtgaaaaatatgcacaaaaaattttccaattgagggtgtaatttctcaaaattactccccttttaagcaaagcaaattgagagaaacaatcaattaatgtgagaaaaaaggaaaaacgacgacgaatgggtcgaataatcaaatgaaaggaatgaatga

SEQ ID NO: 82875 - DNA, 1230 bp, Heterodera glycines
atgaccatatttgggcattcggttactgtaggaggaaaaatcttccggcacaattttcggtgaaaatttgaaaccatttaaaagcattggaagaaaataaataaacaacaaaaccttcgaaatttctttcctttgttttatttatttatttatttttaatgaatataaattaaaaattgaaggtcatttgatttgctgtgtttttataggaagtggaattaattaaatgaaaaaagccaacccaaacaaatgaagcagttcctggagaggaaccaaagcccgccatgaaaatgtttcttaaacattcaaagccggcttcgataactgactttcttaaatcgaagttgagtttaatttgtaatcattaaaataatttgacaaacaattaaaaaggtaaacaattaccttattttttattcaaataaatttcacacattcactagttggccaactgacgaatttataacatattaagctatagatccataagaaatataatttgtatatcatattttaggactattcggccaatgatttaatttctctaatgcaaagaattgggcagcaattttccaaggattttgatagagtaataaatatataaatacattttatataatattttttcaaaataattttttcttcatgcttaggtcgattctgtgttggaagcccaaagcgaacagttaagccgttttgaacgtcacattgagcagttggaaagtgcccaaaatggactgctgtcaacactttcggacacaattaaagtaaaaaaaataaaatttgcataaataattaaaagagaccggaattcaaatttgcggatttggttgggggggggggacttgaattcaaaattctttgctagaccggatttgtgggattaatctcaaatattgggatcatcgcccgggctcaagtgataaatcatttagcatgccatttaatttgttattttatgtattgtattttaggttgcttttctgttgactttgctcattggcggcttcatccttctgcttttggccaataaattgctgaaaggctataagcaaaaagttgctcacgtgccattggctacctcagcaatttaactgagcaaaatttcttcaaattaggtcccccaatttagtaatttccaaattttctgtacctctttcaattgctacctcaccattcggtgtctcattggttatttctattgttatactgtagttctttcttaataaa

SEQ ID NO: 82876 - DNA, 146 bp, Heterodera glycines
agggttgcaaccccgaccccgccccgaccccgaaccccgacatttttggccattttcggggaaaaccccgatcccgaaccccgacgcttcataccccgacaaccccgaaccccgacccttaaccccgatcggggtcggggttaaat

SEQ ID NO: 82877 - DNA, 863 bp, Heterodera glycines
atgcatctttatagcaatatttataatataaaagatgaaaatttgactccacgccgtctcaagccgaaacaaggagcagtatttaaaaacaaaacgccaaagcggggaaaagcagtggagaaaggtgtcaaggaattgcatgtgagcgaaagtgcgaaggtgtgaaacgacaaaaggacgagaaagtttagaagaaagttgaacgaaaagtttttttcatcgatgcccctccccaagttccatggttagccgaaaccatccggtttttagggtccaaaatccgacattttccgaatcgaaatccgacccgagcattctgaggtgacctaaaacacgacctaactttttttttctcaaccctagccaacagaacctaagcatggcaatgccgccaaccttggaaaaatgacacgacactcttaaaaagtgaaatgttatgtctattgttttcaattgccttttcctctttgggctttatcagaaagtgcgagaacaggctttgtaactgagaatgaccgcggaaacaaaaaaaaacgagaaattttcaaaaaccaaggctctttctcgcacaccccctaaagaaatttcctatctccactccatctgtcactatttttcttgttgaaattcttttgtaaaactctgttatgtaaggggataaagtgtgattctatcagaaggatatttcttatttatttaaatgtaagtcataattagtgtccagatttatatggacaaaaaaatccaaaattttaattataatatggacgaaaaaaagcaaaatctttaggggtgtatttttagattttctagtgaaaatgccaaaatatgggtgtaaaatatggacaaaaatctggatggaa

SEQ ID NO: 82878 - DNA, 3830 bp, Heterodera glycines
atgtcatcatttggccctgttttatcgtcgttcgtaaattcaatgctgtcggaatcgtcctcaattgtcgacatcccttctccatctcccagcaatggcactcaaacccttggcactgctgtcaatggcattggcacttcccactcatccacccgtcatgacacttcttcgcctttggtcgcctccgaaacgttcgtcgacgacgcgccggacgactccgactcatcgtcggcggtgttttatgtgcgcaacaacggcaccgatggcggcaaacaaaaggccaacaaaaaacaaaaggacacattcaaatgcgcaaattgcaacatcaatttcaagtcggatgaaatggtgggctttgttgaaaaattaattttgagggtttttggtctgaaattcttcactaatttgttttgtttttgtaagatttatggcccccattaattttatttgattgtttgtttttttattgtcaattttaataagtaagaattttttagccaatgtttgtggctttaattttaaaatattatattttaatgatttctgattcaaaaagagtttgtagcatcaaattaagagaaaataacaaaggttttacttgcattgaaaaagaaaataagaaagtttgctgcttctccgtcggggattgaaccattgcgaaaaaaccttctcttttttcaatatttttttttacaaaaacaaattattttgtttttatcttcctttcctttcctcaatttccatctgagaaaacgagaaaaccctggggttaaaaagtgacattgaacaattacatttcaaaagcttaattatgcaatatctttccctaattgcccaaaaggacagatttttaagaaattaataatttcacttttttcaaaaaatcagttggaattacatcaaaataattgtcgccgctccgttctctctgcccccgccaatttttgctcatcactgtcattttgcgacatttgtaaccgaaaattcatctctccacgcggggtggcacttcacaaaggcaaggcacacaaaggggagagcagcagcaaattggtcaagccgaagaatatggcgaagtgcccgtaagttttaatttggaaaaatattacaaaaaaaaatatttttcatttgttagagagttcttttcttttctaattttcttttaaatccacaattggtgccattttccaattttatgcgaaaatttaaaaaaccaaattccaatttaggttctagcaaaataccttaaataatttcatggaattcatgcttttttaattgttaattactatggttataaattatatggattaaacatattttttctgcgcatatgctataaagaaaggggctcaaaaataacatttctgcgttaaaaatttttgatttggagaaacttcgaccatataaatatatatatatattgggggttttcgcgaataaatccatgtttcgacattttgcgtttttagtcaatatttacttctaaaaagagaatttttttcgaaatttggaaattttttttaggtattttgttcgtttccgaaaattttcgctgacaacagaatgagattattaaaaaattttgaaatgtgttttgtttgcaattgtgaagctagaatttaataaaaattggtatttttaaggttaaatccatttttggcagtttttaaacgtatttttagttctgtttaagcaaatattgaatataatcaccttttcggaattttttatggtttaaaagatatattttgacagtttttagtccatattttactatattttcgggctttttagtccatatttttgttcaatttggtgttttttagtccatataatttataatcctactaattaatctttttttacgcccattcacaatgcaatttgattcattttttgcttcataaacatatcatctttctgtttgacagcatcgccacccgcgcagtcaaacggggccgtccccgtaaggttggcgtagtgccgccgacgtcggttgacactgccaaaaaaggacgagcccattccattgccgccgtgccgccgattggccatcaaaacgtaatactctcagcgcttcttttacatttgaaactgatcacatttgggcattccgtcttttgacgaattgatcaaaatcaaatcaccggtccctagcaataattcttacacagcaaaaatttttggcccgggattcgggacataaatgagaggaagggagtaacgaccgcctttttaagatttttataatttgggacctgaaaatatgatagtttggaatttgccggaacattcttttctgccactaaactttgtgagatttaaattttttttagcatttcttttcctaaatttttggtcaattcttctccctttttaatttatatatttcaaaattcttttgaacattttttctaacataaaacttttgtagcgaaaaataattttcccaaaaagcttttgagtggccgtcaccgcaccaaacccacaaacgctgccactgctcagcagcaaccaaatggcaatgtgcaaattccgaagttgcgcaggcacggacatccggtgaaaatggaaggtacaaaaaagcaaggggtagacactaggggtggcatctaaggcccctaaaattctggaaatggaaatcggaatcaatgccatccttgatgcacaatttgttttgtgacccgaaaaagcgtcaatgatactgtatatttatggataaacaaatggacaatttaaaatgagttttctttaatgcgagtcatagagaaaagaaaatattttttagaataactgacaaattttatttcaaatctctaaaattacgcatggaaaaaatttgaaaaattatattctttttttaatatttttaaaaccttatgggaatatttcacaaaaaacgatggaaatatttaattaatgtcttaaatttatatggtttctttcaattctttataaataaatttctatgattctatcgattacttttgccatcatttttaagtcggctcatctttggcagatcaaagctacaacaaacgaaggactaatggcgcaggaggagaacagcgtcgcgcaccgaatggcgatggcggagacagaccaaacggcggcggaacgcaaatggacgacgacgacggatttggaggagaagcggaggaagacgacattgtgattttggagccagaagtaggaatattaccattaaattaataattaatccttaattaattatgtgaagctaatgaaagtgtaaaaagtgccgcttgttgatttaatccgaataattaaccaagggaaatggtgaattatttttatgagctttccccccccccctcgaaacctgtatatttttttaaattaaaaaacgggatgaaaatttacattaacaaatctcataaaaaattacaaaaatcctccgacgggccgtctgtcggcgccgcggcacacccccaaattccttaaattttaaatttcggcccaaaaacctacgaaaatggtcctcagttagcgaatatgcctaaattttctaaaatttctctgcgcttcctctccctttaatccctcccactccaccccaaaaatagcgaatttaaattttaaaaaaaaagtcgtcagtcgccccgcccctgaagccaagatattggctatgccctttgcttcagactaaacacggaattgtcccgcgtaacacttttggcactgtggggccccagcaacagcagcagaattgtgccgcttcagggatggccgttccgtcgtcttcttcgtcgatgatctcgcattatgccgggatggtgatcagtgcttgtgcgcaaagcaatatg

SEQ ID NO: 82879 - DNA, 72 bp, Heterodera glycines
atgcattcaatttggagtagagcgaacacaatttttgccttctcactcactgtgctcagcacagtcacattg

SEQ ID NO: 82880 - DNA, 516 bp, Heterodera glycines
atgccatgcaaaacgtacgttttttcaattttatcggatttttaaaacggttactgtttctgtttttttcatccctcaaaaaaatttcatttacagcaattctccaccgcgcgttcagtgtgttcatgttcgatgcggacaaccgactcattttgcagcagaggtcgcagacaaaaatcacattccccggcctgtggacgaacacatgttgcaggtttggtactgaaaatcgtaaacattggccaacaatttaacccagatggattgtgtgtttttaaaattttttttacccttgcctcgaaaaatcaatgcataatccagtggaaattttttggaacaaaaagtgtcagaaaatctcccattttgctgtttttattctctctttatcgtggccgtgcggaaatttaatgcccttttcaagtctcgattttgggtatcgcaatgcccttgctcaaaattcgacaaatgcacatggttttcttggaattgtttccaaaatcttaagaaaacaataaa

SEQ ID NO: 82881 - DNA, 842 bp, Heterodera glycines
  unsure (1)..(842): unsure at all n locations
atgccattccgacgaacgtgccaagtgggacatttgacaaaccatttagtccatttggacaaatgtggacatttgntcaaccaatttcattagccaatcccattttggtttatttttttgtgatttgagctatataggcaatttgcttaaagattaaactaaaaatttgtatgcaattgacccgattaaagcggaagaattcaatttggcaaatttttctttttaaatcaagagacattttgccaaaatttttttgaattttatacaacaaacttttgtacatttctcctattttcaggtgattctgctgatttggacagtctctggccttctgtcattgcccgaaccgttcactttgcgcatttatccggctgaatatgcgcgaaatttgactacgacggtaaaattgttggaaatatttttaaattcaaaatgccaatttttagtggggcacccgttgcaaagagagttggtcccccgaattccaacaaaagtatcagttgatccaaacgttggcactttttttggcaccgctcacaatcatttcggcattgtgcgttcacatgagcattgtattgcgcaacaaagccatgcaggtggtcaattagtgggaccaattagtcacgggttttccaattatgaaagcaattagtgtttggcacttttaactttcagttattaggtttatcagtcgtcatttgaatgaaaaattatttaattgatcattatctaattaactttgattgtcttgtgaaacaattagccagctgataggttaatgaattcgaattagtctttaatgatttggtgcggctattaattaattaatcccaaaaaataaa

SEQ ID NO: 82882 - DNA, 577 bp, Heterodera glycines
atgacatttcgccaacaattcaaattcaaaacggcaggaggttacagcagcgaagaggaattggacaggtgggtgattttctcaatttattttttgaatttttcgcattttttgtgatttttccatttttggcatttacggcattttatttttgttaaaacgaaaaattaaaaatttcgctaaaaatttccgcaattcaaatgaattttttaggctaaatgacgacgaatacgtggactttgtggccgattttctgaagcccaccccaattgaatgggttttcgtcgcaatttttgccattttaatggctgtcggagtctgcggaaattgtagggattcgaaattttcaaaaattccattttttcggaaatttaggcctcgtggtttacgtcgtctcaagaaataggcacatggtgagaatttgctgaatttcgtcttttattttttaaatttaataatttaatcataaaattttttaaaattttggtaaaataataatttatttattttaaatattaaaaaaaatttaatttttaaattaatttctttgactttttctgacaaatgggcaaataaa

SEQ ID NO: 82883 - DNA, 777 bp, Heterodera glycines
atggaattgaccccaacccagtttttgaatattgttgaattcggatttattttcctcgacctacctaataaaaacttaagccgtaaagtgagcagtgagattacgatcggacagcgtacattatgaatagggcttatatttatagttttttcactattttttcctgagctctctatagcctgaaacgcacgaaaaacatgttttttaggggagttgttaagctagttttgagttattagaattattttctagttttgcgccaatattatttattttagttaaaatttaaattttatagataatcaaaaattaaatttctttaacttttcctatttctatttgaatttaagcctttatttgaggtgaaaatggacgaatcacttggaaataaacggcgaagacacagcacagtcaaagaggatgattcagtttcattgtgcggaagtgtcgcaacaacggccgccggggatggctctctgttggactttgggcttgacgaagaaacattggcggtcgaatccgacacggaattcgagcgaaaattcttcgtaatgaaaggttgacgaaaatgataaaatcataacaaataaacgaacaatcctttgtttcagagggctcttttccggggaaggtttttgctttgcctcaccccgcctcgagggaacgcgcgttgtatttggtcagtcagcgaaaacggacaaggaaaagtcagagaaaagcgaacgaataataagcggagggaatggccattttggcaaaaaaatttatacaaataaa

SEQ ID NO: 82884 - DNA, 1123 bp, Heterodera glycines
tgcgcatgattccactgttccaagcaccccaccaaaagcaaaacgatataaccaaaatataaggaaaaattttttaaaacattttttctccatcttcctttttgatactaaagcatcagagtgctaaaattaagttgtaaataaaatttggtgcgctttagagcactttctgaaaaaaatatttatgaaacaaaaaaatcgattttttcaagtgtccgtttggggtactcaaacaattatggggagcaaaaatccaacgcagaattaaagtacaggctatagggaagctattcccgaaggattcggtctccccataaatctgggcgcatcggttcggggggactgccccgaaaacaaaaaaatcgattttttcaagtgtccgtttggggtactcaaacaattatggggagcaaaaatccaacgcagaattaaagtacaggctatagggaagctattccggaaggattcggtctccccataaatctgggcgcatcggttcggggggactgccccgaaaacaaaaaaatcgattttttcaagtgtccgtttggggtactcaaacaattatggggagcaaaaatccaacgcagaattaaagtacaggctatagggaagctattcccgaaggattcggtctccccataaatctgggcgcatcggttcggggggactgccccgaaaacaaaaaaatcgattttttcaagtgtccgtttggggtactcaaacatttatggggagcaaaaatccaacgcagaattaaagtacagactatagggaagctattcccgaaggattcggtctccccataaatctgggcgcatcggttcagggggactgccccgaaaacccaaaaaaaaattttttggataaaaattatttaaatgaactgactagataatatttaaaataggttatttctcttcctttcagtatccctgcaaagtttggtgcgcttctgatcagtttctgaaaaaaaagttaagcctaaactttttggcctgtttaaaaaggaattaaaaatttttaaaaattttattcatctccctttttgatagaaaaagcatcagagtgcctaaactaacatgtaaataaaatttggtgcgtttcagaaccctttctgaaa

SEQ ID NO: 82885 - DNA, 293 bp, Heterodera glycines
atggatttcacgaaacccgtaattactgatgtaatttttgttaaaccacccgcagatgacagtccgggctttgtattgagtgcatggcgttgctcttatcacaacgatgaaacatatttatgccaaagaccagaaggtgattatagtaaatttcttctcactcaataatcaaatataatcgatgccgcaccgattagctaaaaattagaattttctaggctcggtaccaatatttgtcgcgcatccctaataagcaaatcctctcttaattctttaattttttaatttttaaa

SEQ ID NO: 82886 - DNA, 494 bp, Heterodera glycines
atgcgtggtacttatgacgaagatggatacggttcgcttgaggacaaagaatgcgacaaaggccaacagttttgctacttggcaaactgtaaaaccggtaatgacattggaatgcgttatttgacctgcttaagaaccccaaatttggtactaaatacaaatgattgtcaataatttttaaaatatttttataaattttgctcaaaaaactaaactcaaaatttaagttaatgaaagattttctagaaatgactttttattcttttcaaaaaaaatttttaattaaaataattaatttattaaaatattatttaaaaaattcattaaaattaatgcatttcttgttcaaataacttgtagacatggtcagctatttgtcttgggattgtgcgaaagacacggattgtgccaaaatttcggctgattggaccatgaacagaggcggcggcaattactcgtgcgagtgcacatttggcgcccctggattaacttga

SEQ ID NO: 82887 - DNA, 563 bp, Heterodera glycines
atgttctacagaatcgtcggtcatttgtcgcttttcgaatggtcgcaaagaaacgcgcactttcgtcgacccggccgaattcttcgcgcgtcagtctctgaacgcctcgcgaatggcacggcgcacaaacacacgacaccgttttcagcagcaaaacgcactgttcgaggatttgctgttagcggaagcggaaagggacgcggtgccgacggcgcttaccattcgcgggacgacggcacccgcggggacaacggaaagatgaagcaaagcgcagggataaatgaaaataaagatattaaaacaaaaactatgacactgccgaaagcattcattggacatccaaattgaacagctgcggggaatttcaatttctgatcaaaacttaaaaaatatgaaaattttggtttttaattggtcaaaaagagaagacatccaatttatataaatcggagattgatttatccaaagctttcaagttttgttaaattttttgacttccctctcctaacatttcactcattcaaaatttaattggaattttaattattttttattttaaatta

SEQ ID NO: 82888 - DNA, 1657 bp, Heterodera glycines
  unsure (1)..(1657): unsure at all n locations
cttgcatgggcctgcannggtcagggtaaatatgggccaaagcattcatctttgggggacccattcgaccggggccaagaggacccactgattagccgattgttggccaagaggaggcaattccgcaccttgctcacctcttcctccacgccaattttcgaaacaattgaccatgcgtttcagcagcgcaccgtttttgacgggcccatgaaaatttttgaaaattttaagttgagacctggtgagaagtcaaaaagggtaatatttcatttaaaatttaattatccaacaaagaaaaggttaaatcttcggccgaaaagcaaagcaaacgaaccaattattacattaattaagtgataaatcaaaaggcaaaatctgttaataagtccaaaaattatcaagtttttctcactgccgcctataggcatcgtcggaatattattgttttaaattgagttttaagatgaaattcgcggaaccgttagacaattatttatttatttttaatattgataatttttttgattaattttttttttgaatcaaaatcttatatttcacctgtttctccgcaaaatgtattaaaaatagtcaaaaatccaattaaagttaatgagagccaaagctgcaaaaaaaagttaaaaaattgaaaattcgagccttagtaattcaaaagtcatttcgccatttgccaaggcattcaattggacttttacgattggcgtgcgcgcattttatcagtcgctgtcaatgggtaaaatcgttctccgaactccaggtaccgtaaattgccactgcttttaccgtaactcgttcataccgtatgcccaccaaaggaaattccactttctgacctccagtcgttaatcgtccactgctccttcgctttgctcgtcttttgcgaagcctttgaaacacccgaacggttttctgatcgtttggtttaccctgacggacttcaagtgaccaggaacttttccaaaggcatttgtatcccgcaaaacggactgatcagaggcatagtggcggtgatcaaccacattttggtaacaaatgggaagcaattagggacaatttccaaaaaaggagtcttaattactctaaggcaccaatacgacgaatccaactgaacgaagtggaatacgtattcatacagtcactgcttctgtttgattcaggtcgaaaaggattgttaattttattttaaaataattgttaatttttaatatttttgtgcattttcagattgtctttcattgggcgaaaaaactcagcaaattgtaaacgaaaagcaacaaaaacttttggagagtttgcagagatatttgaatagaaaaaaggacggaaatgcaatggaaagtgtcaagcgaatggccgaacttttgcttcggattccgaatattcaagtaaagaacgcaatttttggcagaatattatgtaattgaaaatttattcccattaattacaattaaatctttttaattaaaaacattttcaattttcgtgcatttgttttatcaaaatccttcagaaagttgctgccttcaaaaggcaatttttcttggatgagaatggcctgaggattttgggcccaaattgtgccaaatgcagcttcgccattcaaattgccagcctctacctgaacacttctttcttc

SEQ ID NO: 82889 - DNA, 586 bp, Heterodera glycines
atgaaagtgggtgtgtgattgattgtatgggcttattaatcgttcaatttgcgctttgtccctttttttcttccactgcaaaatcaatgactaatgtgactttgtcctcattttggtcatacactcctattgctactttaatttgaatttttttttataactttttgaattttttaaaattttttagtcaaaaatttttcttaaaaaaattaaatcgatttagcaacatagcgagcgatctttaaatattaatggattttatttttaaaattaaaaaaacataattttgccagacaatcgctttgtgcagcaggacagcacacggcaaatgatgcgcaaccggcgggaatgggctgtccaacggttgttcaggcattatgccaatgtcggtgtgccgaactcaaccgtacggttgggcgaaattctgctgttgctgcctgagttggaggtgttacaatatggggactcaatgtgggaattacgatcaaatatcgacccaaaaaatcctggggataggccaaatcagtaccaatcagcggggatcaatggacttttttgatcagatccccaccaaggatgttcgaca

SEQ ID NO: 82890 - DNA, 794 bp, Heterodera glycines
atggcacggaattccgacttccgatatttttggggtcggaatccgacttccgaaatttttcataaaaagtccgaatttttcggaaaaaatttgctaaaaatcgctaaatttattttggagttttgcatgataatagaaaatacttttttgggtaagtcatagcactttcttatcactattttttcattttaaaattttttagtaaggagtctcaggttcaagagtttttgaattgttctgatcagtgattacgaatatgatggccgttttggctgctcaaattcaaatatttatgcttcgtttgactcgaaaattcgaaatccgacaaatttagcctagtttttcaaaaaaacccagcggcgcctgtcggcaatcaaaccaaatgcaacaacgaattaaataatatttataaattgcaaaattaaattcaacaacattgtcaggaattactgaacaaaatacacaaaaatctaacaaatattttggtcaaaagagcaagacgcttatgaatagggctcgaaaaaataagcatatgtatatattttttccatgggctcgaaacagccagaaactcacgaaaaatataacagaaaaatttttaaaaaaaagtcaagcagcaacatcatcacaagcagcagaagatgaattgtcaattaaccaaaacaatttggaagaaagcattttaaatgcaaaaggaaaacaaaataaaattgaaattgagccacctaattctccagacaatccatcacagttaccgtttgaatcatctgtcttataaaacgattattaataaa

SEQ ID NO: 82891 - DNA, 1436 bp, Heterodera glycines
atgtttttttttcatcatttttttgcctctgccgactgtcctcacgtaattgaagtgaccgatgttgaagcagaagcgttcaaagtgatgttgagcttcatttacgcggaagatttaagcgaattgaacggacaaaatgccatggcagtgctttacgccggtgaaaaatttaaaaaataaataaataattatatttaaacatttttagccaataaatataacgtttctctgctggtcaaagccttgttggcttttccaattaatgaattgtcaaatgttttccttgcctttgacgaagctcgtcttctcaacgaaaatgtacaaatcgaaatttatacaaaatatttttaattgttttattttaaggatttctctcgtcgctgcttggattacattgaccaaaatgccaaaactttatttgaatcagaagaatttttgcaaattgatcaaaatttgttgtgcgaaattatcgaacgtgaccaattgaaaatcgccgacgaactcatcatttggaatgctgtactaattaattaattattcgattaaaaataactaatttcatttgttttttcaggccattcgttgggccgacgatcgctgtgctcaaatgctcattgaatgttccgctgaaaatcgtcgtgccgtgcttggtccggcactgtccagaattcgtttcccactgatcacaaaaagggaattttcgctaaatattggtagttttttgtattaattaatgcggaatctccggtcaattattgattgggattaggaccccgaccgatgctgactgaacccgaagtctcggtttttattccgattttttaaaagaccccatttgcaggccggcactactctcactccaattaaaaaaatatatataataataatattttactagaaaattatttggtaccggccaaccaccttaacaccccttctccacccaccttcaagttttttaaattttataacgtggccattactaatttgccaattttgggtctttaaaagaatttatgtgcgaatttctaaaggttgaagatccagcaggttttgccaaaatatttgttatttaaattctagtaaattcaccaaaaatatatatgtttttttaaatttcatttttcttacagtatcctcctgccttttgacagtggaagaagtgatcggcgtcttccaataccattgccacccgaatctccgcggtgcgcccggacaatacccaatggcatttccgtgccatggacgcttttccgatcagaaagaagggacactttcgatggaaattgagaaattgtcggaatttgcgcgagagagagtgaacagcagccgttacagcaaatgcatttacataaaaggattgccgtggaaaatttgggcacaaataaatacgaagaaagacagcacggagaaattcataatttaattaaaataaa

SEQ ID NO: 82892 - DNA, 696 bp, Heterodera glycines
atgtacaaaaattggtcaaaatatgtacataaatatgtaaaaaaaatccctaaatatgtaagaaatatgtataaaaacccaaaatatgtacgaaaatatgtaaataaaatttgtttaaatggttattttttgggaaaaaaccttcgtaaagtgttaaataggcgtaaaatggcataaaaatgacctaaatatgtttaatcaccttgtaacatttaaaaaattatttttggaggggtacatttaaaaaaagtttttttttaaattttttcactagaaatttctaaaaattttcaaaaattctcaaaatatgtataaaaaaataaaaaatttgccaaaattttggattttttacggcattttgtacttcaaaaaattaaatttaggtccatatccatccatatctcgatggcaatggcagagtggcaagactggtcgaaaattgggtcttgatccagcgtgttttgccaatgtttatccccgcagaggaagcgcgcgacgaatacaatgccaacattgccttggccgtccgtggaagaaatgaagggcatgcgactggccttgatctggagctgaatagaaatggcgacacagattggcttaagccattcattaatatgttttatgtctttttgcagaatgccacggaaaatggtgccgaaaaggctgcagataatgagtaattttttccagaataaa

SEQ ID NO: 82893 - DNA, 573 bp, Heterodera glycines
atgaatataatttctgatagaactcgttcggctgtcgccaccgcaacgcccggtggaacgcgaggcaaacgcaaagttatgcgctttgacaattccgaggatgacccaatcgtgcagttttgggatgtgcaggacaggcggtataagctgatcaaggtgggattcattgccacggttgataagaaaatgaaatggttaagtctcggtattaattttcatggatttttttattcaaaaatgtcccctttgtcaggcactgtacaatttaatctcgatgagtgttaccgcggaggacaacgatgcggccgttggcgacgaaccctctcggactcagtcgtccgccctccggtacctttggacaaatcggcaaagtgaggacaacctaaaaatgtgtgtctgttattctttggcgaatcagtttttacatatttcttaacatttttagttgcattctctcaattgtgtgtaaatttctggaaaacccggaagtgtgtaaagctggcggtcgtaccaacatgttcaacgtgttcacgctgctccgtctcatttgcatctgttgggacatgaacaaag

SEQ ID NO: 82894 - DNA, 1658 bp, Heterodera glycines
  unsure (1)..(1658): unsure at all n locations
aagcgctgaagcatgccgtcgacatcaccaatcgcccaccgaacaatggaagcaatcggaaatgggcctggccgttgacgccattacttactctgggcttgctggtgatggtcccctggtggctgcggtcatggtttgttttctgctgcctctctattataatcaccttctcgcagagaatctcatgttccatagtttgtaatagacagtgtttcgagattttcttccccttgcgtgaaaaaagtggaccttggataattctgctttctctcttcaaaatttttatacaacaatatgaaatgcttctctgcttttaagccaaaggattaaatcaattccgctaaaaaagttttcttcccctagtttctggagcgttgcccggcgctcaactgcggtctcggctcaaatctgaccgttgccggctcggtggagtgtgaggcggcctacatgtgttcccggcagatggcctacggcgctgtcgctattgtcggtttgccgatttaaacaattccgatgaatcatcttgtccatccttctcgcgagtgcaggtcaccaactgtgtgaatccaatttgtgcatccaaagcgttggccgaaccgtacgccagcagcaacagttgctttgattcgtctgctgctgcggttggattggtccaaccgatggttttggctgggcccggggccgacaaactgtgcgcttcgctcggcattggaacagtgccatcgaatgatcagttgaggacacgcagtgccgtcaaagagcatcgtagagccaaacaaatgatggcattggctgcgcctgacaatggggacaagtcggcagcaccggcaatggctttgggcacggacaatgccatccgacgaatggacactgtcgggggagtggcaattcatgtgagaaatgctgttgataatagtaaattgcctgattgattgacttaattagcccgatggaatgtgtgaggcgtgcgttagcagtggcggcattcttttgaagcgggaagggcgcatggggcattcaggtcaaattgtattaacatgaaaatttatcttttgttgttgccgttccactttttatttccattttcagcccaattcggtgccgcaatttgggctgaacaatgcgctgcttcttcttcttctgctgctgccaactctgactttggcctttcggtagccgtttcagtgtccggctgtggcgaggcgttaacgcgcacacatttcgctgaagcgttggcccagcaaattctgtcaatgtatgaggggaattgaaaatgtcaaattgcatttgacagtcaattgccttgccattttgtacttttttcaaattcacacttgatttgtttgagttttggcccgggcatttgaaaattccatgcaaaccgtacactttctaatcacattggttgaatgtcttttcctttagtctgtcattttcctttcatttttgcccccttttcagggatgtcgacgacttggcctttgtgcagtgcatcacccactttttagaccaccattttatccgttcgcgtcgcctttgctcttttccgtccgatcgtttgctgttgngcggactcgcagtcattcagcaacaaatccaaaaatgccctggcgacgaaagcgatggcaatgaaagtgccaaactttgtcatcgaaatc

SEQ ID NO: 82895 - DNA, 1182 bp, Heterodera glycines
atgtgtcggtgaaaatgggcgatacgagcgtttcgcaacgtgttgcggtggtctctgatagtttttttcttgacgatggcgcgcaagtgctcgggtggtgcgtgttcatatttcgtttcgaaaaatacgtgaaaagtcgtggagcaaaaaattttatggcttccgttttttgctaatttctaaatcccctaacccgaattggagtcgaattttttaaacaattgccgaacttttaatggattttgagggcccgaataatttggattttgcaggatcgacaatgttcgagtgcacatggaagaaatcaatctgaccttctcccatcgttttgcggtgatgcccgacaagtctctctccatgtaagtttggcgttttgtcagttttcaacggattcaaaattgtgtttcacggatttgaaatcattatttaaggtactgcttgaagaagttcgacatgctgtaagttgaatagttgaacgaaaaagtggttttttgatatgtagtcagagcacttacgaattagggggatactaatgacccaaccgaactcgaactaattacttttttcccctttcctaaagcctcggcttggatctgctgggtggtgttggctttatccttagcttgcccgaaggtttgggcattcgcgcggacatatgcaaagcaaagtgggcttaaaccgtctgcaaattttggagcctatgcgctttttaaaatttttcatttgcagggtcagcaaaactgctcgaaagccgtccatttcgttttcgcaaaaaaagtgagttgagagtggcattttgtttcaaatttcattgcttgcgcgttttttcatttgaagactcgacgtctttatgagtgatgctggtgttagcggctcggggattaagccccaaatgatgtaagttcaaataattccggataaaattgtcgagtgcattccattcggatgatatttggtcaccttcaaaaacccccaaaaataattcattgaattcaaaattctgcaaagaaactcattctttcgccgcggcagagttcttatttttagaaacaatagatcagaaaaaactaaaaagttatttaacgaagtatcagaaaaaaaaaaaaattttttcaagttttactttaaaaaagagtaaatgatttttaaaacttttatttcgtttttattagaattaataaa

SEQ ID NO: 82896 - DNA, 301 bp, Heterodera glycines
gcaatctttttggagatattatccccagctacatttcaagcaaatttgctgaatccgtatatgctcgatttgcttattttgtcgccacaagcacttgttgctgatctgctatcaccacaattgattcaaccaaagattttaagtcctcaatcattctcagccggcgtgcttagtcctcgtaattattaaattaaaattttaattacaataattaaacatttataaaaaaaaacaaaatttttaagggcatcataaaattcaagaaaaacaatgcaaaagtgataccaaacattttaaatta

SEQ ID NO: 82897 - DNA, 850 bp, Heterodera glycines
attttgtcacccgaaattggcggtggccacgatgaaagtgaatttgagacagagggtgaaaatgtgtttatttggcccaaaactgacgagcccgacgaggaggcttatctgggcgaaaattcggcacatccggacaccagtgcgcacattcacccgaacatccttcatcccgatgggtcatgaaaagtgcctaaaactatttgaaatttttaatttatgtgccattgtggtaattgagctttttccaagtgttgtaagctattaatttacattttataattgttaaaatgataaaaatcgtgctgagacgaagtacgaaaagtgcaaggttgggcgaagcacgaaaaagtgcaaagtgtgctaagtacgaaaagtgcaaggttggacgatgcacgaaaaagttcaaatgatcaaattaaaagcaaaataattctgttagttatatttgtataacatatttaaatttcgctacataattaaatatatttttatattaatggtgagccgaagcggggcatcgttttcgtacgggccgttttcgtacgagcacaagtttttggctataacttttttatttgtttaccaaatccaacattgttggtgtcattcgatagccctatgtatcctctattttttgaaggtttgtctaatttagaggtggctaaaaaacgcttagactttaaactttattttattgttgaaattttcaaaatttaatttccaatcgataaatagataattcaaaaatgaaccagtcaacaatgggtaatactataaattatgaacattgtaaattttctatctaaatttttgcgaaatttcaatattttttatgaaaatttatttgaaa

SEQ ID NO: 82898 - DNA, 2057 bp, Heterodera glycines
  unsure (1)..(2057): unsure at all n locations
atgcgtttcatttataatcaaattggcggctctcagcatattttgctggacagattctacaaaaaatattttaccgctgaaaatgaaagcgaacgaaaaaaagcggcacaaaaaattgaaatttacattcatatttattttttatcgtacaaaattgagcaaaacaaagaaaaattggcgaatattttggtggcttatttggaagaggaggaggaggaaaagcagaacaaaaaagggacaaaagcgatgaaaaagggaccaaaaccgacaatcacagcaaaagcattctatcaaaggcgaatgttacggtaataattgctaataattattaattaattaattaaccaattaaatagtctgatgttcaacaaccgtctgcaattggattttaatgttatggaattatttgacacgcattttcaaaagcccaaattgttctgcgaattgttaaggcttaaagccgaacttttgacaacaataaatgccaatggcactcaaagggttacaatggcacgccaaaaagagtggccgaattgcaaaaatgacgaggaaattaaggtaggaagcaattcagtgtttccatgccgggctgccgagccctaagggttcagcccgctccgactcttgtgacaaaggcagacacaaatatttgtgccatttttgagaaattaattatttttatttgtatttaaaaaaaaattcaggagaccattgtcgcaaatgaagagaacattaaggaatggatcttcagtgacatttttcactttttaccaacgcggaaaaaacttttgcaatactttgagtagggaattatgaaaaattatattattaaatattagttaacaaataataaaaaaataaataaatctttagtgaaattaaattgaaaaaaggggatttgagaagtgcgagaatcggatttattaacttaattggattttcgaggatgtcaattctttgcaaaaaatactccgaccaattgtcatttttgggtttgttttttaggaataaaattcgttaatcttttcaattcagtccctctattttataacggtttttaccttaaattatatgaaaattatttaattgagaccaattggcgaaataaaattactttggccaaattcctttatgacgaatgggccacaaaaacattcagcacagaaaggaaaagaacaagcaaacaaaaaggtaccaattgtgtttttaatttaaattatttaaatgattcagcgaattttgtggccatacaattcgaagcgatgtttttaagtgaactgaaatacctttggcaattatacacacaaaacttttggtcaaacgaaaaaataattcgtataaaaaatgagagttttttaaaagaaacaatgaaaggaaaagcattgaaaaatgcaagtgaatcactttcggcacatcaaaagcaattggaggaattggcacagtctatcaatgaaatggtctttattttatttccagattttttttgtttgaaaaaatattaatggaaaatatacactggggtgttcgggagtctcaaaaacagtggaaccctggctaaaaaagctccggaatttggaattaaaataataaatcaaattgaaatatttcatttcataattattaaataataaaaattaatatcactttggtcaaaaaaaatgaattcgaattcatctcacagtaatagaattacagaataagcaccaatttttataaaataaaaataaaaaataataataaatattgtttttaggaccaatttctttggtgggacaatggtccgaccgacactttccttttgcgtgccctcgcaatttgtgccaatggagcgatcgacgaatttggaaaaaaatttccaaattcgtcggccaaaaatggagaattggaagaattcactagggaatgtcaatgcaattttttgatttgtgtgggcaaaacattgcgaaaaaatacacgaagggacgaatttttgtcggaattgcattttcagaaaatggacaatttgctcaatgatgggagagaaagtgaaacattcagaggggatgtnatcgatcaca

SEQ ID NO: 82899 - DNA, 79 bp, Heterodera glycines
atgttgaaattgtcgcttttgattatttttgtgttacttcttcactttgccctttccaatgacgaggaaataaatgaat

SEQ ID NO: 82900 - DNA, 1062 bp, Heterodera glycines
atggtcatcacacgcagtccaattttgacacggcaacgagcgttgaatttggagattgccgttgacagaagtggacatcagattaatgtcggtggaaatcagcagaactcgctgcaacgccaaaatcacagtgctggagaaagttttccccaaaatcagcaaattgaaaactcgccaatctcacccactgaactcgcgggctttaatggggaaaatggtgatgacagttctcttgttttagaaccaaatatgaccgaagaggaattgcgcaggcgcttgttggtggtcagcattgaacgtagccagccgccatccaacggaaatgccggaaatggagaaaacgccgaaggtttgcgaaacgcaatcagggaaaatgatggacgaccgaattttggagtaaatggtcaaacatttgcccaccaaaggaggccgcatgacactttcttatcaaatttgatgaataatggaataggaaactttcctcaaaatttggtccatgtaccgcgtacttcaaccccaactcgaaatgttgaatttgaacagcaaataggaccattcccgtttgttgttgaccgcaacaacagagcaccaaccccacctttaaacatacggcaacaaattttccaccccatcccactgaatgcacaccgcattaaccaagtgtcggttaacgcgcaacgcaacattgacgttcagtacgtaccaaataattgcgttaatgtcccgccaaacgtacagcgtcattgcgacattcagtacaccgctcctaaccttgtcgccgcgccaattcctgtttcatctatcatgaacgtatttttattaaattaaataaaaatgatatcaaaattcatttattcagctggctgttacaattagttgaataacaataactgctaaaattgtttgattttttttttgcaaaatttaagaatttttttaaaatagggttgggttttatttatgagattcgttattatacatctatttatatatatatggttttgtttaatttcattttatatgtgaatttataaaattaaaatattaaaaagtataccgaaa

SEQ ID NO: 82901 - DNA, 934 bp, Heterodera glycines
  unsure (1)..(934): unsure at all n locations
atgtcttcagctcgatgccggatggctttggggcccgcgctgttccgacttcggcaacatgtcactacggccgaaaatttgctggacgagcccgtgatcaatgccgagacgaccgaaaaccttgaacaggaacgggggcacatcacccgtatcctgtcaaggatggaggtcgagctggacgcgtggggtgccatcatgaacggactgcaaggcccagcgagagaggcggaggaagcgcttttcactgcctttattcgagatgaccggcacttgacggagtggttggaagatgcgcgagaaatgctggctcacatagcagcagaactcgcagatgagcacaaccagccaatcgcggcgggaggacagcaaccagctgttgctgtgaatccacccgtgccagccgtgccattcgtcaacaatgccgtatttccaggcggtgccaatgctcaacagccagctgctgttgccaatgttgcaaatcaaccaccaccgatgccaatcaatgccggtggtgtccattatcaacagccatttgctgttgccaaccctgccaatctggcactaccagtgccaatcaatgccgcacctgtgccattagctactgcacgccttccacagctcagtcttcccattttttcgggcgaaccaatggaatggccagcattttggcagagtttcgagagtgccgtcgaccgtgccgcccttgagcccgtcgacaaactcaactatcttcacggttgcctacgcggtaaggctgctcgtgccgtaaccgcctaccgtggaggggacaattatgcccatgccgttgccgcactcaggcgactcttcggagatccacggaaaattgccgaagcacttcagtccgaactgatcaatctccggnctgtggacgatagcgttggatcactgcaacacttcctcgagactntgnagc

SEQ ID NO: 82902 - DNA, 154 bp, Heterodera glycines
ttcgacctgctgttttctcgcaattcattgagcagtggctcaatgtctccgcttgccaaattcgccccattgaaagcatagcaatgcaaagccaacgtaaaaagaagtggaaaagcaagaaaaagaagcattttggtaaaaattataaatgatt

SEQ ID NO: 82903 - DNA, 1340 bp, Heterodera glycines
aatttcgtacggtccgtcgcgggggcggcacacgtcgacaatcggcagaatatgaggacggaaaggagacgaagcaaaaggaagaaggggacgaacaccgacaccaaagttcattttcatccgccaatttcggccgctcttccgactccgagcaaatcctacgcgaattcaacaaagaattcagcggatttatgcgccaattcgttatgtcccgtgacaaaaagccgggcgaattcgacgagcgaatgaaagcattcatccgcgacttcaacaagaaaatgccgcccgaattcgaagttgaaaggagtgcgttttaattaatttttttcgattttttaaatttaattatccgcttggctgcggtttattttttaatgatattcaaagaaaaatcatcataaacagaaagtgaacaaaacacgagtttctccgaaaaacaaaggaaatgcaaaaattttcggcacgatcggaaaaaatggtaaaattgccaaaaaacgttttaccgtggaaaaaatgcgctgatcacgagctctgatttttcaagaaccttcattttgcaaaaatattccggcccccttcataattttctctttcattttcactttttttcagctgcggaatccgttcgctttatgcccaacatatttttgggtggcatcggattggcctttctcggtgcgttcattgcctaccgtttgctctctcgaaatgccattttgcccgaacaccgcgccattgtcgctcagcaacattcggccgtttcttacgatgaatttgtgcagcatttcttggcggctggggaggtcaaaaagaatggggcggctcaatttgggccgaattttcaaataataatgtgattttgactttaggttcgcatgatttacttctacccgagtaagtccgtcgccgtggccgttctccaccccggcgctgtcatccggggacaaccggtcggttggcaaatgaccacttaaataccacattttcatttttgttcgttttcagtaccatgggtccgctgttctcatccgtttggactcttacgccgcttcgggctcccattttctgcagggcgttgaggacgcgcagaaccgacttggcattgaccctcgtgaacacgtgcccgtggccattcatttcccctcagttttgccgtaagaaatcaactgactaattccgaatttatttgtccaaattgtttcagtgcgttcatgctcatcctcggctggtccattctgttcgcaatgttcttcaaatacgcacggacatcgctacgccaatcgctgttcaaagtgaagagaaaggacggcggaagcaaagaaggaaaagcgggggaatga

SEQ ID NO: 82904 - DNA, 773 bp, Heterodera glycines
atggattgtggtgtagtggttagtgcatcaacacttacattcctttctgtcattagttcgataccgtttgacgtttgctttttaattaatttttttttgaatagctaataggattttttaaacaaaaatgcccataaaaacgatcatccttggaataatttgttgacaaattgaatttcaaaaaattttcttttcgttttcctcgacgaaattatgaaatgtttagacaggccaccttttttgcgggcgtcgcgctttcacctaaaaatatcgaagaaatttttttatcggaattcataaatattgaaaaaaatactccaaattttcaaaaaaattttcccggcggtgcctatcggcacccaccgccggaccccgtattcctaaaaaactcgagaccgagaccaaaaaaacccgagacttttctcgagtcgagactcgagaccaagactctcgagcatcactactacttaccctgaaatattcgtttgaacgccccaaagtcacttgggtaacctatcctttgttaggaacaccttttcggtgactttgaaaattaaaatttttcagaaaccatctgcagaattacccaaaaaaaaatttcatttcaattgcggtgagtgccaattcaaataaataatggccaattaaataaaagaatcataattaagcaattgatggacccgagcaaaaaagctttctacaacaaaaatgaggacaaagtgacgttggccatcgatttcactgtaaatgaagtaaaaacggacccaatatga

SEQ ID NO: 82905 - DNA, 958 bp, Heterodera glycines
atggcctacaccatctcaaaacacatgctgaagttgaatggcacgtactggatgcagcagccgcgggtcaccaccgtacaaatggcagcgccgatggtcagcgctatcaaagaggctttgcttactttcaatgtccaaaatggtttcttcccggaacacatcttcgtgttcagggccggtgcctcggaaggcgaatacaaaaaggtgggcaagacgagaacgtaaagagttgcaaaacggaagaccaattgaaggttgcgtattgggagggcggggcgtttaccactgcctttgacgaactgatcaatgaacgcaaaatgccaaaaaaacccgcgttgacgcttatcgtgtgtcaacgcaactccaactaccgcatcattcctaagaatgtacagccgggcggtcgcgcgcccgaccaaaactgtcagccgggcactgtgctggacaaaagggtcggaatcgctcagaactgattgatggataattgctgttctttcaggccatgcactcttcgttgactgaattccttttggtcggccatcggaccatccaagtccgttgttactgcaattgacaccccttggactgacacttccatttcttccacaggggactgcccagccgttgcgctgcaccgttgtggtggacaccgccgaacctcgagtcaagctcagcgagctggaacagatcagctacgcgctgtgctaccagcacgggatctgctgcagtccgactgctgtgccgggcgttctctactcggccggggacttggcgacgcgtgggcgcaacaattggcgcacgtccacgtgagcccctccccccccccccccccccggaaaactttcctaacattgccctccctttcacagcgctgacggtgacaccatccaggaattcgacttgccgccccagggccagcctgaggaagtccgggcccaagcgcaggctcagttggacg

SEQ ID NO: 82906 - DNA, 1094 bp, Heterodera glycines
atggcagcccaagaagaaaatgaaattcaattgccacgtaagttcaaggaaatatcctttagtttgaataacacagtttatgtttagagaaaatcagcaacgaccatgaagttcgtggcatcgcaccggttggagtgctcatcaacgcatttgaactgaatctgaggggatcgcctgacaaagtgtatcagcatgagcttcgtttcacggcagaatacccaaagtcgagcaaaaagggcaaagaaggaccagcggaaccgcgcgaattggcacgagggccacgcaatgagtgagtcattggaagccatggctttttgagtagcagcagttgggaaagtcggggtgagtgggttgtgattttggttggtcctgtcctaccaaacagcgtttgctttgtgtttttctactcgacgattcgtttcagtgagagcaaagagacgcgtcgcgagttgcattggtcgctttggcggattctgctcgatcagaacgccgatttctttggaagcgaaaagaacaaattcagctacgactgcgctttgctcctttattccgtgcgtcgtctgatgaaaaacggagagacgcgcgaatttgtgatcgctgccgaaagtttggtgggtaatcttcacaaataggcatttcaaaattttttggttctctttccctacgctttccgtcgcttagtttggcctttaaattccgtaggattcgttgaccgaccgtagccgtgcgtatctgcgcagatgcgaacgcgtgaaggcctttctgacggccaccgaggaagtggaggttcgcaatgtgcgcgtgactgagccgggcggcgaccgatcggtgtgccaatttttggagttgctgagcacgcagcgaatgcacgaaaggcgagtgaatgccctcgctagcatttccttctttccgttttcagaaatgagcatttcgtcttcgggaacagaatgttcgagaagaacagcgtcctccaactgcagggcgacccgcgcatttgcaaggagggcatgcagaagaatgtgcgcttcgtcggcgacaatccccagcaaagcatggccatcattcagttggatggtccgttatgccgccattag

SEQ ID NO: 82907 - DNA, 249 bp, Heterodera glycines
acggcgcccccacaaagtgtccaagccacgaaatgtccaaaagagtaaaaacccacgaaatgtccaaaatttttcaaaatttataaaaacaaaatgagtctaatttaggatttttagggttttcggggtcgctgaatacgaatataccctttatattacccgttgcctaaccttaggcccatccgaataataaaaaactcaaattcgagacttggacatttcgtggcctggacattttgtgggtcagcg

SEQ ID NO: 82908 - DNA, 1034 bp, Heterodera glycines
atgcttacaaaaattgactttttctctcactttaaaaataatttttacggaatttttaataatttaaaaaataaggaccaaatacctaataaaacaactaaatttattgatattcaacaaaatttagcacttgttttcaattatgtgccaactgatgaaggcgtgtccagcggtaatgagcaactattcttgccacttcatcaacaggtagcaaattgagacatttctttttgtctctattcaatttttactgatcactgatcactagtgatcagaaaaatctcggaattttttttttgcaaatatccatttaaaaaattgttaaaaatcccaattctggcataatgtttttaaatcaaccgaaatgttcctctctcactaattgtactgatttctactgctgttcgagaatctcgatttaaaattctaaatttatcaggtttttgggtcgctcagggtaactcctccgtcttgagtctttctggttcaattctcgacggagcctaggaaaatttgggttctagaacagcccactaattaaccttattagttaactaccacccttttcacgcgtattatcaacgcagattgattatgtgccacttttgcgactcgctgccgatgctcgacttcggcagcaacaaaacggcaccactctttggtggaccgacagatgtggcggtggtgccgatttggtcattgatccgacactttgggagaataattcgacgaattggggacgtatttttctgatggacagaagcaacaacgaaggacttttcaatgaacaaattttttcgttgtttggaaacagtgagtaaatgattgactgaatgactctgacagactaataatggcataattaacattttaatcggctaaaattgtcattttcattgagaataatttccattaatccggtcaaatagcactaattaattaattaattaattctggccaataattaaattttagacaataaaattatttatttgtcgcagactccgtgtgggccgcacgcttgtctctgctga

SEQ ID NO: 82909 - DNA, 619 bp, Heterodera glycines
atgtggatgcgtgtctggagcagcaaaatcgctgagttccgagaagaactttatgacaaaaagttcttcggaacaatccttggttacggtgaatcaatggagttccaaggccgaggaggcccacatgcccacattgtggcgcaaacagacctggacgcagttccatatgtcattcaggaatacatatgggcgcacattccatctttgcctgataaagatgacgacacgcccattgcaaaaatgcatcgcgaaatccgcgaaacaatgcatatgcaactgcacagatgcagtgacagttggtgtggtcctagcgacccaatttacgggcggtgcaagaaggggttcccagccccttactcaaaatgtacgattttgcgcccggacaggcccgcgatgtatttccggccttcaccaactgatggtggtgcccaattagaggtaaacggcctaatatacgacaactcacatgtcgtgccgtataatccttatattctgctacgttaccgagtacaccataatgtactgtttgcatatggtaacaaagcaaatattaaatacgcactcaagtacccttttaaagggccaggacattgttatgtcgagtgcaaagaagagtccg

SEQ ID NO: 82910 - DNA, 93 bp, Heterodera glycines; identical to SEQ ID NO: 53399

SEQ ID NO: 82911 - DNA, 1294 bp, Heterodera glycines
atgggcatccaattcactgatcatgcgaaaagtcttcttgcggtcacagacttctcgcggcaattcgttgatcaaatactgggccaacttcttcaggtccctgtccttcagtgcggtgatcgagtcccaaatggccacgcggtactgaacggagtcgggccggtgaatgcgttggaggcacgcggcgacgacatgttgacaccaataggaagagttggagcaggaacaggaacaggagacgacccgacacctgcaaagaaaaacacgatgaaaaagcacaacggacaatagggattcaccagtcaacagctaaacaaaattctaacaataagccgctttacctgtccactcgaatgctcacatcgaaaagtgccgtccttcgtcgccccgccgccgctgctccgccggtgctcccacaaacatcgccaaaccgttggtggtcattgacgacggccgacaagtgatagccttcaattgttggcattttcttttgcaaaatttggtctaaaaacgaaccgatttggaagagttcggaaacagcgccattttggaaaagctgaaaatgcatttaattaattagacaataccccgattttctcatttttttcacctgttctccgatcacaaatggcccttcactgcaatttgttagacagcttaaaagggagaaaatggtgaaattcgttggaattcgcctccatttgcctgtaaagcctaatgttgtctgccgagttgggaaagcattggcgaaggatgggcagcaccaaatgctcaggcaaatgctcgccccgatgtgcccgctgttcgctgggcaaccccgcgtaggtggcctcgatcagctcaaaggaaagtgccgaggcgacccttcgcgcggccaattcgaccaaaggcggaatcaccggcggtgcggctgaagcaaaacgaggattttttttcttaatttgcttctcacctgttgtgtttgaacgcttgatcaactcgcgcaaaagcgtatgatcaccatcgggcaagaaatctgaacgccgtaaaaagtccatccgcaaataacagccaagaaagtgtacaatacaataagaattaattccaaaaaatgccatttccatgccttcgtttcaaaatgccacccgcccgccccccaccgttcctcgccccccaccacaccgtgcattccgatggcggctctttcgtccgtaagtgtccaaccccgccagcaattgtggtcaagtgagctcgcactaagctgcatgtttctggctacagatatgttgcaacttacgtcgtacgtctaaataaa

SEQ ID NO: 82912 - DNA, 1370 bp, Heterodera glycines
acacaacaggtgagaagcaaattaagaaaaaaaatcctcgttttgcttcagccgcaccgccggtgattccgcctttggtcgaattggccgcgcgaagggtcgcctcggcactttcctttgagctgatcgaggccacctacgcggggttgcccagcgaacagcgggcacatcggggcgagcatttgcctgagcatttggtgctgcccatccttcgccaatgctttcccaactcggcagacaacattaggctttacaggcaaatggaggcgaattccaacgaatttcaccattttctcccttttaagctgtctaacaaattgcagtgaagggccatttgtgatcggagaacaggtgaaaaaaatgagaaaatcggggtattgtctaattaattaaatgcattttcagcttttccaaaatggcgctgtttccgaactcttccaaatcggttcgtttttagaccaaattttgcaaaagaaaatgccaacaattgaaggctatcacttgtcggccgtcgtcaatgaccaccaacggtttggcgatgtttgtgggagcaccggcggagcagcggcggcggggcgacgaaggacggcacttttcgatgtgagcattcgagtggacaggtaaagcggcttattgttagaattttgtttagctgttgactggtgaatccctattgtccgttgtgctttttcatcgtgtttttctttgcaggtgtcgggtcgtctcctgttcctgttcctgctccaactcttcctattggtgtcaacatgtcgtcgccgcgtgcctccaacgcattcaccggcccgactccgttcagtaccgcgtggccatttgggactcgatcaccgcactgaaggacagggacctgaagaagttggcccagtatttgatcaacgaattgccgcgagaagtctgtgaccgcaagaagacttttcgcatgatcagtgaattggatgcccattttcagtacattccggtcgcgcagaaactgatcgacgctttgcgagaccccacttcagcgatcaattgcacacatggagcaccaggtgatcaaagggaggggggagcagcttattttgattatacaaataaaaattcaattccactgggaaacacccggttaaaaaccgataaattttataaaaaagccattcgtttttgaattttcgaattaagattcaaaaagtttgtctaaaaatgttcggtatcgccccttacaattagccccatccgccggtctttcgcatgcgcagcccgccgtttggtacatggacgagaccgcgttgcgcgacgaagtgcacaaaattctgctggactttctgcgcaagtcgtgctcactgagcgtggtctgcgagttccaatcgctgctc

SEQ ID NO: 82913 - DNA, 296 bp, Heterodera glycines
atgcgacagagcgtgaccaaaaccacaacaaaacggcaggcgggagaaggagcttatgcgggcgaaaaagtggtcggttatgtgcagcagcaaagagtttactgcaaaagcaaagggcgaaaaaaggggggaaaagtccgtcccaaaaagggaaggacggtgcggctcccggtaaattggacactattggataaaaaataaataagttaaaaataaataaacaaaaattttaattgaataaataatgttattattatttgtagcatcagctgcagaaagtcatcatacattcataa

SEQ ID NO: 82914 - DNA, 137 bp, Heterodera glycines
aaaattccctcaaaaataaaaggtcgattgcgcaccgccctccctatcatgctcgagagcatttgtatgtgtataaaatttatcaaaaaaagagatagccatttttctgggatagagtataaatttaaaaattccct

SEQ ID NO: 82915 - DNA, 950 bp, Heterodera glycines
atgaatttggaaaaattagaaaaagctaattccattttgttggaagctgctaaaagagagacagagagagcatggcgagatgtcgttgtgctatcggatgatgtaagcgattttgccaagtcttctcgagaaactcttaatcgtgcaataaaatcaagagaaaaagctccttacgctaatggtgttcgggaattgtaccttaaaatgtccgattcaatttgggaaatttttaaaatcctggaccaaatcaatttggagtcagaaaaagctgaatctgcgtggcgtgagttcgaaagatgcaaaacttttgaccaggcaacaaagcttgaggaacaatctcaaaattctttaacagaagcccgaagattacatttcgagtcccgaagggtgcaaagccaaatgttaaattatgaaaataggctccaaacaattgtttgggagcatatgggtatataagaacataaaaactaaaagggcaacactcaaaatggaagggtgttctttaattgagtcatttcgtcatgaagacttaaaatttggttttacaaaatataaaactaaattttattttaaaaatcctttcataattaatgctgaggaaaattttaaagatatcctcacatcgttaattgaagaaaattataaaaatgagcaagggaaattcagaagcattttgaagctttcttttggttttgaatcattttattgccctcttcgataccctaacgaaaacacggccgaggctttgttccaacacgtcttattaaaagaagaacaatattcgcttttttatcctttggatggtgttataacgctagaagtaactataatcccagatgtctacagtaattcaagaaattgattttattaagaataatgtaacaaaaaattggaaaatagccgggaatatacttaaacgatcaaataatcttgaaatctttgcaaataaa

SEQ ID NO: 82916 - DNA, 283 bp, Heterodera glycines
atgaatttggaaaaattagaaaaagctaattccattttgttggaagctgctaaaagagagacagagagagcatggcgagatgtcgttgtgctatcggatgatgtaagcgattttgccaagtcttctcgagaaactcttaatcgtgcaataaaatcaagagaaaaagctccttacgctaatggtgttcgggaattgtaccttaaaatgtccgattcaatttgggaaatttttaaaatcctggaccaaatcaatttggagtcagaaaaagctgaatctgcgtggc

SEQ ID NO: 82917 - DNA, 1664 bp, Heterodera glycines
atgggaaatcaatggaaaaaagtgaggtgacggagaattatttttgtgtattgtacccatggaaagtgagcacaaaagaagagaattatggtggtgtaaatttttccaattgtgaatgaaatttaaattaatttaaatttaaattcattccagctttgatcggttgttttaattgtttgatcgaatttcggccgatttattccgtgctgtgttttaattttaatgattagccatccctttaaaatgtccgccgatcaaaggaacaaaaattcaaaaaaaagagatttgcttcatttgcccattgacatctttcgcattttatttttccgattttacccccgccaaatttggccaaagaaagcgaacagcaaaaaaaggccaaaggattttgtgtttttatcgcccgttgaaatggcctaataaaaaatatttgtgagttttgcgattgtttcgcctttcctttgccttttgcgcttttcctccatcgctttttgcttctcccccaattttcactttttattcgtcatccttttttcttataaagaaaaaatttctattttttaatcaaaaagtgttattcaatcgaatttctttaacactttttgaccattaaaataatttatttattagatttatggtttttattttattttattccgatttatgtcaaaaaacgagaaaaacaacagaagaaagacaaagaaagaggacaaaagggtttgatcatttgataaacgaattattattacagtatctgaatttaattttttcaagaaaaccaagaattcaaacagtccatcaagtccgagcagtccaccgacttcgcctgcactttcactgcctttgcccgcccatccgttgcaaattgcgcacttttcgctaacgacggagacaaattggaaggaggagaaaaagcgaagaaaagcagcagaatcacttaaataaaaaaattattatttaatattggctaaatatatttcttctattttaaattcaaaaatcatcaaatatattgggcgagaatgagggtcccgttctctcgcttttgcttgaatgtacagttttgttcggaaacgaataatgcgggatttccgcaggggattcccttaccgcgatttcttaattccattttccgcttctgcatacgtttttaatttattccagcttcttttcttgaaaagtagtcaatgaatttgcgcaagaagactaaggtttaaggatgttctttttatttaaatagcttacaatttgttatccaatttttaggtcgaaccaatagaagatgagattcctgagaatgagcagcaaataaacatctctacccgttcacataactcttcttataacgcaagttacatctttttaactttacgatttaatatttacagtctgatcgtgtcaatgaaaatgatttggttaaatcgctgtctcaatgtcttctggcaaagtatgagttgcttaaacgcacttcatttaaaaaagaattcagcgtttctaaacgagggtttgttcgtgatgccgacattggagaaatgttctcagaccgaagagaacgcgagttgcgagcgaatgttctgaagaagagtgagaaattgctgatggatgttcttggataccgagtcagaggaggaatttctgaccgttttttattcttttttagttag

SEQ ID NO: 82918 - DNA, 475 bp, Heterodera glycines
  unsure (1)..(475): unsure at all n locations
atnaaatcaaaaactgatgaagaaaaattagaaattgtgcaaaaattcattgaaatgacagaagaatataagcaaaaaagaaaacattcacgaaaagaatggaaccaaaattatgcggaaatttgtaagaaaattggagttggttatgacacaattaggaaatggaagaaacaatttggaattagcaagaaaagactaatggaggaagaaaaaatggaaaaaatgaaaatttattgggaaattaaaaaagaaaatccaaaaatgaatgaaaaggaaattgcaaaaattgtgaaaatttcccaaacgaatattcataattggaagaaacaatttggggaagaaattttgaaggattgaaaaaacggaaaaatttatgaaaatttggataaatttatttaaaaaattatctgcgctctaaaaaatagatttgttatataaattttcaaaaagattgtatttgtatttgataaataaa

SEQ ID NO: 82919 - DNA, 1198 bp, Heterodera glycines
catttcaatctctgggactcaaatctccggcatttcaatcactgggactctattctcctgcgtttcaatcactgggacaacccaccaacatttcaatcactgggactcaacccaccagcatttcaatcactgggactcaacccaccaacattccaatcactggcactcaacccaccaacatttcaatcactgggactcaacccaccaacatttcaatcaccgggactcaacccaccaacatttcaatcactgggactcaacccaacagcatttcaatcaatgggactcaacccaccaacatttcaatcactgggactcaacccaccagcattccaatcactgggactcaaccctactgcatttcaatcactgggactcaacccaacagcatttcaatcaatgggactcaacccaccagcatttcaatcactgggactcaacccaccagcattccaatcactgggactcaattctcctgcatttcaatcactgggactcaacccaacagcatttcaatcactgggactcaacccaccagcatttcaatcactgggactcaattctactgcatttcaatcactgggactcaacccaacagcatttcaatcaatgggactccccaccaacgggtcaatcacttcgaccccactcaccaaatttttgcgtcaaaggtactcactcggccgcttcgcggcctcgtaactggggccttcggctccattccagtcactcaaaattcaatctcaccaattcttcaaaacccaataaccggaaatgaatgataaaaccgacagcggctcgaccgcttagcggcctcgcattcttcttttggcattttcttatggcataacagttcttccttgtttcttgactttttcttacgcacaacatttttcttctatacaaatttttcaaacaaattctcattcattcatttaaaatttcattaccatttacataagcaaaacaatatctttcatatcaaaaccaaatcaatttataacacaaacaacaaagaaagaaaaagaaacatttttaagactgttttttacacaaaatgacaaaagaaaaaaatgtaaaacaaaaacatttcatttttcaaagcatttatacaacacaacacaatgttaatattataggattttcttagtgaacaaactaaggagtgtcctctttcttttgttaaatattttataca

SEQ ID NO: 82920 - DNA, 372 bp, Heterodera glycines
atggttagataaacttttgtacaaattaaatatttatattttgacaaataaagctattactaaaagaggttataggttaatctgagtaaaacaatttttattatcaatcttgggttttatttcaacctgaggatttgcaattacacttgttttaatttattttttcttagtcatttatttttataatcaggtcttttttatatttaaatattatttattttatgtgttgcatatttttggaatatttttcattatatactataagttttcaaaataattcaagccttttatggatgatttgttttttttcgagccagtctttttataagacggtttatccgttgacccaaatctattaagtgtcctattcaa

SEQ ID NO: 82921 - DNA, 1077 bp, Heterodera glycines
atgtcaaccgtgcatgagttcccaattgatgagcacggagaaattgcgacaaaaattttcaaaatattagggaaacggcttgtaactcaaatactccgcgcaatggactactgtgaacaggcatgtgatgaaagtaaagccaaagaatttttgtataatttttagataaaaatattcgaaaatatcgggtcagtctcgctctcgagaaaaaagcgtcgttcgactggacatacatataaataatataaagtctaaaaatgaaaataagctctccaaaatttgcagggaatacttttcagtacaggacaaattcgttttaatttgaatccttaaattattctaaaaaattaaaaaaaaaattaaatcgatatttttcattaattttcctatttttttaagtttagtcccccataaacattcgaaaagtgataaaccacacaaaagggaataatgctgagaacagttcgaatttaaagaaaatttatgtatgagtgggtgataaaattttacaaaacaactaactaattaatggggaagaattattattctaaaataattaattttaaaaacacaaaaaaagcaatgggatttcctatatttttaatttaataaataaaattgacttggaattgtaaaaaaaatcattataattaaatttaatttttggacagttgcggcaaagtgttgacaattttggacgagttgcaaatgagcaatatttggccactttaattgccaaaaagcgaactatcattttgggattaagcacagaatttaatacatttcttgtcgaagttgaacatgaaaagttcgcaaacaatggatggacaacagaaaaattgacacttttaattgaaaaaatggacaaattttttcacaaaaataaaatttattgtgccaatgccggctttgaacatgccaaaaatgaacacaatagactggttcgtggtaaaaaagcgatggaaaaccatcaccaagatggacaaataatggatgaaaatggtaaagattatagatgcacatacaaatttgctaagattttaagttcattcaagaaaagcttgggttaggttttaa

SEQ ID NO: 82922 - DNA, 753 bp, Heterodera glycines
atggaaggtgaaatggaagccaaaattcacgtttattcaacacagccaattgatggcgacggatttatggcatttgcacgcgattttctcaatgaatccaaggaacttcttaaaatcattgaaaatttgtcgaacccaattcaagaaaatgttcgtaaaaatttgaaaaatttggccagtgttgcgcaacaaaagtccaaacagttgcgccagagcattgcgcaacaattggaacaattggtggcaaatgccgcaaacgaacttgccaatttgcagagccagacaggcaagttcggggacaacacggcatccgaatatttacgcatttttaggtgtaagtttggggaatattatgaatatttttgctaattaattaacaagggcttagattaatgtaagataaataaaatctcaaaaaaaatgtttgacataggaaactggaaaattaaagttttaaaaggtcttataaaaatagaaaaatgactgtatttttccaaaaaatcattaatttgcttgataatttcgtaaatttatcagtatttttatgaattttaatcaatttttttgattgattattagatgcaaatcaacggcagaaaattgaaaaattttgaaatttaaaaattctgttttttatattttatgttttacattcatttaataaaatatttttaataataattttagtcacctgttttggaaaaactctttaatttacgttatttaattttaattctaaattttttcataaaa

SEQ ID NO: 82923 - DNA, 1709 bp, Heterodera glycines
atgcattccaatcactgggactcattctcctgcatttcaatcactgggactcaaccctccagcagttcaatcactgggactcaatccaccagcattccagtcactgggattctgttctcctgcattccaatcactgggactcaattctcctgcatttcaatcactgggactcaaccctccagcatttcaatcactggtactcaattctcttgcatttcaatcactgggactcaacacaccagcatttcaatcaccgggactcaattctccaggacttcaatcaatgggactcagtttttatgcattccaatcactgggactcattctcctgcatttcaatcactgggactcaacacaccagcatttcaatcaccgggactcaattctccaggacttcaatcactgggactctactctattctcgtgcatttcaatcactgggactcaacacaccagcatttcaatcaccgggactcaattctccaggacttcaatcactgggactctactctattctcctgcgtttcaatcactgggactcagtttttatgcattcaaatcactgggactcattctcctgcatttcaatcactgggactcaaccctccagcatttcaatcactgggactcaatccaccagcattccagtcactgggactcaacacaccagcatttcaatcaccgggactcaattctccaggacttcaatcactgggactctattctcctgcgtttcaatcacccggactcagtttttatgcattccaatcaccgggactcattctcctgcatttcaatcactgggactcaaccctccagcatttcaatcactgggactcaattctcttgcatttcaatcaccgggactcaattctccaggacttcaatcactgggactcaattctcttgcattccaatcactgggacctaacctcacctggtccttcggcatcgcaatcatcgagactcaattctgcgatattccaatcaccgggactcaattctgcgacattccaataactgggactcaactaaccagcattccaatcactgggactcaattctccatcattcctattcccgggactcaatcccaccagcattccaatcactgggactcaatccttcacttttcacggattcttcggcatcgtaataaccgaggactcagttctccgacattccaatcactgggactcaattctccgccattccaatcaccgaggattcaatccttcactattccaaacaatgaactcaattttacggattcatcggcatgtcaatcacgggacttaattcagacctgttcagcataattttggaattttaaaaacgtatttctattatgaaatacaatttgcgtagaaaatccttttcattataaatacttgttctcttacatttaaatccatccaattaaaaccgtatccattaaaagaggcataattgacatccgctttaattacaaaaacaaaaaaactccatttcaaggtcaaacaatttctcgaaccaaaactttttcaatacaatatcaaaactaagtgtaagatcatttccattgactttgcatatacaaaaacaattctttttctttacaaaagtgttaagagcattcatttccaaacgctttttgataataacaaaacaaaaactttttctcttaagaaatgcaatagaaagcattcattgcgatttcattatcatta

SEQ ID NO: 82924 - DNA, 88 bp, Heterodera glycines
ggccgagccagtcgattttatcaaacataatcttacaatacaatcgtactacctagcggggaatgcgccgaaggcgctgaccccgcta

SEQ ID NO: 82925 - DNA, 1056 bp, Heterodera glycines
atgggatttcagagaaaatttaaaatgccggatacaacaaatttccggacatgtgattctcctttagaaaaataaaataattttttgtcagtagagtcggtgcggctagagacttccccgtcctccaaggtgccgatcgcgacttcaccggttccgtcaactgccgttacgcggttatgcacaacattcccggcgacaatcttctataattatcaacatcaatggtcctattatacctcttggaatcgtgaacacttggggaggggtctatctcatccagtctttgtacagtggccttcaaccccccaacaattttttgcgccaaaggtactcgctcggccgcttcgcggcctcgtactggggccttcggcccccccacaattttctgcgccaatccaccatcatttaatcgctgggactcaacccaccaacattccaatcgccaacacttcaacgggactcaatccaccagcatttcaatcactgggactcaacccaccaacattccaattactgggactcaattctcctgcattccaatcactgggactcaattctcctgcatttcaatcactgggactcactcccccaacattccaatcaacgggactcaaaccaccagcatttcaatcgccaacacttcaacgggactcaatccaccagcatttcaatcgccaacacttcaacgggactcaatccaccagcatttcaatcactgggactcaacccaccaacattccaattactgggactcaattctcctgcattccaatcactgggactcaattctcctgcatttcaatcactgggactcaacccaccaacattccaatcaacgggactcaatccaccagcatttcaatcgccaacacttcaacgggactcaatccaccagcatttcaatcactgggactcaatccaccagcattccaattactgggactcaattctcctgcatttcaatcactgggactcaacccaccagcattccaatcaacgggactcaatccaccagcatttcaatcactgggactcaacctcagcaaatttctttag

SEQ ID NO: 82926 - DNA, 466 bp, Heterodera glycines
gttgagtcccagtgattgaaatgctggtggattgagtcccgttgattggaatgctggtgggttgagtcccagtgattgaaatgcaggagaattgagtcccagtaattggaatgctggtggattgagtcccagtgattgaaatgctggtggattgagtcccgttgaagtgttggcgattgaaatgctggtggattgagtcccgttgattggaatgttggtgggttgagtcccagtgattgaaatgcaggagaattgagtcccagtgattggaatgcaggagaattgagtcccagtaattggaatgttggtgggttgagtcccagtgattgaaatgctggtggattgagtcccgttgaagtgttggcgattgaaatgctggtggattgagtcccgttgaagtgttggcgattgaaatgctggtggtttgagtcccgttgattggaatgttgggggagtgagtcccagt

SEQ ID NO: 82927 - DNA, 1147 bp, Heterodera glycines
gacttcaatcactgggactctattctcctgcgtttcaatcacctggactcagtttttatgcattccaatcactgggactcattctcctgcatttcaatcactgggactcaaccctccagcagttcaatcactgggactcaatccaccagcattccagtcactgggattctgttctcctgcattccaatcactgggactcaattctcctgcatttcaatcactgggactcaaccctccagcatttcaatcactggtactcaattctcttgcatttcaatcactgggactcaacacaccagcatttcaatcaccgggactcaattctccaggacttcaatcaatgggattcagtttttatgcattccaatcactgggactcattctcctgcatttcaatcactgggactcaaccctccagcatttcaatcactggtactcaattctcttgcatttcaatcactgggactcaacacaccagcatttcaatcaccgggactcaaccctccagcatttcaatcactggtactcaattctcgtgcatttcaatcactgggactcaacacaccagcatttcaatcaccgggactcaattctccaggacttcaatcactgggactctactctattctcctgcgtttcaatcactgggactcagtttttatgcattcaaatcactgggactcattctcctgcatttcaatcactgggactcaaccctccagcatttcaatcactgggactcaatccaccagcattccagtcactgggactcaacacaccagcatttcaatcaccgggactcaattctccaggacttcaatcactgggactctattctcctgcgtttcaatcacccggactcagtttttattcattccaatcaccgggactcattctcctgcatttcaatcactgggactcaaccctccagcatttcaatcactgggactcaattctcttgcatttcaatcaccgggactcaattctccaggacttcaatcactgggactcaattctcttgcattccaatcactgggacctaacctcacctggtccttcggcatcgcaatcatcgagactcaattctgcgatattccaatcaccgggactcaattctgcgacattccaaaaaatgggactcaactaa

SEQ ID NO: 82928 - DNA, 91 bp, Heterodera glycines
actagcggggtcagcgccttcggcgcattccccgcttaggtagtacgattgtattgtaagattatgtttgataaaatcgactggctcggcc

SEQ ID NO: 82929 - DNA, 1045 bp, Heterodera glycines
atgggccttctcccttctaatttaagcatttctccactttgcaactcgttctccaattgccacggcttcgctccgtttccattggctttattcgtgaaattagcagcaaaaagtcagctgcgctatgtgcccacattctgtcaatgtttcgagaattggtttcccgaggagaattggaagtccgtgcgttgtcgccgctgtcattttaaccttttcttttagtatttgcaaatttcgcgcgaatttcccttgccaatgtcatttgttgctgaattgtgtcgaaggaattccgtttgtctcgttttgttcatttttttattgttaaccaaaataaacaattttagaaaatctccaaaatttcgtgtcgaattagcagggaatacactcaaatcgatctgggtgagtttaacactgttttgagcaaattagcagacagcacacatcggttgatcacattgaatttctttggcttttgcccggctttaattgagcgaaataatctcaaagttcgtttggtcaaatttcgcgaggacattgaccagtcgttgcttcatcacttttgcgcacattctatgaattcatttccgtatgtttagtattataaatttccggagcaggggggggggtcaggcggtgctctcgggaaaaaacttgaatgtagtttgttaacagattgtccaaaaattacaaaatcaagttttctctttttccccgatggaatatttgagttttagatcaatttggaatatggacgaatgaaaaacgaagaagaaaatttaattttattctatttgttaatatttcttagaattaaataatgaaaggagcctggattaaaaaaattccactacagtttaggtcctatttttagttgcattccaaaaaaattatcttttaagaatttgcattttctggacaaatccgggaaggaaattttaggtcaaaaaaccagcttctttttgcacgttaaatctccttcaaatttatgtactttttcaattcattttttacttttgttatatgtatttttcaaaggaataattaa

SEQ ID NO: 82930 - DNA, 362 bp, Heterodera glycines
tccaactgtcttccgcttcatcaacacaatttgatatgagataagtcaatcgatgcagacattgcacgatgcgtcgctggtgaagtccctcctcaaaaaacgcgcaaatatcgtgccgtcgatgcgagaattctcgactcttacagggttacaataccatcaacaacatcaaccctgcttaccaaaatgatcaaaattaccatacaatgttaatcctgataatatcttcaattttctcgttgaatttctcaaaaattatgaaatacgcccgtagtcattcttcaatgttttgttattttttcgttgaaaacacactgataaatatgttatggtgttaattttaaacatttttcgaaaaaaaa

SEQ ID NO: 82931 - DNA, 1641 bp, Heterodera glycines
aacctatgaccacgtgactgtgaagccgggaccgcacattaatgttgtaattggcccgaacggaacaggtcggaagaggaaaagcccccgacttttcctacattttcacttggatttagagactttggaattttactgaatttagtataaattctccgcaattctttgcttcttcattgcccattcattcaggcaaaagttcaatcatttgcggcatttgtttggccgtcggcggctccccgaaattgttgggccgttcggatttgatcggcgattttgtaaagcacggcaaatgcgagggaagcgtcgacctttttctgtatgtgttaaattcattattacttttactatctgacagacggtcgaattagatttatttatttttagctttttcttttgggaaattccatgtaatttggttttaaatttcccccttttttcatcaattcaatatatttatctgttgtttttcattctgcaattgtgtttagtgcatcttccgttggtttccaataagtgagcattttcagttgggacagtcgacgaagacgcgaacgctgtttcagcgtgcacataaaattgccaaactcggcctccttttttgtggacaatcagtcgatgaagctgacccaattgcgcgagctggtcaaggagtacaacatccaggtgacttcgtttttttttgagtgttccaatttttagaaatatcaaaacgacaaaaaaagtcggacttgggtaaaaagtgcgatactaaaaaaaaagtaaaatataaaacgataatttattttcattgaaatttgcttcgctcgtcgtttaattttgctccttttgtcaggtggacaatccttgcacctttttggctcaggacaaagtgaagagttttgcagaacaaggcccgcaaatactgctgaagaacactgagaaggttcaataaaatggaatttaggaatttctgttcaattagaaaaatataaaaacgctcatttttcaatggaaatcaatttttgtgactcggaatttcgtttctttatttttgggttttaaaatttctttgcttaattcccattttaattgtttaggctgggcccactgaactggtccaacttcacgaatcgctgcttgaaaagtccgaagagggcaatgaattgcaggcacaatttgaccggggcaaaaaacgcatggaccaattggagttggagctgaagacgaagaaggcccgggtggacagctacaaagaatggtccaatgtctgttttaaatattaccgacgaaaaaataggaattttttgggccctaaaacaaaattaataaatctaaattcctccccctccgacagaattttccgtcggatttttttccaccccattaattttttaacccatttagcgacacaaagtgatcgttctgttacggctcaagaaagcattattggttggaacatttattacttttttcgttagaaaacttagaaaattttaggaatacgaaagcgaattggacgtgcagcgacagcaactggtcgaattggacgaaatcagcacgcagctgaaaaatgtggagaaggtggagaaaaagcgcaaaaaagcggtggaaaacattgggagaacagccgctgaactcactgaagagttggaacaaatg

SEQ ID NO: 82932 - DNA, 1192 bp, Heterodera glycines
atgtgctttttactttttgctcgtcaaggaaatatggcgtcaaaagcttgtccaaacaaaatcatcgcaaaagtgaggaaaaaagaagggacagaggaaaagcctttctaacaaatagggattaagccatcaaaatgattaaatgagtcattgaaaaataaacattaaataaacactttcatcaatttgtccatcagaatgaagcgacatgccactcgaatggttttcgttgtcattctcaccttcggcgcttgttggctcccgcagaatttgcgtttctttttgcaaggccttaattacccggaggcgagcttttgggagcgcgacgagaaaacgtaaagccaaatttgaccgggggcgggggaaattcgtacaaagtggcattttggggggttatccagctgccgttcagcagcaattcccaatgtttcagcctcctcttcgtccagtccattgctcaaacgttggcctacgctaacagttgtgtcaatcccatcctttacggtacggtaccatccctttttttaccgtataatttgtcattccttccccattcacaggtttactgtcagaacgcttccgcatggcattccgtcgcactttgggccgtttctgctgctgtgaagcgattcctctttccgcgtctctcccgcaacaattgatctccgggattcaaacgccaaacggcgaagggccaaaaaggcgatcagcatcggggattacggtgtacagctggcgggaatacggtaaaccgcaccactcggaacacattgctgggacgacgaaggcgaaactcagtggcagaggcagtgacacagtggtgacagagtggaggagcacagcaacgagacggtaggaagtgggacgggtgggctacggtagatactgtaacattagcaaaagcgaattgtaaattcaattttgtagtgcatttaggtcgaccatctgtcaccctttggatgctcaaattcattttgatcagcagagcgattacgttcaacaacaaaatgccaacaacagtgatttgggagacaacaaaaatggcaatgccaatgccattctcgtgatgagaatgccaaggacgagaagccaacaacggagggtttggctggagaccctcggcgaagagaataaaatgagcggggaagaggaagaagaggaggaggaagaagaggacgtcattctgttgtga

SEQ ID NO: 82933 - DNA, 421 bp, Heterodera glycines
atgttttatcgacgaatattcgctttattcttgtgcattttcgtcattctcttcacattacaagtaaacaaactatttcattttttaatttaaaaaagaattaagtttatcaattgaatgatttttgagtaggaattaaaattcacaatttattaaatttaattttacattttttgccagtttctccccgtcatcgatggcatgcaatttgatgtggtccaatgtggccattcaaaacggtgcgaattcggcggttgtgcaccaggcaaagcgcaaaacgcggcatcatgtgcctatttgttctcaatggagccggaggggccggacagtgttcgaatgggtcagacaaaaatcaaaaattcgtacaaagaaaatttttcgttaacctgatttttatacaaaaaaaaagcgggagttaaaa

SEQ ID NO: 82934 - DNA, 569 bp, Heterodera glycines
  unsure (1)..(569): unsure at all n locations
atgagctcggatttgcagtcaacagcagaacanatgatgggacaattcgacngcgcaatggcacttatgcatntgatagtgatgggaagatttggattaacggaaaagaaaaaagaacaaatgccaaatattcctacggtgttggcgataccgtaggaatcggcgtcaattctgttattcggcagatcgttttcaccaaaaatggaaaacaattgggttaacaaacaaattattaaatgttttttaaaattataatttatttaattgcctaatttatgcagatttaactcctttctcttttccacagattcctccggtcttttcgtttcgccattttttgctgacgattcttttcatccattcgtttctttgcgctcatttggtgacaaaattgaggcaaatttcggggccaattttaaatttgatttggatgctctctaaatggtgaaatattcacaaaatctgatcacgtttatagatcactctcatttgtggtttttgttaattttccattgacttttataaatttttaagaaaacgattgaattttatttattgaacataataaa

SEQ ID NO: 82935 - DNA, 294 bp, Heterodera glycines
atgctctatttgaatgcccactttctaatcactgttgtacctcttctaatcactcttgtacctcttctaatctctgttgtacctcttctaatctctgttgtacctcttctaatcactgttgaacctcttctaatcactcttctaatctctgttgtacctcttctaatcactgttgaacctcttctaatcactcttctaatctctgttgtacctattctaatcactgttgaacctcttctaatcactcttctaatctctgtaggacctcttctaatcactgtgaacctcttctaa

SEQ ID NO: 82936 - DNA, 215 bp, Heterodera glycines
ttggcttataccgaatggagcgaacgttctttggaggcgattattcgtcatgcgcaagacttcgtgatgttcctcagtaaaaaccatgccgatttctacgatgttgaaaaggtgaaaattcagggaaaacgggaagcgaaacacaattgcatttccaggattatatgttggcgccggctgaatatcataagcgtgtttggggcaaccattcttga

SEQ ID NO: 82937 - DNA, 724 bp, Heterodera glycines
atgccgtcgcgaaatttgtcagcaaagaaaaagcaacagaattcgttagttcgggatgagtcgacctcttcacccagcagaacgcccaaatcggtgtcgaaagcgagtaacagcagcagtagccaacagaaacttcagaagaagcagaattcatcagaactgtccacgattagcagtggaagtgtcgagtacgacttcttttgttttttgagaaaatacagctaatggttagaaaggatctcagctcttcaatgtctaccaatccgcacggacatccgacggacaaaaaatggaccattggggagaaagtgttatgccgttatctgaactcggagcacatttattatgaggctaaagtgatgtttctgaaagacttgtctggcggagatgtcggctatggcattcattatccggtcattttaatttaattcattttatcgcattgaagattttagggttggagcaaccgtcacgacgaagttgtaccacaacatgaagcactaattcgcttcaagaattactccgatgaagaggcaaccaaggcaaaggttatttttcgagtattttacgatgagtgttaagaaaaacaaattttaggaagacgtgaaaagggctcagcagatgctaaatgccaaaaaaagaaagcaatcggaactgaagaaccgctcgcaagcgcatgatgaaagtagtcgctccagcacaccaggaagcgccgacaacgcat

SEQ ID NO: 82938 - DNA, 676 bp, Heterodera glycines
atgtcggctacaaagtatcccgaccctctctgggttttcatgcctcctcccccaaccgtaaattgtcattatcttttattaaccaatttttccctattttaggcttttgccaatgcttcatctccagtcaatctcattgccatcattcgctttccgccgatttttggtttctacgttgtgccatttgatctgatcaacgaattgacccgggagcaattgacgatgaagaagatgaacgatatcaaccgtgttcttctgatccgttgtccgattgtgcgcgacgaaagcaaatgggccaaatgggtggaggaagcgattggatggaactttatggaccagtggaatcggatcgacatttgagatgggttagtgaatgaataatggttattcaaatacccaaatttattgcttttcgatttttaggctcttgacgcaatgatcgatccaagtgatcagaagcagaaatgattgaacgatttgttgagaaatgatcatctatttaattgatgtggagttggataatgaatttgagcccatctgatatatataaaattgttgttttgttgcgatgatcactaattgtattatatgtatatatgcccttaggataaattgactgaaattccaggcgcattcttttgacctaatgataaagtcggtggtcactttccctcca

SEQ ID NO: 82939 - DNA, 3450 bp, Heterodera glycines
atgagaaccaaaaatctgccttccaagctttccaatcccgaagttttaacaagtgatgagagttcagcaagttttgaaagccctgcggggaccatttatgaatcattcgaggcgttgagcattgatagctcaaaagtagcttcaagccctgaggggtacactaatgttggggctgaaatcgttattgaagagactgaatccaatgaaaaccctgaggggtccggatatgatgaagtgagaaacgagggtagtagcgtcacgtttaaagcgatggaagtggcccttgaccaggtcgatgcagagggttttgcgaataatggctttgatgatgaggagcctgaagcatgtcctccggctaaagatgtgagcaaatcatcgcttctttatttggtttcgcaagccggagatggctacgtaattgcttgcaagaagtcgcctaagtcgaagccaaattggccattcttcatgaacatcgaagacaagctgattgagtcggcccctggctttcagcgtaaacttgaagttggtgattttgtggcggtttcatcatttgagtggaaccagaagctgcgatatttggctgaacatcgccaagatgccacacagtcctgcaaattttggttcaacgaaaacacgcaactgttgccaaagcaggctgatgccactgacgtggttcaactcatgtacatgaacatcggacgcaagcagatcaccggggtcgtttactggataaagaggaagatccaaagcgttccatccagcttcgttcacgcaaacatcgcgtgctgtggtctagcggtttcggcacgcataaatcggcgtcatcttgatggcatcaatccggaagacctcaagctgggctcacttgtgacggtggttgttgccaacattccacaggactcacttgtatcaatgggatacattctgcctgatgcttcaccgtacaaactgggaacggaaagaagagccgaaacacctgaatttttcggtgcagttgcgtgcattcgtcctcatctgttggagtggccaaatctgaatgcaaacatgacgcccaaggtttatccatgctccgcggatactaaacatcatgttgtggcgatggagcatgttgttggagcagctctccagattgagatggagcgagaggttgacatgatgattgaagcacgctttgaaggaagggctcggaagttcgatggtgctgattgtctgattgtctttggttcgagatcgaagaaagaagtgaatgagttggccaaggtctgggagccggagtcccaagtgaaggtcttcaaagaattgggtgagaagcattttgctctgggagtggtcaaggatgttgaggtgctccacgcagaatacgaaaagttggaactccacatcgtcatcttcttgaacaacatccaggaaaggaagaatgtcgacatcgcaagaaaagtggatgagttcatccagggtggcagtgttgtcatacacccggtccctgccactgcggttgaagacagactgttctgcttccgctgcaacgtgccttcgataattgctgatgaagactctccaaggggaaggataatggcagtcctactgggccgtccagccatggagggcattcgtatggagaaggaaagcgttgatgactcaacggattcgtggatggaagaagagggaccactccaccctgcaattcttgctctaaactcaagacagagagtgactgcacgcctaatgttgggaggaggtctggtgcaacaacaggcgccgccaggcaccggcaaaaccaaagtcgctgcggcgatcattaaggcaatgatggactccaatcccgggttccggattgtggtgatggcttgtgccaacattccagtcgcaaagctggtacaagaagcggaaggaacgtgtgctgcaaatgatttggatggagcgcgagcaattgccttattttccggttttgccagatgcaaatacacggatcaaataaaagatgttcaacggcatacgctgccgaacaaagtaaactctgaggagttcgtcaagcagttatcgcccaatgtacagaagcaagtgaaggagtaccttgctcattgtgagaagaacccgcgcttggcgcctgagagagcgattggaaaagtattcaactcatgtatggcaccgaaaatagtcttctcaacagctgccatggctgcgaatttacttcatggtgaaggaaacatcactgatgcagacgttttgctctttgatgaaagcactcaagctcagtgggcagtggtggttcacttggttgcgcggatgcccaagctcaaggcattgcttttgacgggcgatcgtcatcagctcggagtgcatctgcaagaactgcctgacatcttccactcaggatatggattggaaagcgtcatccttcaagcagaggcttcgatagggacgaactatacattcctcacaaagatgtacagaagccatccatttttggcaaagctcatcagctatgcctcatatgaattgcacaatgagcaactcattccagcaagaagcgctgaagaacgctcactcatcacgggctcagatttccttctgccggttcaagaatgtcctgtgggactaattaatgctttctcgtcatttcgtgtggacccaaaaagcgattcgctcacagatgaccatcaaacagaagtggcatcgttcttggtacaagcacttttggaacattttggcaacgctttttcgtccagaattatcgttctgtgtatgtacacgtaccaaacttcggaaattgaacgaaagctgaagcactgcggtgttcgtgcactcacagttgatgcctatcaggcacaggagtgcgatgtcatcataatagtgacaacaagatcaaaatactccgaggtgggatccggaaggacggacaacatgcacttctttgaagacgatcaacgggctactgttgctctttcaagagctcgccacgctgtcttcatcattggagacttggtctcaataagtgcaggacaagtgtggaaacgtttcatcgaaatggcgataacaagaacaagcgtagtccgagccgagtatgttttggcacttttgggacgaacactcgtgaggtcgtcgacatgcctatttgattcggccaaaagagaatcggtggaggatgaaggctttcttgaaagttgggcattgaagcatgggttgcgcctggaccgaacgaattcctttggacaacaacaatcacagcagccgcgagctccctcattccaattccagaatcgccactttcctgcactacagacgacagggccctcagatcaagccggtccatctggcagcggtggtcaacaaagaggtgcgcctactttggcaccacagtatggaagaggtcaaggaagacgtggcccggacaaccagtggatgcactacggcggaaacccgaaacgacagaagggtggcagacgctga

SEQ ID NO: 82940 - DNA, 487 bp, Heterodera glycines
ctaacttgtcatattgtacttttgaccgtaactgagcttctttaatgaccgccgcagcggattcccaagcttttctaagagacttaactaatttctgcttgacattgtcaacttcactggtgttttcgggttcggtgttgggattcagaatttgctcaatgcaaaatatcgggtctcgcccaaagaccaaaaagaagggggtctcctttgtggaagagtgaattgatgtgttatagcagaagttggcacattcaagaaattcatcaaaatctggttcttcacttgaaatatatttcgcaagtatattgtgaaatgtcctaaaagatcgctcaactactgcattgccttggctccaatggggaatagcataacatttattaatatagagaagcgaacagaaggacttaaaaaaatcagaggtaaatgccgtggcattatcagttaaaagactcgtacagcctccaaactttaaatagcagtgtttaaa

SEQ ID NO: 82941 - DNA, 8299 bp, Heterodera glycines
atgtttcctttctctgatggggatccacctaatcgaagcgctgcggcgtcaaacaatgcactgacagaccctgaggggctctccaatgatttgcctgagttatcagtagttgataaattaatgtttgctggaaagattttaagcacaccagcacgtttgtctgatgtggacaagctccatacggacttagttcggactgaggatggtgtcaatcgcatgacacgtcaccttaacaggacgataaatcaaaccaatagggacttgactgaactcaaggatgatactcaaaccctgataactcaagtaaatactctcgcaaatagttatggtacagttcaagtgttgcaaaaccaaaatcagtcaccattagtcaacaaccctccggtcttaaattgggcaactccctctccactcaggaatccgaacaatagctttggcaatgctaatacttcggtgattgaagccatacatagtgaggaagaggatgaggaatttgaattaaatccttcgggattccatcatgttaacatgcttttcgctgaaagcagtccctctttcacgatcttctctggaaattctccattagaatttgatcgatgggcaagaaagttcatggatctgcttgactgcaatggcagaaagtgggatgattctgaaaaggtggcacgcctcaaggcatgccttgatggtgaaccaagacgaatctttgataatttaatgcctgcccacaaagcaacttcttcggaagccattcaaagaatcaaggaaaaccttgacactccacaaaataaagaactcacctatcaggcactaagcatgtgtaaacaaagggaaggagaatctgtagatgagtttagtgcacgactgattcctctaattgaggccaccacggcagaccttacaactaatgctagtgaggaggtactctgtcgagcatttttggaaaaattgaatccaaatctcaaatttctcactcgaaccctgagtgggcccgtcagaagggatttccaaatattgagaatgaatgcacgggaagcagaaatgatgcatagagagattcctaaatctattccagcacctcttttcccaatttcggaacaacaaaatccgagattcaacaacaccgagccgccgaaccacccggaaggcaactttagaacatgggctcccacaggctctaacagagagcctataagtcccagacagaggaaccggaacaattgggataacaatgcccaagcctcaagaggctcttttaacagatcaaataatcatcctcaaaatgacagaagatggaacaatcgcacttccagaaatgatagacgatggaataatcaaacccctcaaaatgaccgacgctggaatgctcggccagtttgcaactactgtgggaaggttggtcacctcgcgtttaaatgttttaaacgtcgtgaggaatttacccaagcatccaagaatttgaatttcatcagagcaattgatgaacaaaacagattgataaacgatctttcaactaaagtcaatagtttaacttttagaaacgaccaatccgctgaggcggcctctcaaaatataaacactattcaaaaactcaccaaatctagtacagacaaaagtccatctatgatgaatgatactctcaaagcaccctccaaaataagtaattgggaaacgagtaaaatggttcaaccgaaattttttcctgtgctaatgggtttgactcttatttcatctctctcttcgactttagttaaagatttcaatacaatcccagctagtccaatgatttgtcaaactcgcgttcaaccaatgacatggtctcttcccaaatttccacgatgccccaggatgtcaattgacacaagcaaaccactaaccaaacaaagacgcaccatctattttcccaattcacttgaattttctaccaaagcctgggcctgtcgcagaattatcaaaagtattcagaaatatactacaatcagtggtgtatctgtagaacaacatcttgactctgaacaaatagtgatgagtcatgatgaatgtctacgaatggcaaacaataagcactgcagcttaggatatctcaaaaatgattcagggttgtggcacacagataggaaaattgaccagacacctcgtccttggttattaggctctttttcctggaagaaagtccagagtgagaattgctttgcctttgaaactgaagtatattcgcacattggtgctacttcaattataactcctgcgggaaccgctcaagcttgtccatatgagaaaggaaactgtgtcctctttgacaaaactgtcttagtctgggtccctcaaaaggacaaaatgtgcaaatacagtcccatcggaatcatggatggacataatcttggaaatgtttggctttccactttaggagatttaggtttaaccagctcgattgtcagaaatatttctgattgcggtcgaaatctcactgtttctgaccaagggccagcttttacaatcaactcacaaaccccacgtcataaaaggggtatttttggattagattcagaaggtgtagtcacctcctctcagttagcatcacaactttcttatttacacactaacatatctcgttctgttaacattgcttttgctcaagcatttaactctttttgtgatttaatgcttgacacacaacgttgggtacagtcatcctatctcaatgatcccacaagccttacgaggtttattcaccaaaataatttcttaattgccaagcgagttggagtctctcttctgagaacatggccatgtgtccctctcagtcagtctgactttgaatttcgtccaacccataccaattcatcctgttttgaatttcttccaataatagtcaaattaaatggtaaggaacatattgctttcttgaaccctacgtatttgacagtctctcttcattctaaaacagctccttgcgaggaccagagaaatattttaattcaaatggctgatcgcacaattgaagttgaccaagtagacggaacaatcaacaatgttcatgtccatgaaatcagggaggttgagcttgactttggtaagccaacgcgcattccaaagctctcaccacatgccttccatcatctggtcattcttaatcttaccgatctcgccacacatgcctttgcttcaaacttggtacaagtaagtcaattcacataccgagctgataaaactcattcctctgaaattaaaactacgctctctgatgaatggtcagcactagaagaatctatagttcaaaaagctatgggaaattattccctggcatggcaaattggtatcaccatttgtcttttattgtgcatggtagatctcctgacacgccttttctttgcatacattggtatcagacttcaagatcccgtagagacattaggtcgaccaatgatcaccactatagctaatctttttggcaggaagaaacaaaatctagactgcgataacaagaaccatcctaattcgccaaccaaaaccattggtcacattacttcctcacatcttcgaagcgttgctgcaacgcccataaatgaggctacaggtcagtccttttttcgagatacgctgaatggtaactcatgtaactttattgaggcataccctcaatcatcaaactccaaggagttcaaaaaaatatggtttacaaaagaaactaatttctctgcttggttgaataattatctctcaaaaccagttaatcacgaaattcctctcctacttccgcggaactcaggcgaattagcacaattcctcgatgttgcaacacactttggaaaagaaattccaaatttcaattcaaaaattggtcccattagcagaatctcgggagatgaacatcttaaatgggacaagcaacgagtcgctgcttatcaggtaattttggggcatatacacatgctgattcatggtagaacccaaaacattccacaacaacgatttcataggcctcgctttgtaataagagagttaccaatgttcttggtattgtgcatgatattgcttccagcaacccttgctgccccaattacctcaaaaggtcctcctccgaacttaaaaaactcaacctttgagtcagcaaattttatatcagcattaccaaccattgtagccataattatattgagtgccttagtgtattcaaggaatcgttcgccaatcagtgctattatacgtgcaaaaattaatggtttagaaattagggcactagctgatacgggagcaacgataagtgtagctcctctctccttagcaaagaagataggatgcgagctttatgagtcaaaagtggaagctattagcgtctcctcacatgtaataagcatatgtgtcgtgggtgaagtaataataaaacttggtgatatatctctgcggagttcaattaattttatacctgatgaccaagcaggagccatgaaaaattatgaaataatcataggatgtgatatctttgttaacctgccaccaataacatttgacttcacaaaaaaggaagttatgataggtaagtcaaaactaaacatggaaacaagtcatagtaccctctcaaacctaaaagttcgagctctagagcactaccgaattcctcctggtactcaaatactggccaaagccaggatagatactatcttgccaatagacaaggacattcttgtagaaaatttggacccaagattgtctgatgaacacctaagcacaccagccacattttcaaggcctaaggacaatttattgaacattgtaatttgcaatccaaccaattttcctaaaaatataacaaaaaaaatatgtgcattgcgactgcatgtgaattaaacaaatctgatcatcctaatctcgtaatgaaatgcacctcgggtgagatcaatctcctgagggagtcacaaaaaataattcacgcagatccgtcatttaaagttgatttttcaaaatcatcagtctcaggtgaaaatcttaacaaattaaaggaattgtgtgaagaattccaagatatttttagcaaaagtcaatatgacttaggctcttgcactgcaggagagcatgatatagtaaccacgtcggatactcctgtgtcgtcgaagccacaccgaacaccattcaaatatcgtgatgaactccaaaaacacattgatcaacttttggcatccggagtcatggttgagtcggacactccgtgggtctcaaatatcgtcctagtgcagaagaaggacggtgggttaagaccatgtatcgacttccgtaaacttaacgaagtgactgttccggaccattatccacttcctagattggaaacaattatggaacgaataggtaattgccgttactattcaagtttggacctgtcaagtggatacctccaaataaggctaacagaaagggcttccagaaaatgtggcttgattactgaaaataaaattttccagatggttaatcttccttttggtctaagaaatgcaaccagtgcgtttgccagatgcatggcgcatgtcctcacaggtttggacgattgtgtaatcgcatatgttgatgatatactggtatacaccagggatgataattttgatgagcatctcaatgctttgagaagtgtttttgaaagatttaggagattcaacttaaaattaagccctaagaaatgcacattcgctgcggcgaccatgaattttctcggatacttagtcaatgctgttggctacactcctagtcttagcaaagtggaaataattaaaaatcttccagacccaaaaaccattcgagaagtgaaacacgtagtaggaatggcttcattctttcgtaaacatgtccctaatttttctacaatcgtagaaccattgaccagactaactaaaaaggagagcaatttcgagtggggtacagaacaggctgcggccttcaatgaagtaaaaagaattttgagtgagaaaccaatattggtgtttcccaattatgataaaccctttcacatcttcacagatgcctctaatgttggccaaggtggcgcactcatgcagtggaatgagttggcggaggcatatgaagttattgcttattgcagcagaacgctgtcagcgtctgaacgcaaatggcctgctgtacaagcggaattgggagcaataatttttgctctgcgaaatttcaaaccctatatttttctgacagaaattgaattacattgtgatcataaacccctcgccttcctacttaaaaaggcagaagcgcatccacaccttgcgcgttggttaattgagttacagaattacaatattaaaataattcatgtagcggggaagcagaatcttttagctgacggtttgtcacggtacccacatgaaagaacccaagagattgccattagagatttggctgaattagaagacatagcaaattttcccgtctgtcttgcgctgaatatgaagccaagaatggttcatgagcattttcttttaaccatcactgctcgtgatatagaaggaaaaacattcgccattgatgttcggaaagaacaaaatgacgattctgaggttaggaaattaattgaatttgtaaattttggttcattccctgaggggaccacagaagttgaaaaggaagatattgcatcaagagcggaaaatttgagtctttcctcaggcatattataccaacacttaccagatcaaaatgctcgaatgtacattccgctttctcttcgaccactaatttttgaagcttttcatacttcacaaataaatggtggtcacatgaatatcaaaaagacattagggaaatgtagaaagttttattggccgattatgcaccgtgatataaccaattggaccagacaatgcatcacatgtcaactaagacattcacccaatccttcatatcgtgcataaatgcaaatgccaccaaaaaatactctcttcgctcaaattgcacttgatttggcaggtcctcttcccctcacgcagaaaggtaacaaacatatccttaacataatttgcacatttaccaaatatgtaatctctgtacctgtccctgatgctaaatctcaaacaatagcactagcattttttaaacactgctatttaaagtttggaggctgtacgagtcttttaactgataatgccacggcatttacctctgatttttttaagtccttctgttcgcttctctatattaataaatgttatgctattccccattggagccaaggcaatgcagtagttgagcgatcttttaggacatttcacaatatacttgcgaaatatatttcaagtgaagaaccagattttgatgaatttcttgaatgtgccaacttctgctataacacatcaattcactcttccacaaaggagacccccttctttttggtctttgggcgagacccgatattttgcattgagcaaattctgaatcccaacaccgaacccgaaaacaccagtgaagttgacaatgtcaagcagaaattagttaagtctcttagaaaagcttgggaatccgctgcggcggtcattaaagaagctcagttacggtcaaaagtacaatatgacaagttagtacgaaatcaaaccgttcaaataggagatagggtcctattacgcaattacgcaggaaaagtcaaaacatccaagaaatttcaattaccctggaagggactttatcgagtcattgagattaatggtgtccttattacaattgtaagctgcacatctcctcaaacgaacccaagaattgtacacattaatcaagttaaaaagtattttgagtgctcaggacccccttgcaccacgaaaaatcttcaaaaagatgaagaacaagcactaaaggaggtagaatcaagagaacagatcaatgtacctggctattctcatgactcctatcagaaaatttctgataacacagtattaatagaaaacacacctgcactcacccctaatccctcacccccttcacagtccaataattaggtaaaagaaaaagaactaaatagaaatctttgctcaaaacataatctccgcgaaaaccctaggaaaaagaaacattttggtaacttttcggaggactaattacctgggatagccaaattcaatcattttttccattcttttaatcatactgtattttaagtacgtggaccaacctcgggaaacaacttcagcctgtagaataccaacaaaattgaacagtctttcggaatttttttttaaacaataagtcctgcgggactatttattgctttatctctcctttatcagttctgaggaacttacatatcatcgtttta

SEQ ID NO: 82942 - DNA, 672 bp, Heterodera glycines
atgacatacgccgcggcgttcgaaaattttaatcttggagagatgaggatgatttcgctacctgatggccattctttgatggcctttcaaggagcgaacgatccatttagtaacttccatttttcgccatttgttcatgaggaggaaaaatactgctgtgtggagcaggcatttgtaatgaagaaagttcgtacatacgaactcaatggagtggcggcggaagtgatgcaatttgtccacaaagacgactccacaccaaactccccgcggtggcccgacggtcacccacgtgaattaaaatggttcggacgtgaagccgaagagagagcctctcccgccactaaaagaaactggtcggagaacgcacaaagaagctccatcgctttctttgtggagctgaagtttcggcaaaatcagcacttggcagctcttctgctagcgacaaacgacatgtggattgcggaagcgtgtaaagatcgaaagtgggctgtcggatactacaaagatgatccattcttgcacaactacccaccagaaaatggggcatttgggcgaaattggatgggcaacatcctcatgagcttgaggatgcgaatgctaaatgagcagcaaagtgttgctggtccttctaggcaaattggtaaacgggaggactcaatagcttataattaa

SEQ ID NO: 82943 - DNA, 723 bp, Heterodera glycines
  unsure (1)..(723): unsure at all n locations
atggaaagagaagctgagggagtaccagctcaagtgcccgaagtggtggtgctggatgaaagcatcgaggagaacgcctgcgggcaaaatactgataatgaaaatggtgttgtggaagtgttgccactggcaaacccgagcgatccgctgggtttggccacggttgagccggtagtcccagaggaggtgaaagaaatggaagtggatgagcaaaatggggaccaagggggggatagtttcgggaatggcgggttttcaggtgatgagtcatcttctcgccacaccttcttgtcgaacaaggcaaaacgcctggaccagacaaatgcgtcaaaatgctcttcgtcatcgcaggcatgtttggaagacggggctctgatcgacgaattccaagccatcggccgggccaaagacaaattgacgaagactcgtattcaggggccataccctggcaaaaaggaagacgaaaaggcgccaaagtggtacctggtcgctcaaactgctgcaaacggcgtggttgctgcacgagttcagctggcagagcaatggcctgccctaatttgggtggacaatgacattgtccaaaagactcggccattggaagtcggcgattcggtcaaagtggtcagcgttgaatgggcacagacggcgacaggatgggcaggcgccggagattggctgatcatggtcaacaagcgcttgaatcaccnaagccgtgccaaggag

SEQ ID NO: 82944 - DNA, 5475 bp, Heterodera glycines
atgtcaccggttctactgccagccaagctcattcttcaagaagtgcaaaacatgaatccaaaatgggacgacgaattgccagcgaacatcagcaaagactggctcaaattgatggcacagtggctcgacagaggcgaagcaatcacaattgaatttccacggcacatccaagccatcgactcagtggaattccactgcttctgcgacgccagcaaatacggcatgggaattgccgtgtatcaaaaggcaaaaacgacgattatgaaggatgaatgcaacctcatctacgcaaaaagccttgtcaaaccaatcaaagtggccgcacacgacggcacaattccaaagctggaacttcaagcactgactctcggagtcaaggcagtcaaattcatccaagcgcaaatcaaatttgccgatcatcaagtcatcatgtggacagacagtcaatgctcagtcgaacgacttcgagaaaacaagcgccaagatcgatttgtgacaaatcgattacaaaaaatccgagaagcgaacttccaagtccgacacgtcagaaccgactcaaatccagcggacatggcatcaagaggagcggatcctcaatgccttcgatcatcactgctttggcgctttggccccgtttggctttcgaaagcagacaaatggccaaaatcaaacgtcatctaccggcccggagatgaattcaaagaagtggaagagccaccaatcatcgaactgacaacacctgttcatgttgaagaacagttcaaaccatcaatccacttcgaacgattttcgaattggaacaggctgaaagccaccgcagcacacgctatgcgcttcatcaaaaagcttcgcacaatcgaaaacggcacaattagtgaaccgcatcaaaacaacaaaccactgaccatggcacaactgcaacaggccgaaaattggatcttgagagaaacacagcggcttcatccaccatccaacgaccaaatccgagaattgcaactcttccgacaagaaggaatttggagatgcggtggacgactcgaggaagcaccggatctgccatacgacagtaaacacccaatctttctgccgccacacgcatggataaccaagctcatcatccggcattatgacaaacagctcaaacattgcggtccgagaatactcctgtcaacattaagagagaagttctggataccacgcggacgcaaaacagttcagcaactgctcaactccccgcaacacggatgtcttgaatgtcgtcgagaacgagtcaagccgtacacatatcctgaggcatcggatttgccaaggggaagagtcagcgaagcacgaccattcgacaaaacgggagtggactacttcggtccactcaaggtcaaacaaagcaatgacgtggtgaaaatctacgtcgcactcttcacctgcttggccatccgcgcccttcatttggaagtagccgaagactactcggctgaagcattcctccgagcctttcggagattcacggccagaagaggcataccatcacttatcatgtccgaccaaggcacaaacttcgtggcaggagcaaaagtcatcaaagaaaactggaccgacacgttaatgccggaggacatgcaacaacaaatggctcaaagcggaatccgttggattttcaacacagcccacgccccttggaaaggcggcatttgggaaagacttgtcggcatcaccaaaaacgcactacgaaggacagtcggcagaaaccttctcacattggacgagttcggcacaatgctctgtgaaattgaagcgatcatcaacaatcgaccactcacgttcgaatcggatcaggaaccgatcaaagtgttgcgaccaatcaacttcctgataccatacagcaaagcaaacaacaacttcccaatcatcaataacgacacagacgatccaacatacgagccatacccaacaaatcgcgacaaaatggtgacaacactgagccacgttaatgctcggctgaacaaattctgggaaatttggaaaagtgactaccttctttccctgcgcgaacacgaccgaccaaatgcaacgacaggactacaaaccccaaataacggcgacatcgtgatcgttgaagacgaccaaatgccgagatccttgtggaacttggcgagggttgagaaagtcctaataggaaaagatgggagagcgcgcagtgctttgataaaaatcaatggaaaattaagggatagggcaataaaccaattgtacaatttggaattgagccctgaggttccagagcaaccaattcaacaagtccactgcctcatagcatcaatcatggaagactcagtctccttagccggcagtgacgacgaagaacaacgaccacgcaacaccgaagacttcaaaatcccaaaacgccgctcagcattattacgacccatcggagaacaacaaagtccactgcaaggacaacacaaacgccgcaagcaacttcacgactccggattgctaaaattgttccatgcaatcgcggaccaacaaggaagcagcaaggccacgattcaggccatcgcagaaaacagagaagtgcgaaaagcgccgcaacatgagcaaatcgaacacgaacaacaaatggtgcagaaagcgcaaaaagaagctaaacgacaccttcgcactgagcaacacgaacgagaaatgccgcagccacaaaaagaagaacaacaacgagaagccgaacgtcaacaaatcgaaaggcaacaaaacgacgaacaacgtgccaccaatcaacaagcacacagcaaggcatggcaagaattagcacaacaatttgactatgatctgatggatcagccggatccaacagagaagcacgcggaagaaacggatcagtcaacgaaatcaaagcagcaatcagcaaaggacaaagagcttgaacgacatcgaatcggcagaaaaaagactatcgacatgcaagagaagcgacaacggtcaagagacgaatggccagaggaaaacgaaacgctactcagctacgttcaacgcatttacggaccggagaattggacgtcagcatggcaaagaggacgtgttctccgagaactccatgaactggaggaccaagggcgatggatgattcatcataaaaccgatcgacttcaactcagcgtctcacgactgtatggaggaaaacgaccattcgccgagttccgttttgtggacggcggatactactcacacatggtgccagaagatgtgatcttcctccaggccgtgccaaccgaagaaccggaaatcataacgctcgatgacacgccaacaacagaaaaaacggccaccgacaacgcaaagcagccaaagcaaccaaaaacatcggcaccaacaatcgaagagtaccgaatggccgaccccaagccgaacaacttcaacgaattcaacctgtttgagccgtgcgacgactctcacacgacctgcgcgaaaacggcaacttacggatcaatcgccggcaaccgattccaagttgaagagttcaacaactgccgcgcgaccaacttcttccaagccctaatattcaattggctcacccggaacatgaacttgccagctgatgagatttgggcagctcacgataactacacacaactcaacgccgtaacggaagaaatcgccaaaaagttccatcagcaacaagtcgtcagcaaaggacgacaaatcggacgcgaccagcacttcacagaggtcatcaatgtctggcgcaactcatgcgatcgcttcggcgagctctacaatcaaccggcacacaaacaagtcaagtttcgaccaatcataccagaaaaggagcaaccaagtgactacgaggaatggatcgagcgactcaacaaccgaacggcggaaatcctcacaaaagctcgagcaaaagtgcagcacccgaccttcttgaactacaattgcacaaccattctcatcggagacaacgtggcagaagtgtttaagccactcttctatgacgccaagtggttcacccacttcccagcagacgaattccgacttatcccgggaccaaaggtcaaacacatgatctttgcctaccaagcaactgccgacaacatggcggctcaaatcgcaccgatgctccaccgatttctgcgatcagacatcgaaatcacactgatcgtagccaaggacgacaatgcacaatggatcaacaacaagaagtacctgatcgacatcacccgcgaattaaaagcgggcttcttcgttttcaatcgagaaatgggagaagcaagacaaatcgccaaccggatccgacaagccattccggaaccaatggatttggaacaagagctgggaccatcgtcgtcaacaaacacgtcccgacaaggtccatcaacaagccgacaagtgatcagctcgctaatgctgatcagcatgttttgcctactcttcaccggcacggcacaaggactaccaagtcgacaaaagcgaattacgcaagtcaaagcatggcatggcggccatgtttcaaatttcctcaacatcttcacggagcgcgaccgacgggcatcaacgaaatacagcccttacgtccagcgatacatagacaaggttctagcactgaaccgaagtctgagccaatcaacaaatccgccgagatcgacaactccgccatggacaacgatccaacccacaacaaccacaagtcgtccacgcacaacgacaacaaccgcgactacaacgaccacacgcacaacaaattggccaaccagattaaccacacgaccaaccgcacgcacaaccacgacaacgccaatgccatggtcaatggaccaccgaacgacaacagtatcgcgggtacggcaacaacaacggccccgtccaggaatcaaattgattcgctggcccaagagcacaatcacaaccgaaaagggacgcgacgtcttctggtgctcgaatcacggcagcactctctgggaacttaaaggtccggaaaactcgccattctgccgtccaccaccggcacttactgcgcaatggacaccactgaccatcacgctgtacaccaagatccaccggccggaaccaatcgcaacggcatggcactgctccatcaaaacgacgacggaaaattattacacaaacatcgtcggcgataagttcgtcgaaatcaacaaagaatttccgttggtctctaaacgactctgccaacgaatggcacatcagcaagaatgcccactcgccaaaacggaaatgcaccacgacgacaacaatcgtatttgggcaacaaacgaccaactccaagtggatttccctggaccaatcaccggacttttcaaagggaaacaaacaagctcggcaacaaattgttttgcgcaaccagcaacactgttcgtcaaatggcacagtctccaattgctgtcgccaattcatcgagcagaccactgcaattacgcctccgagtattgccagctgcatgacaacagttcactcatctga

SEQ ID NO: 82945 - DNA, 902 bp, Heterodera glycines
atggttcaattagattcttatgatgctttaaaaaccgtaatagccaacgggtcttaccactcccagtagcccccgagagaattagagtgaacggaccgcgaaacatttttaatgtatcttatttatttgacctatttatattttcatagggaacatgtttcgcgcatttggggcatagccagaaattatcaaaaaatgatgtaccgaaatgcaaaagactgtgttttttacatctgttacacatctcgtaatgacaggggcagtaatgacaacacttaattttatgtggacagttcattttttcaatttaattttatttttggttgctatttatagaaggggtatataaagggagtgaaaggaccatttgattggtacattgtatcaaaaatgcaaaaacgataatcgtaaatataattgctctcgctaatctcggtaccggaattaaactaaactctctgacgatcaccgaatgcgaatttaagtataaccctagtaaattcaatgccgcggttatcaaatgtacaaaccccatcaaagcaacggcattattatgggaatccgggaaaattatatgtctggggacgaaaagtctgatagactgtgaaaatgcgataaaaattttcatagaaataattaagggctcggggtgtccggggcttcttacaccggacacacggttgaaaatattgtttcgacctttaaattcggacgtgaaattgaactgaacgagtttcgaaaaaatcgtcgtgcattttatgaaccggaaatattttgcggtttaaatttcaagcggggtaaaagcatgactgctttaattttctaggggctcgggggaggtggcaaaaataattgagaattggaaaagggggatcaaataattgattaaaatccaaaataaa

SEQ ID NO: 82946 - DNA, 889 bp, Heterodera glycines
atgatgagagtgatcagtgcgacgaagatgctctttctcagctgatgctacattccgaattgtttgttttgacttaacattaaatccgttacaaaatgcctttgagcgccaaacttaaaaaattgttttaggtttagacaaaggtcttcggtcggagtgcagacggattacaacgaagagtttccgccactgaaattcttgcgcgcacttggcgaagatccgaccatgatgggtcatcctccgttcttttttaacgcaagcggtgcaatttccgaagtgccttcgtctcagcaacaagcccatcaactttcaatgcccaatttgtctgcctctgtccctgcaacggccgcttccgctgcaatgaatgctgccaacgcagttgatgcgacaagctcagcgtcgtctgacgggatgctgcaactcgtcatccaaaactttcgacatatgtccgacaccgtcagaggaccttgcaaatatattcaaggcgtgccttggtaagacaaacaaatcttggttttttactcatccaatttcaggcgtataatggttatgccacgacaacatgttgtccagaaaaagggaacccaaaagtgccttggctttttccttcaatgttgtcctgacgcgtactctgagtatgcttgtgtttttttattccataaatttttcttcacagatcttggtcctgtcaagcctcggcggaattaagacttatttcccaaaaacatggggttccaaattttacacggaagactaatcatgtctacactgcgaaggagaatgattggggttattcgtgtttcatgacatgggcggtgagttgctcacttttctcttgatttatatctttatacaaatgctttacaggacattttggatgaggcgcaag

SEQ ID NO: 82947 - DNA, 760 bp, Heterodera glycines
gtcggaaacggaataacgatgcttattcgtttgaggacgatgaattgttggctgtgtcttcatattcagtgtcggaagtgttgcaaagcgcaaaacgctcaacggaaggattcaacagaataggaaaagaagaagaccaacacagcaaaacagtcagttttatggttgatttaaaaaaagttaaaaagaattcttcagccaaaacgcaaatacacgcgacaaaactcatcctccatagaaatggcaaatgcaaaaattacagagagaacaaattctggtgagtttattcataaaataaaataaaaacggaaactattttcagtaaattcaattttaactgagagaatgaaaaggaaagcgcggtcactttttgcttcatcggaaatcgcaaatgacgatcattccgtgctcacggacattccaatcccaacttgcacaatgagaagttgcagttcaaatgaaaatgaatggtaaagaaataccttttgtaattaagttcaaattcattctccagcactcccttactgcccaaattgatcatccgattcccaaaaaaagaaagttcttcaaatgatgagcaaacggcacaaaaacacgccactcataaggggaataagcggaagaagcgggacaaagacgtcgattggacggaaacgaaacaatggcatggggcacggaccaaagacaaacatcacagagagaaaggacacagaaaaggccatcacaaaaaacggaaatactcgacagaagcggaccaaag

SEQ ID NO: 82948 - DNA, 1212 bp, Heterodera glycines
atgttcttctttgcaatatttttattttttacattttttcccattgctggccaaaatttactgaaaaacgaaaacaaatacaaatttatacccagaggccaatatgaaattatcattgctaaaggacaatatggtgagaacctttctgtaacgatcgacagactttcgagactgtaaatatttgtgcctaatatttcaaaatcattgaatttttagcctgctaaatttcatattaggcaaaaactgcagaaaactattagtgactaattctgatgttgtaggatcaactgactggatctaattccttaattttataatttttcagacggtccaaagcaatttggctttttgacaaatcgagatgggaccatcgaatggaattttttggacaattttcacagaaacaaacttatcaataatcaatttaaagatttaaagtcgcaagaaaaatttacaattcttgtgcaaaaagagaatgataagcgaattattagaacattcaaaaattatgcagaaatgcaccgaacaatgaatcaaaaagaaggaacattttatgctcgcaaccaaattttcttcaacaatcttccggtcactttttctgaataaaatttcgcaaacaaaaatttcaaaaaatcattccgttaatggattattaaaatgcttaaataaaattttgttgtttcagaaagcgcccccggatttgccggtcgattggatcggaaacagcagttacacttttttgcctcctagaaaatatcgtatcattgtcgccagtggaccatatggtaagaagcaattgaaaaaagcatttcataaaaattaatggaaacattaatttttgtttatttatagatggtcaaaaacagaccgaatttttaactgataatgatggtaaaattgagcaaaatttcttggggaatttcctcgacaaacgtttaaacgatggatggaatataaatccaccagaatcagcagaaaaaattacaattttggtggagaagggaaatgataaacgtattattagcgaatatacgaattatgccgaattaaagaaaacaatggatgaaaatgacggcaaacttttcaactccaactacatcgatttcgaagcccttacggtttagcgttttgtttacccaaataattcaaatgtttttaaatcataggtagcgtttccggatttgcccgatttggaggatgatttagaattaa

SEQ ID NO: 82949 - DNA, 555 bp, Heterodera glycines
atgacaattgttggggaaattaaagttcaattggggaatgtgatttgtcaccgtctgcgagtcgtaataccaataaagctgagccaatccgatcgagaagctggagatgatcagcacgaaaatgaagcagaacttggccacatcgaccagcatgcagcccaaggagatctgcaagggtcccaagtagggattggtctggaacaagtagatgatgcgggcgaagctgaaatgtgcaggacttggccagcagtgccaatggcgcagctgcagccgtcccggacccaacctgaacacgttgccgacagcgaacagcgcctcactgaccaacacgggctcaaacgcattccaatgcgtgcggatgacgtggcggggtgtgaactgctcgccaacgttgtgcatcacgtaaatcgaataggcagaaaatctgtgcaaaagaaagggaggagaaatgaacggcgacagaacagaaaaggaagagagaggagacgaacgaaatgccaaagggaagaaggacagaccgaatggaaatggtgcacaagtacagacagaccatga

SEQ ID NO: 82950 - DNA, 2007 bp, Heterodera glycines; identical to SEQ ID NO: 18345
  unsure (1)..(2007): unsure at all n locations

SEQ ID NO: 82951 - DNA, 5400 bp, Heterodera glycines
tatttcctcattccaaaccaaaaataaagggcagtgggaggggcgactgcaagaaattcaaataaaattagtgtggcattccgttcatggttctccccggatttcttggcaccattggataatatgtcaattcccgaaatacttagctcctaatcgagaatctgtcttcactgttctcagctttcgactcctactttgaattccttaactttttgactcattgttttccctatattattccgggctaacactctaacactatgaaattcgaaatcaattttcgtccatcttacagtctttggcgagccgcagccgctgcaatccgactcggagggcgaggactcgttggtgtccccagacgaggaggtcagcccgtccggttcatgtgccgaagaagaggaggaggaggaggacgagcagcagcatcagggcggcaccgggccgcccatgctgaacgtgttggacgaattggtaggacagttggagggcctggacatcgaccaacagcaagaacacaaaatggtgagtgctgcaggcagccttaagatattctcgagtttgaaatgggaataaatgtcttggattttccgcgcctcgtcaaatttatgaaaattgtataaacaaaatgccaaactttttttccaaatttaaattgcttatgctgtctctcttttctctttctctgtctgtgaatggtaaagtaaaaatcagtgagtgcattcaaaagaagaaaaacattttctgggtcatcaaacggacgacggcacacacaaaataataaacgatgatgagagatgataatccccccgcccccaacgtccgttcattttctcatcgatttacaccattcattggtccactaattcgcatattatctgtacgggttcattgtgcactcaaaaagtctcccctccccactaaaaatagcaattttaaaaaatctacagattttttttggcttttttggaataacaccttctaaatttatatttcaaaagattgaacgggaattttggtgaaaaagtgatggatttcagaaatttagggacttcctcccctttttttggttttgcatgcatttcgtaatttttctgatttttcgaattcttctcattttctggtgggatttggcttcggccttcgccgatgatggttttcgagtcaattttgctggacacttttccgcccttaactccaactttgttgccttcctcctcttgcttccttttcccgagttcgaccgccatccgcgactttgcactcatttccaataatttggttagaatatttttgagggttttcatctgtaacttttttccttttggttgctccacattttggattttcaataatttttatacttaaaaattctttttctgtgcgcagcaaaatgaaaatgccagtttcccaatgcctttcccggcattaagcgtttgaaaaaagaccgaaaaaattaagattccataacctacaaattagccaatcccttttgaattttttttaagtttggcaaactgtttggttttaaggttgagccaattcggatcaataaatgatttcgaatttcaaaccatctttgttgaacagtgaggtattaaaaatttgggttttttctcaactggcgggtggtttgcaattagccacccctccctctctctcccgggccgcgctaacctcgaaaaattgaaactcaaaaaaaaatccctcagggcctctctgaccacctgcaccagcaacagcatcaccagccgatgccgccggcgccgcgttatgcggactcttggctggacaacatttcgcttgtcccctccgactccgggtccgcttgtctgtacaccggtgccaacaatgtctgtgccgccgccgtgccaatggcgtcacctttccaagtccgaaatttcgagaaacaaaaaaacaatgaaatattttttcgtattttcagcagtccctgcctccatcgtcgttggttgagccgccctgctccgactatatgaccgtgccgccaatgctcgcctcggtggaccttgcgatgccagcggagccgtccccattggtgcaactgccctttcaggtgcgttgattatatgatttaaaacggcaaattataaggcttaggacaaacagccggggcaaaaacgatgggttgcgtggggaaaattggagaaataaatgttctttcagtcatactgtatatttatattttaatcctactgtaattttgtgatctggaacttaaacatattaatggtaaaatttttcgctgtattaaacctcaaaaacaagtgaagtagctttttatatgccatataagtaccatcacgctttttctgttatactatataattggcatatttttcttgagccgcattaccaagaatatattatcgtcaatatttcaattttccggcacaggtccctctgctcaatgtcgagctgtgccatcgtcgtccgaccattgacggcagtgttgtgccgccactgttgccgcaaccgccttcactgatggccaacaatgccggcagtgaaacagcagcagacgaaccgtctccacgggcattctttgaaggcaaaggcaccgccaccctttgtccgaacgacagcaaaagcggcaccgttgccagcattgacattttgccaccgtcggaaacaacaccggcaatttgcagcggccacattggcattggcaccatttctgccgagacagtgtcgttcccgctcgtggtagccgcgctgcgccctctgaagcgcgtgcggttcgcagacgactgtggccagtgcctggagacggtgcgtgtgatgaccgagcccagcgactacccgccaaagatcagcccaggtgagtcatactgtatagaatacggtttattaatgtcacacggtatttgttttagaattgattcgttgatttttaactgttcaacatttaaaatgattaaaattcattttcttatttgtattcattattttctctacttttttgatattttaatattttttattagaattaaattaagtaattatttatttattttattttttcaatttttcagctgttctccgtcgaatacgtcgtgcagcagccgcggcttcctccgcaattgctgctgcccattccgccggtggcactgatgcgaacggtcaaccattgagaaacagcagcagtgcttcgacaatgacaattgaggagatggtacattttaattagatcattttttttattaattttttaacggtgtcaaagaaatgccatggaaaattatattctttttattatattcaaaactaatgcttccaactttttttcaatgtaagcactgtgctaaaagcaagagcttttttgaccccaaaaaataagatttgaaagtcgatttttactggctttttccccaaaaatttgaaagtttttggatcaaaaacgatgccgatagacacttttaacagattttcacctaatttgctatttttatgacttttaatttcattttaataacttttttttcacatggtaggactcggacgaattggacgaatttgaggcggaggaggaaaggcagcgaaagggcggcccaatccatcggcgcagttggaagatggcattcaaacagccggccagtgaatatgtgcacttccgcgacacattggaccgacaacgggtggcacttgaaaatgtgatgctgaagaatgaactgagccgaatggtcggcaccatcaaggcacggacggcatggggaaaagtgccaaaattgacaaaatgataaaaaaaacattaggaaaactgcctttttttgttggaatcactagggcagggcacggggaaaatgccaaaatgtgcaaataaacatgtgacaaactgcctttttggcaccactgaggcacggcatggaaagtgccaaaatggacaaaatgataaaaaaacatttggtaaactgccttttttgacatcactgaggcacggcacggcgaaaagtaacaaaatgggcaatatgacaaaaataaaacaattataggtccggcattgggtgtatcatctgaaaaatttggagtctaacgagacatgtcaaaatgccttaattaatggtttaattggttgcaggtggccaacatggcatttgaaaagcatgtgttcgtccgccacacagccaatggttggaaaacgttcagcgacgttgaagcgcaatggcaatgttcgccctcgaaggcatttgacacatttcgctttgatgtgccgttgccgcgcaacaacgaatgcccggtgggaaattttgccattatccaatgcgggaagaggattccctactgtattttagggtacgggtcgggaaattgttttaaatttcatttggatggaaatggagacgattttttgttttttgctcatagcaccaaaaactattttggcactacctgaaaagcgctccgttacataccaagggtgcaccccaaaatctcgccgccgaaatctcgccgccaaaatctcgccggccgaaatctcgccgcagaaatttcaaaaaaaatttcaaacttagaaatttttcaaggaaaaaattcttagaaaaatttttttataagaaaatttaaataaaaaaattgttgaaaaatttttcagcaatttttttttgaaattttatgaaaatttactgttttttttgaaaaattttcaaaaaaacttagcaaatagttttttttggaattttcttataaaaaaattttctaaaattttttccttgaaaaatttctaagtttgaatttttttttttgaaatttctgcggcgagatttcggccggcgagatttcagccggcgagatttcggcggcgagattttgtctcggcgagatttcggcggcgagattccggcggcgagatttcggcggcgagattccggcggcgagatttcggcggcgagattccggcggcgagatttcggcggcgagattccggcggcgagatttcggcggcgagatttcgtcccgtccccacataccaatcctattttatagattcttgctaatgcttttatagaacttcttttccttgttaccatatactctataaacaataacgtaattgagatattattatagtattttttgtcaaggattatgggttcctttttaatcgcaatttaattttcagttcatccgttttgagttttgcgtccgctttttggccggctcgtcgccctccgtggaggagcattgggactcaaatgacggcaaaaactttgtgctgctttcccaagaccaattcccgacaacaatgacagcgtcttcgtcatcaccagtgttggcatcatcgcaaccatcgtttttggcattgtcgcatcaatcgccgacggcagcggcacaccgattacggacgacacgccaaaaagtggtgggtcagcatcgtcaccgttcttg

SEQ ID NO: 82952 - DNA, 1023 bp, Heterodera glycines
atggagtcaaccggttttcagcaaagatataattttcgagtgcgccggccgattaattacatggaacaagaggaatcgtcgcattctcgccacagccgacgaaatggcactgaacaaaacaatggtttgaatttggcccctcaaaacattttggacaatgtgcaagacccaaatccatttccgcgaaatttcgaaaacagtatcccccagcaagtgggagtgcaacaaaatgtcgaagaacaaatgcagctcgcagtgttccgacctcccaaccaaaatgttgcccaaagtttcggaaatccccgggctcattcaacccctcaaaatgtctcaccgcatatttcgtacaatggccaacaagaaaatttcgagcaaaaccaaaatcggaatccggatgcgaaccgatatggaaatcaccgccgccaaaatccccgaattttcgttaactcgcaaatggcgaacaaccatcagttttctgcacgaaattcccaaaattttgtaccaaatcagggaataagggcacaaccggttcggaatgctcataatcccgggtatggagaattaattggtgagcaaaaccgaaatgttcataatccaaattatggtcgagaaattgggatgaattaccccattcaaaatgtacgagattttggaaacggtccaaatttcccaaattataatccggttcggaatatgaatcaacaaaattatcagcagcaaccgaacccgaattttgaaccacagcccaatcaattccaaccgtttttgcccgaccaatttccgaatactcaaaatttcgagtttgtccctcagcaaaatttcctacaaaatcaaattcctgatattgtaatggaattacataaagttactctgtcaaaccaatacgcaaatacgctccgagaaatcccgaacctatacggaacggaaggtcgggacaaaattaaggattttttcctaaatgttcaaatgtgtgccggagagtggagaccagaaaagcaaaaagagttgctacagacaaagtga

SEQ ID NO: 82953 - DNA, 1192 bp, Heterodera glycines
atgcatattttccgtccgatagaattttacaattgtaacttcatttccggtaaatgcgcattttccgatagaattttacaattgtatttcatttccggtaaatgcgcatttccgatagaattttacaattgtacttgtttaccatttctgatcaacattgaagctgacgagctgatccgaggcctcatttcactgattaaatttggttgcattttgtcattctctccatttggcattttgtcaatttgtggggacacttaacaaattattgcatgatttcaaataataaatgaagaattttttataatatttttgaaaataaaaattttaatttttaaaaattgcctgattcttcgtcatcattgtcttcttctgccgcctcaatgccaattaagctaaaacaatattttataatcgtctaaatttaagacagcatttcaatttattatttggattttactaaataattaattttaactaattaataaatatttataaccgttgaaaagttgatggagcagcatcagctaatggaccaagcgcagctccgtgcgggttgcgggaacgaagcgcaaaatcagaccaaagcgctaaatacagaaattaatcaaacagtaataagaccacataattagagaccgaatatggacagacccgtatacgggtttttaccggtcagtcgccgataatccgcattttttgatcgatacagatttttagtgattcgggttttacggtttttttagtctgtaagtccgtaacccgtgtatgtgactgtatgtgacatgcccagcccgttttgagaactaatatgttcccagttcaaattaatttatatagtttatagaattgaattaattattcatttaaattttttcgccaaaatttgtttaaaaatgcaaaaaaatatatataaaaaataatggaaaatctcaatttttctagcgtgacgcaaaattaaaattctcatttttaataaattatttttaaaatttattattgtaattaacgaacaacaatccatcagttgtagttgcattgcgttgcgccagccgagcagtgccgaacgggtggaacaaatgcacaaaagatttgccaaaattggctgttcatgcataatgctggcaatgagccgaaatgcggtcggaaaagcagtcttttcaagccgagtggactaaatttaaaaaattaa

SEQ ID NO: 82954 - DNA, 1370 bp, Heterodera glycines
ggaattttgcatcaacgacttcgctgctcgttgcaaggcgggctgctgaagtgttggaatttggaggccaactctttggacagctcaaatctcagcagcaggacgtccaattggtcgctgaacactttgagtaccggcggcaaagtgcccattttaacgctgttaattaatgaggtggtgcaaatttttgtatttctttctccaagaaattattttgtgaatttaacaaagttcgatttgcttttttttcccattcaattttatctaatttatgtggatatatgatgaaattaaatttaaattgggttttatttattttggtaaaattatattcattaaaatattttcaaaaagtcatatattttacatttttccctcatataaatcatacaaatgcaaattatatttaattttatttattgtttttataatttaaaatttttttacataaaaatatttaattataattaaagataataaataataaacgaattttaatttaaagattacatttcatttaaagaatttaaaattaaaagaatgaaaaccgcaaaatatttttgaaaatttattaattgaaataaaaaaataaagcttttattttttcatgctttttctcataaataaaatgaagaaatatttaaaacttaattaaaattagtttatttatttaattttttaaatttagtccactcggcttgaaaagactgcttttccgaccgcatttcggctcattgccagcattatgcatgaacagccaattttggcaaatcttttgtgcatttgttccacccgttcggcactgctcggctggcgcaacgcaatgcaactacaactgatggattgttgttcgttaattacaataataaattttaaaaataatttattaaaaatgagaattttaattttgcgtcacgctagaaaaattgagattttccattattttttatatatatttttttgcatttttaaacaaattttggcgaaaaaatttaaatgaataattaattcaattctataaactatataaattaatttgaactgggaacatattagttctcaaaacgggctgggcatgtcacatacagtcacatacacgggttacggacttacagactaaaaaaaccgtaaaacccgaatcactaaaaatctgtatcgatcaaaaaatgcggattatcggcgactgaccggtaaaaacccgtatacgggtctgtccatattcggtctctaattatgtggtcttattactgtttgattaatttctgtatttagcgctttggtctgattttgcgcttcgttcccgcaacccgcacggagctgcgcttggtccattagctgatgctgctccatcaacttttcaacggttataa

SEQ ID NO: 82955 - DNA, 313 bp, Heterodera glycines
atgcccatttccgacttcaaaatgcatctttggccggccgacttcacaattatgccatggacaaattaccagcacttgggcgccaggaattattgccaatttatggcagtatttgtgcccaaattttggttgcaaattttttaatgaaattctattttttataatttttcaggtccagcccacttccttggttagccccttggcccaaggatcgttggatatttttatgccagacaaaggcatcattttttaattcagagaatttacatttgttttttaatttattttaattattttaaatgtttggaataaa

SEQ ID NO: 82956 - DNA, 968 bp, Heterodera glycines
atggaacgtcacgtgttccccgatgtgagtgactttctgttgcttttcaatttatcccaaaaaataaaaataaattcccgcgtccgataattacaattattacatcatcaattaatgaattaattgacgaattaatacttaattgaatttcgatggggaaagggcagtgtccgtcgttttcccgtgcattcgcacctttcccttccatcggtcgcaaattttcaattaatcaaacggcgaaggacgaaaaagcgtcgaacattcttttaaatttaacaagaaaaaagaaggcatcaaagaataaatttgggaggaaaagaaatttaaaaaacaaataaaaaatagtaaaaaaggaaaatgaaaaaacagctgatcggccgatcaaaaaccaattggtcttatcagccgatcactgatcaatcagtgtttgatcgttgtcagatgaattggtccacttacttcggctggttggtccccgacgaaatgcgtccctacgtggcctccgacccggaagttgtgctggccgagccggcgtatttcgtccgattggcccatttgctgcgccggacggacaaacgaattatcgccaattacgtcctttggcgttatgcctccgcgtggtctttccaggcgagtggcgcaaaatttaaatttaatttaaaaatgcaaatggaattaaattatccaattttatttgaacttatttcgttttattaaataaatttttggtcattttcagatggacgaacgctatgacgacattcagcaggtaaagcaattattattctcgtggaaaaactaattgacgacatttcaggactttctgaaggcctttttgggcaaacagagcaaaagcccgcgatggaaagactgcagcagttcggtgtcccagagaatgagctatgctagcggggcgatgtacgtgcggaagcatttaacaagaagagcaaaacggccgcatggaaatg

SEQ ID NO: 82957 - DNA, 670 bp, Heterodera glycines
agtgattggccatgagatcacccacggcttcgatgaccaggggcacaatcgacggcattgcaacctcaaagattggtggacccgaacacgcagcagcacttgtggagcgaaaggtgtgaattggcaaatttgaattgaatgagcaaatggaatttggtaattgcagcggtgcatcatcgaccaatattcttcctttgaagtgcccgacataaatttgcacgtcaatggcattttgacgcagggcgaaaacattgcggacaatgggggcattaagcaagcttaccaagtaaaagggaggggaagggaacagcaaaatgagggaaaatggtaattaaggcttacaaaacatatctgaacaaattgggacgggaggagaagcggttgcccggctttgagcggtacaacaacgagcagatcttcttcatcagttttgctcagacgtggtgcggacatacgaagccggagacggtaagcggaaggcaggcaggcattccggacaaacattcattggcattggcacgctcagctgatccgacaaattctgaccgacccccactcgccctaccgctaccgcgtcaacggcgtcgtggccaatcagcccgaattcacccgcgcctttggctgccccgccggcgcccggatgaacccggcacggcggtgttcggtgtgg

SEQ ID NO: 82958 - DNA, 1616 bp, Heterodera glycines
atgacaatttatgcggccggccttgttgaagacccattcgcattctttcacagttcctctctggtggcgaagtggttgttttgcctccctgaggtacgctggttgaacgcctaattgagcaatggtatttactagagatcggatacgggccggacccgtatacgggtttttacggacccgtagcagtcaattcgccaaaactttgaaattgggcggtcaatttcgtaaaattttcggtgaaaatcgaaaaagcattggtaaatattggaaaatttatgtaatttgaaaagaaatcaattatttctgtaccaaaaattttttaagttattgaatagctttcgtttaaattttttatgtaattcttttttattttttaagaaattcttttttttacgaattggatttgtaaattcttcaaaattataaatcattttaatgaaaaactgtcagcaaaattcatgaaatcagttaaaaatcgcaaatttggtcaatttttctattaaatctattaacaaattgcaatcaaattttaaaaaatttccgggaggcgcccaacggccaccgccggatgccaattgttgtatttttaaattttgttgcttaaaatttataacaaaagttattataatgtcttgtatttataaaccgatttttatcaaaaagaaaaaacccttacccgtatacggacccgtattatttttgaatacggggtttttacgggttaagggttttacgggtttttagcccttttcgaataacgaaaatttttagacctaaaattttttatcaagaaaaaaaattttggcaatcaatttttgagaaaatttttcaattcacagtggtgtattttctcaaaaattttcaagtcctttcttagggggtgtattttcccgattttattgcatttttgatgtaatttttgtgaaaaacgccaaaaaaggcatcaaaacggcaaaatgccaaaaaggcatttaaggcacgaaaatcccgaaaaagtcaaaaaaggcataataaaagtcaacgtagaagcctcaaaccaagtggaaattacgttttttatgcttaatgtcgtccgaatcgagagcaggtggtcgtccggagcggggttcatcttcgagctgctcattgccttcacgaaattttgtgaaccatcgcttaactgtagaaagagagagtgcatcattgccctcactttcacaaatatttcgaagagcttgggttggggtagaattttttcggaattcgtaaagtaacagttgtcttaggcgaattttgtccattttttgaaaatcgttcgattttgcaaaagtaatggctatacaacaaatgcaaatggcaaaaagatggccaaccgtccgctgattaatccaattgcttgcctccctttttcaatctctttagaattaaatatcattttttgcataatttgttttttcagagggtcagaactttttcaaacccaatatatcgaaacaggtgcgcagaaaaaaaaagcaatgcctcaaaatgcgagctctatattttatatatatcattatgtaaatatcagactttctgagtatatttcttactatttttaggtggtatattttatattgaaatgataaagtgaatta

SEQ ID NO: 82959 - DNA, 284 bp, Heterodera glycines
atgcgaatttcagacaagcgcctgatttccgaaggacttcaaaatgtaagtttcagttctcaaaaagaagaaataatctcccgtttagcgctatcgaagtgaccccgctttcgcagaaacgtctcatatgatcaccgcgctcgcatttgtgccaattcagcatttaactgctgcaattactgcgttgaacgatgtcgtgggacaagaactcgaccaaattctggggtggtaagttttgtcggaatttgccaatcatatggttattaatttaaaatgtaaataaa

SEQ ID NO: 82960 - DNA, 178 bp, Heterodera glycines
atgaatataatgagaattttctgctttcgattgattataaaaaccagggaaattatccatgaaattacttctacattaatttacaataacaaaaagtaattataaaaaaaaaattcatattcacaggacaaacgtgaaaaatcaggacacacaaaaccaatttattcgtccgttttaa

SEQ ID NO: 82961 - DNA, 1636 bp, Heterodera glycines
atgctaatttatatttacaattgttttatcacaagctgtgccgatggtgcatctgcaacaaatatatggcaatggtattatacaaaaggcgcagtcagcggcacgaatttcacaacgggtttgggttgcaagccctatttgatcaacagcagcgaacctgacgaatcgttattctgcaaaaaagaatgtgacggtcaatcgccattcggttacagggagggccgaattttcagtgagtgtcaaaagttaatccaatacccctggacatcccaatcagctatggctgggaaaggcggttgaatattttaaataaattaaaatgatagatctgtcaagtcagccgtcgcgctggaatggattagaaaaaaaccgcgaagcggacatgatgatggagatttacgagaacggaccaatccaagttggtgttacagccaatagggctttgctctactatggcaaaagcaatggacggatcaatatttacgtggtaaggcaaaaacactgtaattccttgataaattttacttaggacaccctcgtcaatggtcccatttatgacgtaagtattgagaggattctttacgattttctcaaaatattttattgatattttcaacttgattagcgcattttctttaaaagccacgcattcaaattgattggatggggccatgaaacgcgagaggacggtgagattgtcaaatattggcttggcgtcaactcatggggaaccgagtaattgccatgatggatttagcagtttgtgttcaccaaaaaatgcctatttagttggggagaggagggactgttcaaatggcgtcgtgggacggacgaaagcaaaattgagtctgaaggcgttaactttggcactccatttgtttgagaaggccggccggctaaatgcgtgagaaggagcaacaagtcgatttgttgaagttgcatcaagaaaattgttgaataaatttattgaaaatttgactttcataaagggacggagtcgttaattaaaaaatatgaattttttttggtcataacaaaaaatcatcaataaatccaagaagaatgagatgtcatttcctaaaatctttcgctatttaaaacaaaaaatatacaataaattaattcaaataaaattttatggctaatgccaaattgtttttccatcttttaattaatgcataacttactccgatttcttaaaaaatttcggcataattttggcgccattgtttttttgaatattttcctttttgtttaaattttttggtcaatgaaatgaattttttcagaatgtcatttttttgttcatcacgtttgatttatgacttttaattttttggagaccaaattctctgatcaatttttgaatatatgtttgatttgtgcccaaactttttgcaattttcgtattaattttttccattcatttgttgaatattttctttctttttgtttaattttatcttttatttgaaaatattttcttattatttaccgtttcttctattcatttttcagtttttgttcattttcttcccatttttctccaaatatttcatcaaatgacttttgtttcaactttttcttttctgatccaatttgatcaattaaattgatcaaaagtaaaaataataaa

SEQ ID NO: 82962 - DNA, 1281 bp, Heterodera glycines
atgaattccgtttcattaattgccacccggttatgtattgaagtaagtttacttatttagaatttctagtttacggcattgcctgcgccgaattcgttttaatgaaatttattatttataatttcatttattatcaatagattttcaaatggattattaaaattttattatcaattaattataatttttatgcctggataattcgattggaaggccctagtgttcactgttccctacagtgacctgccctctgacacgtgcatcactactactactaccaccttatcaaaacaagaaacgcaaaccgataaggacctgaaacgcaaagcattagtggaaaccggactaatggcctactccatgcaggacggcgcgcgtttgaagaaggccaaaaccgcaatcaatgtactcggaaacctccttttagcggaatcgctggacaacaaagtgacaaatagccctgtggacgaagagaatatgcaagatgagcgcagacaagaagatgatttaaaaatagttttatccttcttttatactttttggttttgtagtattatatatcttttcatgggattttattacgtaatccaatagttatttagttactatataaaaatttgtaattctataatttaaaataattatttaatgcacttcggtatttttttcaagacaattgtttaatccaatagaagctccttgtcacatctaagaattttgttcgtctatacgcccatccatattaaaaaaattttgtttttgcgtaataattttttacaaaatttttgttgtctaaatctacaaattaattttagttttggtgttttggtcattttaatttataaattgcacccattgacaaattcaattatcataataataattcttgatggtagaaatggtcttgatcaaaggaaatcgttaggagataatttaattttagtacaacttacttttatatgaaattaaagttttttaaagtcattttatattttatcttttcaatgacttgttcatattgtttatgatatttacttttttattttttttattttcctctttcatgatttccaacagttttaagctttattgaatattaaattttttttctaatcattgaattactaatttgttttatttttgtagccaatttttagaaatatttttctttatctttaattttactttaactttatcggttccattcttgtcccagtggttgcagttgtagaataatagattgtaatttttgtttttgcaatttttcatttgaataataaa

SEQ ID NO: 82963 - DNA, 698 bp, Heterodera glycines
atgggctggaagaaaacagttgatgattattacaccggaggtattaaaaaataacactacactagagacatgaaattttaaaagcatcattataaaaaaatccatttgagtcaattaaagaacggggtttttttgggggggggggggggagggcccgccggaccaatagtcggcgcatagggattttggattttaattcagtttggtaacgataaaataaaacaatttttgaaaactttcccaaaaactacaaaaagtctaaaaaaatagttaaagtctatatccttattttgaaaatattcgtcattggcctctcaaaaaaccacaaactgttgcgaataaataaggcttcatatttttgaaaccccactaaatcatttaaatttataaaacgtcatttttgtcccttcaacagcaaatggcaaaattagcaatgccggagtacggtacattttgaatacggtggtggacgaactgcaaaaggaccagcgtcggcgcttttcctacgccgagacgggctttttgacgcgatgggtggaggaaatggcgcccgatagggtggaacagctcagaaaattggtcgtcgaaaaaggcaatttcaacaataaagttaaaatcgtacctcaaccctcgttaatagaaaagttttaaaaaaaggcaagaaaggaagtacggtacttacaaatggctaaaataaa

SEQ ID NO: 82964 - DNA, 5191 bp, Heterodera glycines
  unsure (1)..(5191): unsure at all n locations
caacgtgccctacggtgacctgccctccgacacgtgcaccactcctactcccaccaccaccaccacaacgcaaggaacgcaaaccgatatgcagcagcaggacctgaagcgcaaagctaaggtagcacttgatttagtggaagccgggctaatggccgatgccatgcaggacggcgtgcgttggaagaaggccaaaaccgcaatcagtgtactcgggaacctacttttagcggaatcgttggacaacaaagtgacaaacagtcctgtggaggaacagaattatgtccaggaagagcccagaagagacgaagaggaaaacaagaaggaccttggcgacattgacaaaacgctcgacgagttttttgatagtattaaagcttcgacctcaaacatgtaaatcattttgtccctaaaaatgcttaatacacaatcctttaccaataaagatatttgttttaaattgccgtttggtctaatcatttcgggtccctcctcatcgggaaaaactgaatttttgttaaaatttattgctgaagcggatcaattaatcacaccaaagcccgtctcaatgctctattgttttggtgaaatgaattcggcagtgcctccgcttcaaaaggcgggagtcgatgtgtattcgggagtcccatccgaagaattactcaaacgcctcccaaagcccctcttgctcattctcgatgacctaatgctgtccattgacgagaaatatttgtccgatttgttcactaaaaagtcacatcaccaccaatttgcggtggtgttcgtcactcaaaatttgtttgaacgtaaaatcaaagtggcccgcctgtccgctcagtacctggtgttgatgcgggcccctaattccctgttgtccattcgcaacattggcgtccaactctttccgcgtcagctcgactttttccttgatgcttatcgcaaagcgaccgcccgtccctatggctatttgctgattgatatgcacgctgcatcagatccgtcgttacggctgcgaaccaacatatttaaggatgagcaggagggtgaagacgaaggaacagttgtattcattcccaaaaatggagcggcataagcagcaacaagtaaagattggagagctgataaaacagaatcgcgactggttgtgtgctttggccaagacgaaatccggaaaaaaatgcaggaaacttatacgaaaagcaaacactgaacaactactatcgctggttgaaatttgtttgaatctcgtcgcttcgcgcttccaattgacaaccagacagaagaagcgactaatgccttatgtggatactgtacgccgaatcagcagagcgagaagtgaacggggtgccaagcgagtgcttgtccagaaaggcgcaggatttggcggattgttcgctgccctattgacacccgttctaatggaagtggcaaaatcctttgtgaacaaaaacgcataaatacctctcatcattgttgaattttgtgaattccattattcatttaacagagatggcaaataaatttttacttgtcccgcaagaaatttatcgtggtctcacctccatgtccaacacgggagacctaaatctggatgctgttcgacatgatttagaccgtgccagggtcgagcgaacacatcccagtacaaaaaatgtccattacaatcaacagcttaggcgatacttgaaaatgaggagggaacttgaagatagaccagccaaagttgagctgacgaaaggaataagtgtactgctaaggaaaggcggcgaagatgaagatggagaggttgtagacacagcaccccgacctcgcgccccgccaccacctcctcctccgcctgggagacgtcctcgacatggacctagtcctccggctcctcctccaccaccaacgccggctgggagaagttttcggcccccacccattcctccagctcccgctccttatcctccatcaagtcctccgcctcatccagaacgtcctcccagaccgagtagagctgctgcgccttctaggagagatagtcgattggagcaatggcataaaaggcgatctgatatacaacgacaacggccaattgtgcgagaccttcttgcggaagcagctgctgcgccattgcctgaaagtgatgatgaatatgattatatgctggagagtgggtttgcgctgccagcgccatcacagtattatggcgatttgcctgcgctgcccgacaacgcggacgaaattgaggagatggacactgctcagcgcaggattgctaccagaagaaaattaaaaaaggacgagacagatgatgccgatttacaaggtaaaagacataggacctatcgcccttcacctccacgactcccacttccacctcgtttgaaaacaaaagctgaactaaggcctcctccaccccctcctccacctccacgacgtccttccgtcaagatagaaaaaaaagaacaaaatttggtggaaatgaaagcctcgacgccaaagcaagccgaccaccctactccagcgcctcgggcgaatcgagagccaatgtccgggctcgaccctcgaccatccacatctagacaagccggttacttccctcccgcaacatacaaaatcgagccaaaacatgaaccgacaaagaggcccatgccgtaccgtatcccgaaaaaagagccaaaaagtaaagaaaagccaccacagacgcagcagcagcaacctcctcctgctgctgtcgtcgaagaaatgccctatgttcctccgcctaggagggggaccaaacgccactaccctgtaaatggtgatgatgaggtgcgcataagaaaacgagttaggcaaccgagaagggtaagagtacagtactcgcccgaaccgggtccatcaacatctgcacaaagtgatgaacaacagcaacaacgtgaactgtttgccattccatcaaatcagctgaccatgactcaacgggtggaacgactgtacatcaaatgcaaccgttacgcggatcgtatgggtgttcgggaaaatacaattaacacagcaaacggtaagccgttggcgcatagcaatttgcgaatggccatcaggtatataattgaccggagagcgggccgccccaccattagaccacctggagcggccatttttgaggagaggcttaggcaggacccaattttgtattcatggacggctccgccaaagaggccgtcaaagagcacgaccaccaggacggcaccgaaaatcaagaaggaatttcgtccgaaaaaatggagctgatcaacaccactcttgacaagctgtacaatagtccatcttccccggcggcgttcgcaggcgttacagcgttgtggaaagaggcgcgaaaaaagttgaaacatttacggaaaagggacgtgcagcattatttggagggtcaccgtacatacactctgatgcggccccggagggcacgctttccaagggcaaaaactgtagcagcgggattcatgaccgatgtccaggtggatttggccgattttcaagccctttcgcgtcacaatcggggtcaccgctacctcctcgttgcggttgacgtcctatccaaacgtttgtttgttgtaccgctgaaaaacaagagagccgaggagatgttggacgcatttaagcaactgatcgatcaaatgcccatggtcccccatcgcattttctccgacaaaggcacggaattcaagaacagattgatcaaggaatttttcgaggaacaggaaattgaaaagcacgagcccgtccattcgtccgtcaaagcttcggttgctgagcgggccattcggaatgtgaagcagcgattgtacaggtattttgcggaaaaggagacgttgaactgggtggatgcggtacagaaaattgtggacgggattaacagttcaccctctcgtgttcatgggatgcgcccgattgatgtcgacttttcaaatgcccaaaaagtgtggaagcgattatatgggcaccctgcaatacaaaaacggtcgccacgcttccgtaaagacgaatttgtgcgcatgagcagagagaagggacaatttgagaaaggatatttgccaaattatggggacgaaatcctggagattgatgaggtattgaaagcggtacgccctattcggtacaaactgagggatgaacatggagagaaattcaagggcagcttttatgagcaggagctggcgcgcgtaagaaaagatgcagacacaagctaccgtattgaaaaggtgtacagaaagagaaaaagagcagatgggtcctcagagatgcttgtaaaatttataggatatcccaatcgggaatggattcatgaatctcagcttgtataaaagcgatcacatttttcattttgttgttgataaacaataatgtcaaacagtttctttgtgtttttgccgagcaatgtaacggattatcccgacaatcagcccaacaaatttcgggtccgcctcccgaagcctttacattttaatggctcatgggtctgtgggctgcatagtattagttacccctactcatggtcaaccattggcacattggacgaccaatggattgacattcacttcaccgatcgccgtgctagtgatgaggacagacagcgggtgatcagagttccagtgcccagggcatcgcatagtaaggttgaacagctcagagattttttgactgtcactttgcgaaatcatagtggtgcaaagttgttgccactcccccgtgaggaggaagagaatcgcaatcggacaaaacctctcggttcgccaccccctttgaaaagagaaaaaagagctgcgtcatcgccagtgattaatgagagcggaaaacagcttgactcccccttattgtacgatggaaatgatcaaggtgggattgacgagtctccgcctcatcatgaagaagaagaagaagggacaattgatgagtctccgcctcatcatgaagaagaagaagaaggggcgattgaggagtcaccgccccattatgaggaaacaccaaaagaaactgtgaaaacgcccgtcacaccaaaagtgccgacaccaccgcctgccataagccctactanaccaacaatagtaaaaacgccagctcctccctctgatacaacaccatcgcctcccacaactgtaaagccaccagtaaccgtccctcctccaatcacaaaaccaataacgccggcccctcctccagccacaaa

SEQ ID NO: 82965 - DNA, 351 bp, Heterodera glycines
atggactcagcggaccgtcgctcacctacccccgacatggagctttgcgaattgtcatcctggtacgacattttgcaggatgacgacgacaacgtaaaaaatgttttttcatttttcattttcaaaaattattattccagattttaaattggttcacaccggtgacggctcgcgacgtttgccaggaggtgttagcatttgcacaagagcgccgcatgccgtttgaaaagattgttaaatggaagcaaattttggacaaaatttgtgctcagatcgcccaaaaaaagtgatcgttttgtgatcgaattcatttttaaattgatgcgctttttttggcactgttaaaataaa

SEQ ID NO: 82966 - DNA, 832 bp, Heterodera glycines
atgcctggggaagagccgtcgcctcgtgccattttgactggacacgactcggaaatcagtggtgggtgggtgagaaatgcaaacagttttgctgcggcttggccccgggtgcataatcgtttaaatttaaaggcacttaattaatttggtttttttgtgctttagcaatttgcgtttcggctgagcatggcattgtcctctccggctccacggatggtgcccttctgatgcattccacgcagggggacctgctgcgcagcatcatctgctcaaacggcaacggaacggacacattggcaccaatcaacaacattctgttcagcagagactgttacattgcggtaattatttaaatgggggttgatttacatttctggcgaagtgccacgccctatccacctacaaaatgccaacccattaatttctttggcaaaattcattttaattaaaattgtttgaatgccccctcaaaggctttcattggcaacgattccctcgccaccttttcgaccaatggtcagctgctgaaacagcgcgggtacaaatgtgccgagaagattctctgtgccattttgtcccgtgacggagaattcgttgttttcggcactgacaatggccgcatttccatccttcggcttttcacgttgcaattgctctacacttttgccgtgagtattagctaacattgtggtggcgtgtgtcacaaatgccaactttagtgaaaatttgttcatttttttcatttcagcaatgcgacagtcctatccgttcgttggcactcagcacaaaccagcggctcatattcggcggcttggactccggggcaattgtg

SEQ ID NO: 82967 - DNA, 733 bp, Heterodera glycines
atgcgaacagaagaaaagtgagatgaataattactcgcatttttaacttaatttataaaaggaattaaaattgttcaaaagaagctaggagggatgccaatgccggcggaaaaaagaagaaaagcactgttttgaagggaaactgacacggaaacggaaagccgtggggttgaagacaccgacccattcgggggataatatgtatttgtcaagcacttatatatttattattattaattatttaattaaattcatttattattttatgaaaatgataacgcttatgtgcaaaaatgaaaatgatgaataaaattgttaatttggtttatgtaaaaatgggctggcgttggtggtggtcgtcggatggtttatccgttactcgtcggaatgaatgaatgttttgattattcatcaatcagtgggcagaagcacttttaattcctttcaaataaaattattaatgagaatattaaaaaaaattggtttttattagactcgacattttgaaaaaagcagggcctggtccgggattccatgttggacttggacctggatttcctgggcaaaaatccaggtccagaaaaaatccaggctcctcgagacctggatccaggcctggacctggatttttcaactgaaatttcatcaaatatttcctgataaatagggctatccattgtatgaactataaatccgagaaatggtcaaatatgaattgaaaaaaaggattaaa

SEQ ID NO: 82968 - DNA, 754 bp, Heterodera glycines
atgcgaagagcgttcgcgggaagcgcatttcgagaccgaatacgtggcattggaccaatgcacgcgctggggcacggcgcagttgcggcacaattcgttcgcccttcgatttcaactgaccgggaaatgtgaaaatgggtcagcattaaaatctgggctccaagatctgaggattatcctcattttgtggttttttgataggtcaatgagggtttttttgaaatgaggatttttgtggctttttgagaaattttgaggcttttggagaaaagcgtaagaatctattaaattttatatttacttttaataaattggcataatgtttgacaatcatttaataatttgggtttttaatatatcttctaatattttgaaaaagtctgcatctgtattttttttactacataggttcaatatcagcaaaacgaaaatttagaattaaatgtgccacaaaacacaaaatgcttattgctaaaaaactgctcaaattgatcatggacaatcaaaaatataacatttgaacaatttaagagtgttttgaatgaattttgtaaaaatgcggctttttgacctaaaatgaggcttttgaaaattttaatctgggagccctgattaaaatgcttaacgattgaaaaatcccgggtcatatttcagcattttaatttgttatctcgggagtttggacccgagcggatcaaattgggcttatggcatgagtcctgaaattcaattccaagtgccgaaccaccaggaa

SEQ ID NO: 82969 - DNA, 555 bp, Heterodera glycines
atgagtcctgaaattcaattccaagtgccgaaccaccaggaagtaagtaatcactaatcaaatgccgggtacgaatatcgataatgtgaaaaattaattaaaattttaataaaataattatttactttcctttctcccactataattgaaaaattttgtttcattatcattttttaattttaatgatggttttctgtggtctttgtttggtggcggaaattcccaaggatcataaaatccgttttatggccgagtaaattggcacgaaaattgggagaaaaagtgggtggatttattataaacccacaaatggaaaagcagtaaattatgaaatgatttatcaactcatttgcaaatatttagagcaaagtggctgaagagtgtttggaatatcagaaaaaattcgacaaaaagataaaccaaatcgcaagtcattggcacggcgtccgcgtgagcgcgccgaaagcatttggcggcataatgatcgaattgtcaattgcaaaagaaaagtggaaattaaaaatggagttggaatgggacggagtcgctatttaa

SEQ ID NO: 82970 - DNA, 445 bp, Heterodera glycines
atggatggtaaaaaaaccgtcaaaactcattttatttttttgtcgttttgttattttccttttttctcaattttatgttagttctttgtttaactataaaaagaacaagaactttgaaaaagcaggtatcgcttcttcctcttccaaactaagcaatatcggtatcattcgaaagctttgagagcgtgactgtacaattggacagttgacaatccgacagtggaatcctacagtggtggacaatcggacaatggacaacccgacaataaattacactcaaagatatgaaaatgccgtcccgaaggcgatcgattgtgccgatctcaagaaaataggcaataaattatgagtttttggaataaccctaaaaatcaaacgaaagaaaaattgagagaaatacattataaaaactttgtttgaattaaaatataaatttaaacctcaa

SEQ ID NO: 82971 - DNA, 67 bp, Heterodera glycines
agagtgccacgggaccgggaattttgggcaaaaccgggaccgggactttccgggacctgagaagccg

SEQ ID NO: 82972 - DNA, 511 bp, Heterodera glycines
atggctgattcttctgctcctgttgataaagaggagccttgggtcaggcgctttccaccatacaggtgttcgatagaggttgaagagctcaatgaattctatgttcttcatcaacaagtcgtgcccaatcgtgttgtgccatgctgcgtggattgtgtcgaaattacggtaaaattcactcattaaaataaaaaaagacaaataatttttaaatttgtttgatagacatttataacaattttttaaaggacatattcgaataattttgaaaaaaatcaccttaaaataactaaaaacaaaactctcatttatgggattttaaattagattcgatcaaattcatttcattcataggaaattgctgcaattgcggttgagaaaataaacagcgatcggatcagtgaaggaatgaagcctttgaatcttgtcaggatcatccatgcaaccacacaatacgtttcgggcagaagcttttgtcttcaaatactttttaaacagacaaaggtaaatg

SEQ ID NO: 82973 - DNA, 696 bp, Heterodera glycines
atgagtgatttccacggtacaattctgtgggttttagcaacaaatttcaaatattggtatcattcggaagctctcaatgagaagaacatttttctaagaaaatgctaacttcattggacgcatgagaaaacgaaaaatataaaaagaattttccaagtagccgagaattggttcaaaaatagtttttttcaacaccgagaaaaatttcatttgagtagcgaaataggaccgaaccgaaaattagtttttaattcttaaatgaataacaccaattaaaatgctgtacaaaagtggcttttttatgctaaggcattaattatttaggccacactttgattgttaaaacctaaacccaaaagttgagtcaaaaatgagaccaaacaaaaagagttaattagtcgaaaatgatttcttcccgaaaatctttggtagagataaaaatattttttacgtaaaacttaaatcttttttaaatcttcaattttcagaagccaaataattgttgaaaattataaaaattttcaatcactcaccatttacctttgtctgtttaaaaagtatttgaagacaaaagcttctgcccgaaacgtattgtgtggttgcatggatgatcctgacaagattcaaaggcttcattccttcactgatccgatcgctgtttattttctcaaccgcaattgcagcaatttcctatga

SEQ ID NO: 82974 - DNA, 829 bp, Heterodera glycines
taattaaatccattccttcgggggaccgtgccgggtgccgcggggtaagcagtgctggttcgtttcatcacggcaccgaaccttttgctagtcagcaatcgttgcttaacttgccagatcggacgggtgcgcatgattccactgttccaagcaccccaccaaaagcaaaacgatataaccaaaatataaggaaaaattttttaaaaaattttttctccatcttcctttttgatactaaagcatcagagtgctaaaattaagttgtaaataaaatttggtgcgctttagagcactttctgaaaaaaatatttatgaaacaaaaaaatcgattttttcaagtgtccgtttggggtactcaaacatttatggggagcaaaaatccaacgcagaattaaagtacaggctatagggaagctactcccgaaggattcggtctccccataaatctgggcgcatcggttcggggggactgccccgaaaacaaaaaaatcgattttttcaagtgtccgtttggggtactcaaacaattatggggagcaaaaatccaacgcagaattaaagtacaggctatagggaagctattcccgaaggattcggtctccccataaatctgggcgcatcggttcggggggactgccccgaaaacaaaaataaatcgattttttcaagtgtccgtttggggtactcaaacaattatggggagcaaaaatccaacgcagaattaaagtacaggctatagggaagctattccggaaggattcggtctccccataaatctgggcgcatcggttcggggggactgccccgaaaacaaaaaaatcgatttttt

SEQ ID NO: 82975 - DNA, 1449 bp, Heterodera glycines
cttcatctccgccgattgttggctttgtgtgttcgatttgattacgccttctcaacttggcctcggaattgcgatgattagccacggatttgacttttacgtcgacgaacatttcaagacgcgcaaatggacatttggaaatattcgaattaacaacaaaattggagaaaatggccaaaagaaaatggaaattaccaattgccgttggaaatcgatgcaaattccgcaaaagccgttgccaaagaaagtcgtcggattcgaagacattttaataaggtgaaatgaatgatttattgtgttttctgtctgccattatttcattttcagacatatcaacaacagtgccatcgcttttcttcgccattttcgcccacttttcgctaaatgtcaaattaatttggccatgcgcacgaacagtcgccgcactttggagttcattttgcgcaacatttggccaatgatcgaaaaaaacattcatggctttgaattgcccgtcggaatttttcatcgtttgcgtcaattcaccccgtcacttctcaatgaatgtccatcacttcgcattgtcaaattatatggcttcgacgatttcttcactgaatttccggccgatgacaatgccacggcatcggatagacaagcggtggccaaatggcttttcactccccgtccggacaatgtgccaaaggtgctcaaatgctcgttgcttatggacatgggtgatggggttttgtcgccgagtattgaagccttaaaaacggtgcttaccattattaattaactaattaattaatgtattttttaattttaggcatttttcaatgcttcatctcccgtcaattttattgttatcgtttattctttcgatgactccgttgtgccattttatttgaccaacgaattgacacgggaacaattggcattgaaaaggattaactttagcaaccgtgttctgctgatccgttgtccaattgagcgagacgaaagcaaatgggccaaatgggaggaggaagcgattggatgggattgtttttaccagtggaatcaaattgacattcgaattgatgatggcgaaatagaggacggatcagtgtatgttttttttctaacattcaatttaggtatataattttttgatttttaggcttcttgacgaaactcctggcccaagtgatcagcaccaaaagtgacagaatgaattgctgagaagtgatcaaacaaaaatgaaagatggaattggataatgaatttgagtccatttaacgttataaaattgttcattttgttgcggtgatcacaaattgtattttatgtatgcctttaggataaatttagtgaattattgaaatcataattggctttaagtgtttaaaaaaagatttttgaggtccggcacgccgataggagacttttatcgagtcgagattgagatcgaaactcgcgagcattaaa

SEQ ID NO: 82976 - DNA, 318 bp, Heterodera glycines
atggcatattctaaggcaacgaaaagggacccagagaaagagaaaaagtgattaaatagagcaaagctaatactttaagaatatactaaaaaaatttttttaatttgtaatgatggaattattggagagccgagtttgaaaatggtctccaaaaatggaatttttcggaaccaccgctaacaaatttttgtaatgcgatctgaaaaaaaacttaattttcataattttgagtaattcaggcacgctgagtcgaaatatgtccttagatttgaatcttcgttctcactgagcctgtacagctccaacttcatgcattga

SEQ ID NO: 82977 - DNA, 390 bp, Heterodera glycines
atgagctgttttttctccccattggcgttgtattggtcgctgctgctgctctttccaggcaacgcttttgccaatttgaaatgccaaaatgcgatgacaaacgaagcatacgaagtgccgaatgacaatgtgctggtgaaactgttccaggatggcaaattgagcatcggcgaggagatgaagcagttcgtgtgtgatctaagcaagcagagcatggcgttggaagctgctgacacagacacatcagcacaattgacagagtgccaacaaccaatggcagcgcaacttatcccgaatttgcgcagtgccattcgaaaattgaccactgcgataaatgggggtaaaaatggcaccgtttacaataaaactgttaatccaaatttattttga

SEQ ID NO: 82978 - DNA, 1643 bp, Heterodera glycines
atggtatcgtaccccctcccgcttggccactgttttgctgccttttcatgtggctgacatcactccgcccacctccacctccgtgccgatcattgccgccttcttttccatttccatggtcattctcggctcttcgatcatcttcactttgctgatcataaatgtgcactttcgctctccacgaacccacaaaatgtccccttgggtattgttctgatcatcagcagagaagtgtgagcaaagggtgtgccattctcaacataagaacgtttattcattggacaagcccaccacggagcgcaccctttgcacatttggccaaacattcaaaaaacgatgctttgcctttggctattatctttttttctctctttctctgttaaggtccgtactatttttctcgaatggcttccgtggcttttgttgatgaaccgtcccggtaaacaattcaaaaaaccaaagcgaaaacggcgccgtgccctcgtcgctcgcgttccgttgcgcactgcgcccgcccaatgccatcagcgcgtgttcccggtccaactttgcaccagcgaatccaccaccagccgatcgaccctggttggcacgcgttctgtagcagccgaaaaacacatgttactccatgcagaaacaagtaatgaaatgggagggcgaaggggtgaaagggagtgattggacggaaaggaaaattagggagggagggagaggagattaagtagggtaattaaggagatagagagagggataatgatcaaacaacgagtagtgatcggagcatgttggattttttgattacaaaatgaatgagcaaatttttcagcggaacctttcgacgctttccttgacattggcaccgtcgaattgttgcgcggcacacttaggcaattaaaagcaaaaacaccgacaattgagcaaatcaaattcattcagagaactcagtgactttttgcttttgtcgcaacagataatggaggaggaagaggaggaggaggaggcgaaggccgactggcgattcatggcaatgtgagggaatgacagaatgggcagaagaaagaccccttaaatgacaggtccctggacagggcgtgccttttcttttacggtaggaccgaacgactaccgtaccgatcggattacagtaagaaatgcccaggtttcatttgctgtgctttgccactttggattttcgctgtgactcccgccgcgtcaaatgttacaatggaagcaatggacaaaagtgccttttgcgaatcgccatctttcgccgtttgaccattggcttctcatttctctttcatttttattaaaattcaaaaatggcaattttacaattttatttaataaaacaaatttgcttttctctcatcttaaccaactcttcgttcatccgttttcgcgttgtcctctctctctctctctgtctctctctctctccctctctctctctctctccctctctctttctccctctctttctctctctctctctctctctctttctccctctctttctctctctctctctctctcccactcttctctctctttctccctctctctctctttctctctctctctctttctctctctctatctctcccactcttctctctctttctccctctctctctctttct

SEQ ID NO: 82979 - DNA, 898 bp, Heterodera glycines
atgggcagagatggtccgactacaaaatggtttgggacccgcgggagtacggtggcatcgaccgtatccgtttgccctccagcactttgtggaagcctgacgtcatcctgttcaacaggtgacagacagacagtcagatcaagcagattcggactccaaagcccatcaaattgatgacagtgccgatgaaaacttcgatgctcgctttgcggtaaattttgtggttgaccacgacggaagcattctgcagacgccgccggcaattatcaagtcgtcgtgccaaatcgacatcacttggtatggtttaagctgaaacttaaaagtgcacgtgccgacgccatttgatgccgttgtttaggttcccattcgacgaacaaatgtgtctgctgaaggtacagttcaataagcaaccaatgaaatgcaatcggatggctaacccaagccaattcttggccattccatacatttgccatgcaaattcgtggcaatcccatcccttgatcattccatccttggcatgccattttcagttcggctcgtggtcgcacacgcgaaattcgttggacttatgcgtcaatggcacttcgttggacatggtcaaagacagcatcggtgggaaaatgggaaaagcacgtgaaaataaaattgtaaacatttggtactgatcagatttgggttattatgtgcataacggagaatgggaagtgatcggtcggttttttctctttttgaccattcaaattcaaaacaaacgaagcaacgcccgtcaaaaaagtgcttcctccgtatggcgattccaatgacttcttcgtcgaattgcatttcgtagcgaattttttaaaattttaatcatttccatttcatcagttcattcacatccgtcgcaaaaccatttact

SEQ ID NO: 82980 - DNA, 339 bp, Heterodera glycines
atgaattttttaactttaatcattcttctactgataataccatgtgtatttggtcattatcaatgggttcaagtgttgttacgcctgtttcgttggattgtaccaagaacactaacgctatccgcgagtgtcgcatctgtcagaactgcagcttcatacagaactgcattatcaacgatcggccgtgcggcatctcacggcaaactaaaaattctggcatcaggatcagcgggacttggtggaggagcaggcggtacgatgctcttgatggagcttctcgagaaaaatcgcaacgacatcaaaggcagtcctgaattggacaaatcgagtaaacattaa

SEQ ID NO: 82981 - DNA, 946 bp, Heterodera glycines
atgctcgtcgaaatcactgagcgtgcgatggcacacagcggtaccgccgaggtgctcatcgtcggcggggtcggctgcaacgagcgactgcaacaaatgatggacacaatggcgcaggaacggggcgccaaactgttcgccaccgacgaacgcttttgcattgacaacggcgcaatgattgcgcaggtgtttttcagcaggggtgacacacagcaaagcacggcttctaatttgaccttttgttttttgtgcctctggggagtaatttgaccccttccccttttcgttccttccaaaattaaaaaaaaacaataattttttctttttttagagattttttcttagcataaattaaatttttcaaaatattgttcaaattaatagaaaagaacttcctttttaagatcgtgaaagaatttgaaaatacactaagaatatttatagggttttatgacaaattttctcatttttcttcacaaattttcaaaattccctttgaccaagcgtggcctttcctgttctcggcactgccgtttttaaagctgaaaccggtttaaaatttgcatttaacaaattgaatttcagccatgccccccgggggggggcattatccccggatagatctttgaagggttttctttgaaaaaatcattcgccatccaatttcaatgatttgttttttaggccggctgggaaatgtatcgtgccggactcagagcatcgcttgaccaggcaattaattcactcactcactaattgccatttttatcattttttatgaaaattactttttcagtgcacttacacacaacgttaccgcactgatcaggtgaatgtgtgttggaggaaatgatattttattactgcttttttgatgttttttaccaaattttccgtcacagattttttgtctttttttgttgttgtttttctcctttgaattaaa

SEQ ID NO: 82982 - DNA, 1824 bp, Heterodera glycines
atggtgtgcattttgggcattgaggggagtgccaacaaaattggcgttggcattgtgcgggacggcactgtgttggccaacccgagacggacattccatgccccgccgggccaaggctttcggcccaccgagacggctgtccaccaccgtcagcatattgtcagtttggtcatcgaggcactgcaggaggcgcaaatcaaggcaaactttttacgaaaaattttttttccgagtgctgaatttttaactttgtcctgcggaaaactaaccccaaaaaccaccaagaagcaaaaatttattttcaaagatgctcacaaatcgggaaaaaaaccccaaaaaaatctcccccccccttcgtgttaccaagccaaaatctcggaaatccaggtccaattttttgtttccaaatttaggggccctaacacaaacaattgttagccaggaaaggtttaataatagcccatttttcttgtcaaggatcccgtgttggagttggacgcgattgtctacacaaagggaccgggcatgggagcaccggtaaagcaaacaaaatcaaaatttaaatattttttattttagctgcaggtaaccaatgcaaatgatgctctcttctgttggtcattattttatgtggattttggggttgtacatgacaattatacgtaattacgagccgtaaatccatcctccttcccgaaaatggaatttttagaaatatattccattttcttccctcacccaatacggaaaattctttttactgaattgggtttttaactggatttactttgttgctaaaagcccggcatttgcccaagttttttgggttggtccgtgccggattttcgtaaaaatattggcatggcgttttttgaactttgttttacaatttttttgtgatggcgcgtatccctgtggtgccaatattttattcgttttgttaggtgggcgctgtggtggcgcgaacgcttggccaactgtgggcaaagccaattctgccggtcaaccattgcattggacacattgaaatgggccgtctgatcaccggtgccgagaatccggtgattttgtacgtcagcggcggaaacactcaggtgggcgagcagtttccctccccccccccccgcctttaccctcccccgaaatgtttttattagaaactatttagcatagaattaaaaaaaacattttttaatccggataaaattttcagcgatttttgaaatttttaatgaaaaattaataaattttatttacaaaaaaaatcgctgtaaaatttttattgaaatttcttttaaaaaaaaaaattcggaaagggcagaaacgtacaaaaaactttttttaagaaaaaatagaaatcattcgtcggatatcaaatttttttatattttacaaatgaatttttttctgccccaggtgatctcctacttgaaccattgctattgcatttttggcgaaacgttggacattgccgtcggcaactgtttgggtaatttttttgcaacaatttttgtttttttacatttctccttaatttagcattttcggccctaatttaaaaaaaaaaatttaaatttatttacccaaaactttgattttttgaaagatcgctttgcgcgtgtgctttgcctgtccaacgagccaagcccgggccacaacattgaacagttggccaagcagggcaccaagttctacccgttgccgtacgctgtcaagggcatggacctgtcactgtccggcattctgtcacacattgaaaaggcggcgcccgcgctcatccgctccggcgcgtacacagccgccgacctgtgctactcacttcag

SEQ ID NO: 82983 - DNA, 918 bp, Heterodera glycines
atgcatgaaataatgtatgctctagtcaagaagaaatatattatcaacaagaaaatgatattcattcattgccattttgttcgcccgtgcaataatggtacatatatacttctaatattttaaaagtttttttgtccgacttttcaaatgagggtttctcacctaattaaatggttgtaatgtaccgtatttactgaatacgagcccctggggactctatttttcaaaccccatcaaaaggaggtctttatttcagagggaggggagtctaatttagtaaatacggtactccccaagtttctgggtttttggagccctcattttactgtaaaaaagtggtgattactgttggctacagtaattgtgccagttaatatctccaaaattttctgtccgataaataaacataactctcttttttagagcattcaaatttctatttggtttgtttgatgagccctgtccgctccgtggttgcacatcgaacaaaagtgctttccatttacaaacatttgttgcgccgcttctgtgccgagtttgaactgtccgaccctgactatttgagccaacgaatccgtgacgaattcagagcaaacaaggaattgtccaacaaacaggcggagcacaaattgaaggtgggtggtggtgtggttatttacattcagaaatttgggagcgttccctccccgaaaattcaaaaaaatattgggcgtccgaatgattcaaacgaatctcacgggaaaccttaaattttaatgagatttgttaacagttgttgccctaaaaagttgtaagagttgaaatttaaatttttttgtgaaaatcctaaattaaaaaaaaataaattttttacccaattcaaattcccattttttgcagaaacttgagcagattgtgaagcagaagttggtcatctga

SEQ ID NO: 82984 - DNA, 2999 bp, Heterodera glycines
  unsure (1)..(2999): unsure at all n locations
tttttaataatggaaaattcgtccaaataagtcataaaccccaaaaggtgcactcgtgcccggtcaaatgccttgaatggtgtggtccaaacgcgttcatttcggctgcctatttgtcctcgttgagtgcctcgtcctccaccgtccgcaacgacattttcatcactgacattcgaacgggaaccaaacgacgagtacggcccgaacaggaggagggccctgttgaactgctccgtgtcagtcattacgggtccgtttttggggtggacaaatgaaagcagcaatatggcaaaatcttataaattaaaaataaataaataaaaatcagagacagggaaattttgaaacagacggaaccgggatttgatattggagtggaatttccaggagctttatcagtcccattttccatggtcccggtcccgatccaatgaagcggaaaaagaggaacaattttaaacttgaacaaccttttctaacaaaattcattaaatttcgaaacttttcacttgcggtcactaaaaatccttatttctcttggaaaaaattggctcaaaatcgtctaattttttaacatattcattaaattgcactttttcagctgttacttggccatttcgtttcgcagtgatccgttggaaatttgggatttgaacacttttcggctgctccgtcggatgtccaaaaagtgtccagtgattgtggacatggcctggtccaccaagcaccaccaggtcaagctggtcaacgagaagacgcaaatccatagggaaaacttggtcgtgttggacaacaacaatttgctgtacacaatttacatatttctctttacatattattcattagaaatgaaaaaattgcaagttggattttttttttaattttcaagcctagcgtaagaaattttattccatttttaatggtttataaaaaatttagttaccatgttgttgtcaagggtttacatgtgcgagatgggaaggaagtgagcacacaggtggtttacttagagatacattatataaaaaatcatgggaaataagaaaatacaccctcaaaaaaaaaaaaattttttttttgccagtttgatactttttcatggcaatattgataaagagcaacaatatctgtttataatttgttgtattaaagtggaaatccggcgccgcattgcttcgctgtatggtgtggaaggacgacgtgttggcatttggggacagtgccggccgagttggagtttgggacttggccaggtatttgtacaatgtttgaattcggatttttaattttttgaggagtcaatgtcgtcagacgggccttagtcagtccacacggggcccagtccaacgggtggtgttctcacggcttacgggtgactacacacttgcggtaagttcagtcccgtacgtaccacgggggaaatggaagaattactacaaaaaatctcaaaaaatagccaatttttttgcgattgttgctgttttgctaacaaaatcttgctaattttcacctcgattcccatgaattaaattttccttctagctagcattaaatgattttcgaaaattcaaaaaaaaaatttactaaatttaggcccagcatccaacctctgttgtagtgtgggacactgaacggttgcagtcgctgttttcactgcaaaaaccgggccacagcatcatcgacattgacatgtgcggactgaatccgggtactcaattatactatagttttttctatttgttttttaattggttttctctgactgtctgtcaactctctccctcttcggcccttttttctctctcccactcactctcaaatttaaatataaaaaataaaaacatttagtgtacatagcctctgatgggatgtttcgttttgcattttcggacacggatgagaaaagtcgcaccaacaacaccaacctgaacacatcgccgccactcatcaaatccggtcccgattttgtgacatcaaatttttttaaatatttttttttgttgtcagacattcccctgttgttgcgcccgtcgtactgtcaagcattgctgtcgttgttgtcaactgacacaccaccggcggcggtggcggaacagaacaacaacgacgacacaaccaccaagtccaaccaagaaaatgctgtcccatttggtattgaccatgatggccaccaattgcacacatttgacgaccccgacattgaccatttgatcaaccgtttgtccgcaaaatgctgccgaacaccgttagaccgtgccattgtcctccaccaatttgtcggccaacaatgtttggctgaccttggccggattgtccaatgtgcggcgacgacgacaatttctaccgctggagatgacgcagcaaatcgaccgccaccgccacaattgcgtcagccaatgttgccaccgaatttgatgcttttttggcccaaaaaagcgtaccaagtttgtggcattcgaggccccgaaaatttacagaaattggaattcgtgccaacctttgtgtgtagtaagtacacttaaacgggttgttttttgaaagtgtggtgtccaacttttgatcacctgccatttgtactgaaattctttttgttgattgtgagacggattggcgtagccatggaaatctttggcatcattttgaaagatcatttttattcatttttacagaaacgcgttgaacgcttcacccgcttgctgctgtccacatttcgcacagaacggcaattggaaatggccattgagaaatgcgtgattatgcgaaaggtcacattttcaatggcaattttacgtttttagaccggaatttcgaaaataaaaatttttttgcttcggtactcacttttccctcatttcattgggccttttccatcattttattccccgaaatatcttcagaaattaaacacgacttgttcagaatgacttggcactttattacctgctcaacaatgaccaattggcgttcggcggtggcgccgcaaccgccngcgcgtggcg

SEQ ID NO: 82985 - DNA, 1268 bp, Heterodera glycines
atgtcgtttcttaatgttccagagattctaaagcaaaaattaatcgaagttgaagggactttgaaagcaatatcgcctcaatcttcgcatggagagagtttgccagcaccagcgcaatatgctgaacctttgtcctttaaaaagggacgtttcttattatggaaaggtgtttgcattgtgttgttttagtataaaccaaacatttgcaggtgtcgagactggctttctttatctcactgggcatcccaaccccggttcattgactgtctacgactataaaaacggaacggctaacgccgtactttgcttcagccatcaatttggccccacagctctcatcatcgacgccatttactttccgcttagcactgaccacccgggcattttggttgcggttacggaccgctctatggaccaacacggcgactatttggcctatttttcgctcctttcacatacccttttgaatgctttttatgtgccacaaccaataacgtccatctgttcaattctcgatggaagtgcacaaagggatcaatttttgaggctgtctaattcattccacaaagtgtttttggaattattggattatgcaataatctgttaaggattggccacacattttgctcgttggttgccgttacggcgatgtcattttagtttatttggacttgcaaacgcaaaagttgtctactgaagcagttcaaaaatccaattcaccatctacagcattgtcgactaaaactgaagagattcggccgattcgttgtaaaaagaatgtgcacttaacgagttgagttactttcctgaatttgatttattttcaaatttagaaattttttacgaagacaaaatgtttgttttccgagccgacgatggaacgaccaaatgtttagcaaagggtaaatgctgataaatggaaaaagccaatgtttaatccagaaaaggtgatggtctccgcattgcattgggaggaaaagtgcggtttggttttggtcggtttcaatttcggcggagtgatggccgtgtcgctgcgcacttcgaaagtctattcgctgctttacatcgatggctctgtgcttaattttgcgttccaagagcccgaagaagacccaaggcccatcctttttctgtggatagctttttcttcccctcggttattttgccattttctaaaccatttttattaattcgtcgttccttatcgtttagcagtggaacttctttgcttttatgcaatgttaactttccaaaagatgaagaaagaa

SEQ ID NO: 82986 - DNA, 761 bp, Heterodera glycines
atgtactatagctattttctttgtcctaccattgtggtatcattcgtaatggacggttcagtcccacaggcatttggccacttgagtcccggatctgtaactctaagtgttatattaattcaggtagacgagataatggagcaaattatgtttcaaatgttagccactcacccgtcagacatgaatcgagagacgattgggcctcgggtgctggcggtcaggggttagttggttaaggaaattggtccaagcgaagaaaaaacgggaaatagtggaagacaaattacaaatacatacggaataatttaatcacagctttttttgggtgggccatttgtcccttgtaaatatgaacaaaaaaatgaaaatgttcaaataaataattcacacatttttaagccgtgccctccctgctaagggcgatattttgtagattttcaagtttattacgaatcattttgttcgatcaatgaataacaaaatctgaagacaaaaaacagcatatattttaaccgaatttgagatttttcttattcgggtgggtcgaaggttaggaaatgggttatataaatgtcgtattcgtattcagcgaccccgaataccttaatttagacccattttccggctttttaatagctttttcgagttttggacacttcgtgggtttttattcttttggacatttcgtggcttggacattttgtgcatttttgcttatacgagttgtcttcgtggtatagtgaagcgattttgtgaataaa

SEQ ID NO: 82987 - DNA, 282 bp, Heterodera glycines
atgaacttacaatttttggttttccgattagccccgggcaattgtcggccatcaaaatttcaaaaaaatcattggccaaaacttttcggccgtccacgccgacgaatgcctcgtagtggccatgggtgagtaccgccacaattgcgctaaagaaatttgtcaaaatctttcaggagcgccagatgttgggactcggaatgggccgggtggggtatctcaaactcaaacttgggtaattaaacctttatacttatttgataaaaatacaattaaaatatgaaa

SEQ ID NO: 82988 - DNA, 1532 bp, Heterodera glycines
atgtcaaacctttcgggctcggatcagcagcatgccactccaaatcaaccggggggccaacaatttggtgccatccaacagcctttgtggtctcaactggcaccacaaaatcaattttttggagccattccgccgccatcacatcaattcactgcgccaccaccatcagtacagcatgttgctgctggcgggggcgtgcaaccgccacagcaatttcccgggcccattgctggtggtggtgctggtagtgtgcaaccacagcaaccgcagcagcattcgcaattttttggaggcattccgccacagcaattcactgggcccgttgctggtagtgttcaaccacagcaaccgcagcagcattcgcaattttttggaggcattccgccacagcaatccaccgggcccgttgctggtagtgtgcaaccacagcaaccgcagcagcattcgcaattttttggaggcattccaccacagcaattcaccgggccacaaccgttgccgcatgttgctgggggtgttcagcagcaacaacaattttttggcgggtttcagccgaggcaatttggcgttcacccggttcgcccgtatccccaatttggcactgcacagcaatttggtaattgttgtgaactgaaattcaaagttattcggcaatttcagttggacagcacaacccaaaattggatcatcaattttttgcgcattcaaatgcctcgggtgtgccgcaacgcccttttatgccaccaccaccgcaataccaccacccgcaatatcaaagcggagtaaatacacaatttttttttgcaaaaaaaataaataaattttttagggatatttgccaaacattgcacaattttgtgttgatggaacaacgagcactgcgtttctcaacggttgcgtcgacactttcaaccgggttcttccgtaatttactcctttttttggtttaaattatgctttttatattacagccctgttcgtctgtcggttattgttgttgattttcgagagcgacagtcaacccccgctggagaattgccggttgcaaatgttttgcttggaaacgcggagggggcccggattgaggcgtcagcgtggcgccaacaggccgaattgtttgccatgctgcgcataggagacacgtactctttcttcaactgccgaacattgccaccgagaatgattgcaaatggcgtgtggtttcgtttgggactcaacctggcttcatacattgaccagcaacatgtaatgttttttcaaatttttttttaccgtttaaaggacctgacgaaaaaataagtggagtataaaaaagaaattgtttttagtttgtaggggtaaaactgatcaccggcatttattttcgatttattattataagattacaaaaaaaaagggtccattaatctgcaaatgtcaattttttttacatttacaaaaaaaaaaatagtttttgtcgttgcccccaccgccgccgccgcaacaacaacagggaaatgagtcggcagcggagagtcgccctgtggtgaaca

SEQ ID NO: 82989 - DNA, 999 bp, Heterodera glycines
atgtcaaaacattttggtcatcaccaaccatttactttttataaagccaaatttctcgaaaaggctagtggtgttaaacttatgcacctgaccgtaacaaaaaaaatcatttttattatttttttgttttttcattccctaatcaatacacatggagcatcatcaatacccttaattttctcagaactaaaagtcagttttagaaaagacgaaatttgtttattagacaattattcatttcgtattatgactaatttaattggagaagaggaagcgccgacggaaatgcaacggtcgtccagtgaaacatgtaaaaatcacaaaaaataacatccaattttcaattttattttgttttgttttcaaaggctccgaatcgtttcacagcaaatttatgcaaaagcggcgcttcgttgagtaaaaaagactttgtcaagaaggaaatcgttggtttggttgttttggtggccatttccgtcctcctcttcctttttttgctgtttgggcgtcaatttgcggtgagttttgtgattttattttaattttcaacaattttaatggaaatttctcttttttcagtccgaagagacgaaaacatttgatcatcagaaagcatttgacgagttggagaagaacattttggcaaagctggaacaaatggacatgaaactgggctcaaatgcgcaaggatggtcctcgtttttgatgaaaagcgttggcattggcatcggcgcagtgattttcctgcaaattgccaaacggatcattcactcgcacaccaaaaagggcgtccgacgtcatggccaatttctgtttcggatgaccgacttcaaagcgttttcgcagggcaacgggccgaaggaagtgaaaagtgacacgattgggtacatcaacggaatgccatggcaaattgcgattcaaaacaacggagcaagcatcggcctgtttctgaactgttcctccctgaagattcgtaagtgcgatccaattggaagctga

SEQ ID NO: 82990 - DNA, 58 bp, Heterodera glycines
ttttacgcgtcccatcacattttacgcgtcccaacaacagtttacgcgtcccatgaca

SEQ ID NO: 82991 - DNA, 194 bp, Heterodera glycines
gaatttttttttaaatttttaaaatttttttgaatttttaaaatttcccggttggtcccggttcccggtttttcttgcggtcccggtcccggtcccgaagaaaaatcgaggtcccggtcccggtcccggcttctcaggtcccggcaagtcccggtcccggttttggcaaaaattcccggtcccgtggcactcta

SEQ ID NO: 82992 - DNA, 512 bp, Heterodera glycines
atgtgcccaaaggttgagaaaatggcggtaatagaaaaaggaatggagaaagagacgggtgaccgaccgaccacacatttgaaggagtgtccgatgacaacgccggcggggattttccagggatttgacgagggcgaagacggacaaagggaggcggggccacgagcggtggacaaattattgccattggttgtcgaatttgtaggtcttaaccattgattaacggatgagtaaacgaaattgcaaatgctttttcagatgctggagaatgaggtgggatttgagggggagcggggaatgatcggctcaatggcaactcggacaaaaggcaactcatattttacaaaataaggcctaagcttaagcctagacccaagcaagcctaagcctaggcctagcttaaagcctaggcctaactcagaaattgtacgagttgtcatgacaccaactgatctggtgaaaaatccgatcgggaaattttattgctcagcccaatgaattggaaaattaaa

SEQ ID NO: 82993 - DNA, 3035 bp, Heterodera glycines
atggaaaaccgtcctccaaaacgcccattcccattcactattaatgatattctcaccaccccgccaccacccaaaacattacagcaaggcttcctcatcaatcagctgcttggtctcaccgttcaggagggtgaaggggccgagagctcatccaacaaaaaactacccagcgaatttgttgaaaagctggagtgcagcgttgaacatgttgccaaatttaactacacgaaagtcaaatcgagcttcgtcatccgggatgtgccagccgatcccgaaagtcttctttcctccatattcaagcactgcattgacgaagcaaaaagcgacagccgtgagaagagcagcgaaccaacacaccttggatgcctgatcagcagtgcattattggatggcggtgatgtttttgtacccgtgcgccaaataactgccaacacaatcgacgccattctgaatctgttcaccaaagttgcgcagtcaaaacaacagaaaggtgttaccctatggggagagccgttcaccattaccataacaacaattgatcgcagcggacttccggtgaaacggcacatcaaagggggcgccagacgtcgtttgacacacgttcagcaccaagtgcatgagaagtgcttgatcaaggtgaagcgtacaacttatttattatatcatcgactgacaatttaagatcaataaccaaaactgggacaacagtgacaacaattattgccttttctatgctctacaggcaacaatggtatcaaagacacgcggatggccgagctggaaattttttcgctacataaacgatcaatttggacaacgcggattgttacaccaagaaactgttcaactgatgcggcaaatcaaagtgccactggatttggacgcatacgatgccgacacttatgtgccgctggtcatcaaccactggaataacgcgcaacagcggcatcgctttgccgttttcatctttggaacaaccggccactacaagccgctttacaaatacggcaacgacgattacgatacaccattggttctatattttaacaacactcatttcgacgatgtacatttcctcagcggactttttggtggaaaaaagtattgcctggagtgcgagaagccttataagaagccgtcggaacacaaccagacctgcaaagcgcactgtctgatgtgctcgcgtgttggacctgcgtttccgtgtccctcggagcctgacttcttccgaaaatgcaaagaatgccacaaaaacttcaacaacgcgggatgctacaatcaccatcttcaatccaactactgtaaacgttcaaagaagtgcaaagactgtggtgtaatttggaatgttgccgacaacaacagacgggggcgaaagggacatgtgtgcggtgaaaaattctgtcaactctgcaacaacttccacagcacagagcgcggctgcttcattgcaccacttgagcccaaggatgagatggaagcttatcgattcgtggcgtttgacctcgagacgatgcaacacctgcctgctgaccctcatctgcctgaacgacgcaaccacgagcccaacttcatagcagcaaaggtgtcttgtcccatgtgcattgaaaatggcaggtggaagcaaggaactgccggatgttggatatgcggcccacaccgaaccgttgctttctgccaacgaccatttaccgacactccggttgacaagcaagtggtcaccgacaaccccatgcaagcatttgttggttggctgatcaacgacttgccgatcaaggccaacaccttcgcctactcacattttggtggccgtttcgacatggtcatcacattccgggagctgttccgtcgcggatataacccggagatgatcagacgggtgagtatgtttttacatatattttattctgataaacaaattaagggcaataaaatgtatgaaatgaagctgagggcgcagaagaaccgacaccccaacatcgtcttccgagattcgttcaatttgatgccctgtgcgctaggtcagctggtccccgcctacggcttggacgtcgaagagaagccattcttcccgcatatggtcaaccgtccggacaactatggccgcgaaatttttccgacccccgacgactacctcgcccatggaatgatgccagaaaagagacgacagtttgacaactggtacgaacaacatcggagtgaaccattttttctggacgaggcattggccagctactgcaccaatgacgtggagatcttaatggcagcgctggtggcatttcggcgggagttcttggaaatcacaagacgtcaagaacctgtggacggccgtgaaacgcacaacggaattgatgttctgaagcagtgcatgacaatcgccagcgcctgcatgaagcacttcaggacaaatcatcttcctgctggtcatttggccatcgtaccggaaagaggctacgacaacgcccaaaaccagtccctgttggcccttcgcttcttcaaatggtatgcagagaagcacggagtgcagctgcagactgcccactcggcaggcggagagaagagagtcgccaactactctctcgacgcttggatcgaagcggagaagagggccattgaagtgaacggtaatttttacaaaaaaaatttttttttttaatgacagcaaaatttgtgtaggctgtgtgtggcacggatgcagcaaatgcttcccggaggacaacatgcttctgcccaatgggaaatcggctggagaagtgcgggagcgagacgcgaaacgactggaatttttgcgaaaccaagtgggcgttgtggacgtctactgggaatgcgagatcgagcgaatgctggcgtcagacccggagatgcgccaggcctttgcaggctacgtggatgacggaccactggagatccgtgctgcattcatgggcgggcgcactggcccgctcaaactcttccacaaagcgcgggaaggcgaaaaaatctcgtattacgacttcacgtcgctctatccattcatcaagtcatttttgatcagttga

SEQ ID NO: 82994 - DNA, 2474 bp, Heterodera glycines
atgccagaaaagagacgacagtttaacaactggtacgaacaacatcggagtgaaccattttttctggacgaggcattggccagctactgcaccaatgacgtggagatcttaatggcagcgctggtggcatttcggcgggagttcttgcaaatcacaagacgtcaagaacctgtggacggccgtgaaacgcacaacggaattgatgttctgaagcagtgcatgacaatcgccagcgcctgcatgaagcacttcaggacaaatcatcttcctgctgatcatttggccatcgtaccggaaagaggctacgacaacgcccaaaaccagtccctgttggcccttcgcttcttcaaatggtatgcagagaagcacggagtgcagctgcagactgcccactcggcaggcggagagaagagagtcgccaactactctctcgacgcttggatcgaagcggagaagagggccattgaagtgaacggtaatttttacaaaaaaaaaaaattttttttaatgacagcaaaatttgtgtaggctgtgtgtggcacggatgcagcaaatgcttcccggaggacaacatgcttctgcccaatgggaaatcggctggagaagtgcgggagcgagacgcgaaacgactggaatttttgcgaaaccaagtgggcgttgtggacgtctactgggaatgcgagatcgagcgaatgctggcgtcagacccggagatgcgccaggcctttgcaggctacgtggatgacggaccacaggagatccgtgccgcattcatgggcgggcgcactggcccgctcaaactcttccacaaagcgcgggaaggcgaaaaaatctcgtattacgacttcacgtcgctctatccattcatcaagtcatttttgatcagttgaactaaatttgttattacatgacattattttagttttaccacgcgctacccaattggtcacccaaaggtgcacgttctgaatgaggaagtggaatggaagtgcgcaacggacaacccctacgatttgtcgctgctcaaagtttgggtcatcccgccgcgtcaatgtgatgtgcccgtcttgccggtcaaagtggatgacaggctgtgttttccgctgtgctacaaatgcgccaaaaaatacccgactggcggtgttgacaacgactaccattgtcggcattccgatgaacaacgcggttgggtcagcacctgcacctcgcttgagctgaacgccgcactggacgaaggctaccgtgtcaccaaagtgttccgggtgttacaatatgagcagagcgacgaccaactcttccgttcctatatctccgagttcatggcgttgaaaatccaggcgagcggcttcgactccagcatcaaagggaataccgaaatggagcaagagtttgtccgcgagtgctacgaaaattttggaatcaccatcgacccagccaagatggagccgaacaggggcaaacgctcaattgctaaattgtgccttaacaatttatgtaagaattttttttttcatttaattcatcaaatcaaatttgaaggggggcgattttcgctgcgcaacttcggtctgtcgcagactctggtgaccgacgaccccgctgtcctggctgaatacttggacaaccgctcgctcgaggtcacggcaatcgatgagcttgatgctgagcacattttgatcagctatgagacgaaaaaggagtgggtggaggaaaactcatgctccaacataggtggaaattttttgtttcaattgaactaataataaaaatacctcaagttatctccctgtggaccacttctgcggcgcgtctcctgttgttgaaatcaatgcagaaggtggtgagaactccttcctgccaactcctatacaccggtaaaaatcatatattctatgtacataaatacaattgttcagacaccgacagcattattttgacccatccggatgacaattgcccactgaagaccggcccacaccttgggcaattcacggacgaataccctaagcatgagattttggagttttgctcgggaggtgccaagcaggttaaaaattttcacttttaactattaattctaaaatgaattttagtatggactcaaattgcgcagaaaggacgcaccacccgacgctgagaacgaatatgtgctgaaagtgcgcggcatgacgctcaactatgacgtcatccaaaaccaagggctgcgctacgagacattcaaggaaaaggtgctacgatttgctgaaactggtgagccccaaccgatcaatgtgatataccccaattttcttcgaccaagcataaaagatgggagagtcatatcctgtccactccaaaaaatatataaaccatttgtcggcaaaggtattgtcggagccgactataaaattttagattttggtcacactttgtaatcatttttgcatattctttgtatttttcattttattgcttgcattattaacgaatggaaa

SEQ ID NO: 82995 - DNA, 276 bp, Heterodera glycines
atgcccatcatcagagaggggggaggggtaaaagtgcccccgccacactttgaccaatttgattgtttaccgaccaaccaataaattataaataacggaaattgaaacaaaacaaggctcaaaccaaaaaaaaaaaacaatgatttttaaacgcttttcaggcggtgctcattaacaatttgctgaagcagctcagactgaaagtgggacaggcgaacaaaacacatggaaataatgacagacacaattgaagaacaaaacaaaacaaaatataaa

SEQ ID NO: 82996 - DNA, 528 bp, Heterodera glycines
tctcgtcagagtttcacgcttatttacgccggatgggttgaattttgtttgaagaggaagtctgctgacactgagaatgagaatggctacaattccgttcaaaatgcgtctctcgtcacttcgttttgcttcgctttgtctatgctcggccgaagggcgttgggcaccgccgcgtacaatcgccactcgagcgcagccgaatcgtttttgttcggaatgcacacactctttaaggtcagccgactctggcaccaatatgcagatgggacgaacgaacacatcattcataatagttataattgcttttagggcgatatgcgtatagctcatccagcggatgaatgggtttttgccgacttggacattctcaacagtgtcgtttctccggcaattcgaatggcgcttaaacttcaccaagatcactttgctgctgtggtggatttggatgagccagccgaactctttgaactaatcgatgactacagaaaacggcttttcatctcccatgaacacgatccggaatggtaa

SEQ ID NO: 82997 - DNA, 570 bp, Heterodera glycines
atggtaattatatttaaaaatggagcaaagaattggggcttaaccaaaagaaatgctataaatcaaaaactgatgaagaaaagttagaaattgtacaaaaattcattgaaatgacaaatgaatataagcaaaaaataaaatattcagcaaaagaatggcatcaaaattatgccgaaatttgtaagaaaattggcgtaagctatggaacaattatgcaatggaagaaacaatctggattaagcaataaaagaataacggaagaagaaaaaattgaaaaactgaaaatttattggcaaacaaaaagagaaaatccaaaaaagagtgaacgggcatttgctaaaatgctgaaaattgatagaaagaacatttaaaattggaaacaacagtttggggaagagattttagaggatttcaatggatgattataagaaaaattgaatagatttgccaaaaaatcatcagaaaaactgtaacccaaatcataggctttatcaaatcttattgtagttaaaaaaaaacttatttttgaaacggtgcttctttttcaattatcttgaattttttattcaa

SEQ ID NO: 82998 - DNA, 1245 bp, Heterodera glycines
ggggacctctagagtcttggccaagtgcccagcagaaggggcaccggctcactttacctccgacttggcactctctgtccgatttcgtcgcttcttctccctattttctgcttttcctttttaggctttggcagcagtggcattgtgctgttctgcttggaagtgttcatctgcttctcagataaagcctgcttcaattatcagctgatcaattggcttttcgccggcactttcactttcatccaaatgcatttcattttctgcaattcaaaggtcctctaaaagtggaatcaatttttgagcaattttacagttgattattgtcgattcaaaaaattctgcaaaactcggaaccatgcacttattggcggtcaacatttggacatggcttcgatttgtaattgcaaaaaatgcggcgcttgacaaaccgttggaccgaagagtcagaaaaagcggaatttgactatttattaatgtttttggtatcagttgctacaaatatttcgactgaagcgtgatttgacaaatggcgtgagcagcgaagagatggaacagtttcagccccaacggatggccgagttggcgtacggcccagcaaatgcgccgctcccttccaaagtgtactccttcaactacttcggagactttgccactctgttgaccacttgcattgtggtgagtgccacaccatgccatggcatttctctgtaaatgttcaaggaatattctgtgatcggcgctgctgtgatggtgtgtttgtggcgatcaattggcgaacataggacagaaagtgaagggaagagctgtgacgagacaaagcctcaaaaggagcacaaaagcgggaagagtgtgcgcatcgattgcaggtcgttcattccttcgggcgttcgttgtcgccacaggggcgtcgcacccctgccgctgtcaaatggcagcccgtcccaaggcggtattctcgcaggtctataatatctgatcggccatttgcatcccgaggcaaacaaacattggtaactcatctctcggattccccagagcgcccatcatactcatactccccccacccttttcttcttccgccacccacctccgccggtacgcgccgctcccctcccctccctctcttgatagtttaaactgaaggcgggaaacgacaatctgatccccatcaagctagcttccgcaggtcctgctcgagcggccgcccggggatcgatccccgatctagtaacatagatgacaccg

SEQ ID NO: 82999 - DNA, 417 bp, Heterodera glycines
ttcgtacgttgtgtctcttctggttgtcggctgtggctccattctttggttcttttgggactacgtcaaaaaacgacgacgccaaaacaaaaaagaaatgtaaaaaaaatcagaaaaatcataaaaattccttttttcagctttatctccgccgactgttggctcaaagtgttcgatttgcttccacgctctcaacttggcctcggaatcgcactgattagtcgccgatttgaccgccgcgtggacgaacatttcaaaacacgcaaatggaaattggacaacaaattgtggattcataagagaaaaggatggaatggcactactgaaatgaaaattgtcaatgccaacggaggaaaagcattgccaatcccacaaattccattgcccaacaagtcatcctattcagacgcattttga

SEQ ID NO: 83000 - DNA, 58 bp, Heterodera glycines; identical to SEQ ID NO: 51629

SEQ ID NO: 83001 - DNA, 1746 bp, Heterodera glycines
atgtggcattcgaaacccgcaacagaaccgattctccacgccaatggaacaattccatctgcaaattgtggtcattttgtttgttttgcgtcacataaatttgaactgttttcagttggttttccatcaacaaaatgcctcttcaaatgtccaatcgttttttgtccaatgcgcccaaaacagagaaaacggaggcgaaaacgaaagacaggcgaaattgggacgaaacattgaggaggcattggacgaagtgagaagaacaaatgggaaaggaagggacagaagggaattatttgaaataattttggaaataataataatttaattaggtaattaaaaggatttataggtaaaaaaaaatcagtaagaaaattgaagaagagtattttatatattttttcttaattaattacctaattttggtattgctccttttttattttttaatatttccctatcataagaaatatataaaaccactctaacacaggggctgtaactcagtggtagagtgcttgcttagcatgcaagaagtcgtgggttcaattcccaccagctccagtacattttttacattttttacatttttttgaccaaattttttggtggtttttatttttttaaataaaaattttactgattttattataaattaaaacaaggaaaattttaaaaatttattccacctaaaataccatataggtaatagatttggactgctaaagacatgctaaaagtaccaaataattaaaaaattttattaccctttgcttgattaacactaattgagtaatcaatttaattcgattgtctttttgctcaattagtgtagcaaagcgccataaatactcaaagaaatcgaaaattacttattatttccgaatttttattgccccataggggctgtaactcagtggtagagtgcttgcttagcatgcaagaagtcgtgggttcaattcccaccagctccagtacactttttgcatttttaattatagtaatttgttttttatgtctaaatttaatttctcaacaatatatttatagtttcataagaaaaagtatcaaataacaataaattaataatatctaaaagaatttataataaaaatattttttttgtcattaaaatttaaaaaaaaaatttaaaagtgagcaaacgaaacgtgccgtgctgcaacaagtgcaagatgaggcgaaagagtcgggcattgaaattccgcccatttttgaattcgaaacaatcgacgaaatacttgcaaacaaagtgagaaatcagagataattaattattagtgggacaggagggaggaggggtaaatcgttgctaaataatatttaattggaaacgaaaaaaacaattagtggtcatttgctgaaaacttttgatactctaaaagtgtggaatttttgatgcttcttaatttctaataaataaactcgggactcaaagtgtttctgggctctattgccacctaaaaatttttatgtaaaatttatgacaactttttctgtcaggacatagcaaaggatgaagatgctcagtcggcaatcattgacgaaattctctggaacactgaacagcgatcactcgagacgagcttaagggaacgatcggtcagcttccaccaacgcgaaaatcatacgcaaacggaaataatcggaaggcatggcaaaatgaaagaacaaaaaagcgaaaggaaaggcaaattgaaattggcacaattaaagagacgacaaaaatga

SEQ ID NO: 83002 - DNA, 1378 bp, Heterodera glycines
  unsure (1)..(1378): unsure at all n locations
atgccgaatttaaaaagaaagtctgtttgtttccaaattttcaaaatttattttcttcgttctttagcgctttcacattgtcaaagatggacagcgagaagcagcagtttttgctggaaagggtgtacaaactctaaatgtacaccatcaacagcagcaaaacattgacaatgaaactgttgccaggccgaaacaaacgccaatgttcggaggtatacgaacattgggagcaactcgtttcccctcgccatttcatataaaaaatagtatttttttcaaaaaagtcttcgaaaataattttataaaaaattaaaataagcataattaatcctaaaatttagaaaaagccgattaaaattttttttaattagtcagataattttctgatttttttaaatcgcattttcccaaggctgcttatattgttattagaatatttaatgctttacgcaaaatttttcagggccaacgaatgcgcatcaacgtgccattcgtgaagcatttcgctacgcgtggaatgcctacaaaaaatatgcctggggccatgaccaactaatgcccatttcgcacagctttcatgaatggatggaatgcggtaaatattatggtcttatttcatcggttaagccaactgggaagaacgggcaatgatggtgggaattttttttaactgggtccaccccccgcccgaaaaaaattccatacatttttctccgttttgctctgacgggatcgcaatctcgtcgggattttcccgcgaccttggtattccgactttaaaaaaaaacttggaatcagagttctgacaaaatccgcaattgaattctcggtaattctacccggcataattcccaattctgctcctgtttttttctatataaaattccagcctctaggtcacagcacacaggttttatctgggttttttggactaggtcttacaatcgtcgactcactggataccctgttgatcatggatttgcgggacgaatttgcggacgccaaacaatgggtggagacggaattgcgctttgatcgtaaccgttttgtcagcctgtttgaaaccaccataagggtaaatattagaaaaattagtcattgtttatggtggcaaaattttctgaaattttgctactacccgccactcaccgaaaaaaaattaaaaaaaaatttttttttcggatattaaatagtggcaacaaaaatttcaggttctcggaggccttctcagtgcctaccatttgtctggcgaacaaatttttctcaccaaagccgaggatattggacaacgtctgtttcccgccattagncagtcgccaaccgcagtgccctacaggcaaatggaaaatcgggcttaaatgagacttatataaataaa

SEQ ID NO: 83003 - DNA, 1161 bp, Heterodera glycines
atggaaaaagctcgaaagtcaacgccgccgaggtccatgactttggaagcacttctggaagagtgccgttccattcaatcgcttaaaaattcggctgccgctttgtctggtcccggacaagttcattcagtgcaggtccgaccgcaacgagtaagcgatggaagtaagaagtctaaccgaggtaaaatggtcaaccaaaagggcaatgtttcggttccaatttcgaaagagaataattttcctttcaattcaaatagaaccgatcaagatcaaaatgtgcagcaaaagtgcaagcgatgtggtcaattccatgtcaacgactgtccttatgcagccgatgtgaattgctaccgctgtggaaaacgtggacacatcagacccgtttgtcctgaacgtacgcagtcaaacgctgtcactgtggcctcaactttttgtgtaactcaaaagtgccacgattggatttggacacatcctctgatcaatggacatcctgtcaaacttgcggctgactcgtgctcgcatctgacaattattcaggagccactttggataagtttggggagtccaaaattgagaaaacaaggtaaaaaagttggtagtttttccgggcataaattaaatttgttgggcgaattcgattgtttggtgaaatttaaaggtgttgaatttaagctcaaatgttcagtagctaacaccggagctccaaacatcatgggacttgattggattgtgccgtttgagaaggctacgcagtctcccatcgcgacaacattggatttgtcaagcgccccaacaaaagtcaacacaattgatgaacgtccccgtcatttcaaaatcggtgacactgttcgtgtgttgaactatggaaaatctggcaagtcaaattggtttgaaggcaaagtcgtcgctggtaaaggtctgatttggaaagtcaaaattccacttttaaatattactgtcaacagacatgtaaaccaaatgcgttcttttgtcccttatcaatcagaaacgacgtttccgaatgatacagttgaccaagttccgcaacaaaagagtccttgccacagcactgtcacgactactccgccgaccaacttgccagttcaaccaacgcaacgtcctcagagacaacgccgtccgccgatacgttactcgccgtga

SEQ ID NO: 83004 - DNA, 1640 bp, Heterodera glycines
atgtattacaaaattgtgtctttttacggttttcaagcgaccgcatcatccacggttttaaaagataccaaatctgttagatttgctcaacaaaaagttgtgcttttcgaacttggccgatggtgagtgtgatacgaaatgaaccctctcaccgcaccacacaaagatatatggtgtaatacattttccctgggactgtttcatggtacaggggacgcaaaaaacgaacaaacaatgggtttttgatcgtattgtaaaacattgagtttgtttcatcccttttttttggttgtatagtgcataaataacaccatatttggcgctttttagccaaatccggctaccaattggaagtgactgttggccagcgcaaataccactcaccgcccggctacgaggggccggacccgaaccaaacggacggcggatgtgtaagtcaagcaaacaattattgtacatttatacaaagaggggaaaaattggttgacacatttgtaagacaatatttaccaaaattttgctacactttgggccaactactgttttaatgagcactaattacaacacatttcctcccccctttttttacagatatacattggccaaattccaaaggatgtgtatgaggacatgcttgtcccactgtttgaaccactcggtgtcatccatgatcttcgtaaccatttttttttttttgaattattcttgcaaaaattccatgtcctaccctattcgtttgcatttttcatggaaatttgcaaaaaatctttttgaaatgagggccctcgttctctcgtgcctcagcctcaataccgaaattcccccccccccttcaattttttccatttctgatatgaaacctacttccccggtttgttcaggtataatgatggatccggtgaatgggaagagccgtggttacggttttctgatctatacggacaaaacgcatgcgcaagaggcagccaaaaaggtatgttttcttcgtagttacaccaaccaacagtgtactcaatttgttgccaccaaaaaacgtattggaaaaacagtaagattgtacatagttcccaattttgtaaaacttggcacaaataatgacatagcatgatataaccaaaactggcacaagtaatgccatgacataattttacaaaagtgtttttttggtggcagcgtttgggtacaaacaattgcaaatcttgtcttaattattctcttcttgatgcatttttggcatttttattttctgttgacatttttcgcttatatttttcggcgcattatttttacggttttgtgtatacggtacattgaagtgatgtgtaccccattgccagtgagtttttttgttgtgatgttgtacggcttgcatgtcatttccccacgtcccgtcgctcccgtttcacacatttccaacatcttcgacgagtacaccccccaaattccccaaccccaattccatccctcattttgatggaatgaacacaataaacacaattcattttcatttgtggagagatgcgcatcataaaatctgatggctctcttttctgttttcatttttcaacaaaaaatttttttctaagaaaatttttcagacaaatttgtgccaccaacaaacacactcacacattttttag

SEQ ID NO: 83005 - DNA, 714 bp, Heterodera glycines
atggcatcaccatccgatttggacatgaaaatggtgccacaaaatggtgacttcaagcacgatgtttctgaagaggtgcagcagcagcaacaacaacaacatcaagaacagaaacaaccgaacgatttggtgaagaacgatgaggacggcggaggggcagaggccggccaagacggcacagcaccgacagaaacagagcaaaagccaagccctgtaaacaatacgataccactccaaaaggaaacgttttttttctgactctaaggcaatattaaatgcacgtgcgccacaatttgtatcaaaaatatgatgcaaaatgacccaaaaattgtctcttttgtgaaagcccggcttaagacaaatgtttagtatcgtcaacttaaaaacaattgaactttttaggagttggaaagcgacaccacctatgatgacactgacacattcaaaatgttcatgggcaagagtttgtccaagccggtggccgtcatactgatgcgcatgttcgacgagctcggcctgaacacggacgagtttgatgagcgtgccgtggaaatgctggccacattcccctttgagcaggccaatttcatcctcaaagagctcaaggttttgctttttgtgcacttttttttttggtttacctgggttggcaccagaggctgttattttgaaaaagaagccgagattgtcatcaggccggcatccggcatatga

SEQ ID NO: 83006 - DNA, 714 bp, Heterodera glycines
atgttgattatttattattatttattttgttatataattaaggtaattgctcttattgtgtaatttttattctcatcgagaccttaaataagtcatgcaattaaggaattattgtaaatacaaaaaataaagggttttctttttacttattatttatttttgtttctttttgttatttcacttagatagttgcacataaagtgttattttttattatcctctagatcataaataagtgatgcatttaatgaatttataaaagggtttacttttatactcgcgctcgtaccaagatatgtgtttgaaagatgtagcgttttaacattttaaatgctaattgctattttggtaattaacactagtatatatgtttttactatttattttcttttgataatttcaaataattttattcagtatattattttggcaatagactcattaaataatatttgaagtttaatttgggtgagcttttgtcattgtttttatatttaaattttagtaattatgaattttatttattatttctttagggataaaattttggaaatagttttttttttaaatttttataagattttgtgtgattttaatttatgtttgtatttctgacataatttattttatatttatagcggattgttcggttcatgatgtggagctgcaaaactgacaagttttgagtcggaaagatcgccgcaccaggcacaa

SEQ ID NO: 83007 - DNA, 1192 bp, Heterodera glycines
atggtgctgcagtttttggaggctcaatttcttcaacagcaacaacaggaggaggacgaggatgatgaagaagaagacgagtcggaggaggaagaaaaggaagaggaaggagagaaggagtcaaacgagagagaaggaggggaagagaacggacagaaaggaggagagcaaagggacgtgcggaacgagaagggggagcaggacgaagtggcgaaaaggtaaacaaaaagagtgcaaaacacggcccaatcccaaatttgaagttcactacatttcctctacccccctccccccacccccgaactggggatcctcctcgtttcggcgccagcccagtttttggactataacttttttctttttccaccaaatctaacattgttggtatcattcgagagcccttctgatgctctattattttgcataattccaaaaaatttgatcaattaagaacaaagttatggccaaaagtacacatgtggcctggttttttgaattcttctagtcataatttttttgagcattaacgaaattttttgaaacttagcaggctaatagagaacacttagagctttcgaatgataccaataatgttagatttggttgacaaagaaaaaaatcacgagagttggcgagaagatgagaggcgagaatttttcaatttttctgtagtcttttttttacttcaaaaaacttcaaaatcgtatattaaattagggttacgggtccgggtatttgggcaaataccgggtccaaccgggttctggaaaatccaaaaaaatcttcgaaattttttcatgaaaataaaagcttatagtttaaaaaattatataaatattttcatgaaatatatttacgagaccgggaccgcaagaaaagctgggaccggaccaaccaggaattttcgaagaaaaaattttttttgaaaaaatccaaaaattttcattaaaatgcatagattaatgataatttaaacacttttaaatatttctctatgtaaatgattgagtatttttttatttaatggtatttttctattgttttaataattgaaatatcttaaatttttgaaaatataaaaaaatttttgttcagttggggaattgaacccaatcgaaaaagaataaaaggcagaaggtttagtcaacagaccacatttgaatttgagttatccaaaaataatgttctttga

SEQ ID NO: 83008 - DNA, 1023 bp, Heterodera glycines
atggaagagttcgccattgagacaactctccacattttggacaataacggtaggacagttgttgccacttttgaacattttcttgacaacaaacgtaagtttgttgatttagttgaattttgggaggaagatgccgcaattcaagcgagattgaaaggggtaagaaaaacttgtgccaatggacagattttagaggtgaataagtatgtccaaggggggatgtacgtctttcaggcaagaattctgctggcatatcaagctgccaaaaatcacgactccgatggcgactttgaattcatttgtgaaggccatgaagttgtacttagcccttgtgaatccgcaacggccatggtcaatcggatgacactgttttattcgaattctttcagcttgatttcgtcggagcagagtggaaccggacaaatttggagagctttgttatcatcctcggatgaacagtccttgcctgctcaaatcacggagacgcgacacatacgtcatccggcattgaagcgccttgaaggtggtcaaaagcagtcggcaatgctcatgcttgatgatcagccgcgcattgttgcacaacaagcgcctcctggcagcggcaaaacttttactttggccgccatcgttgctgctctgctcgaacggcccgatgcaaaatttttgtgcatggcaccattgaacgttgccgtagtaaaaatttgtgaggaattggttgatgctttacgggtagagggggttgccgtaacgccgttagccctattttcaggaaatggtaaagggaaatacagggatcagcttgaccgcatctcggacaatttgcttgaggctgcagccacgtcagaggaattttggaaaaaattgaatgaaaaagagcaaaaggaggtaaaacggtacaaaaacatgcccgaaaaaggccgagaattgccaaagaggcgaaaattgcagaagttgtgctctcaattgaaagcaaaagaattttgtgttgcacattgggttttgcggaacaaattggcagactaa

SEQ ID NO: 83009 - DNA, 523 bp, Heterodera glycines
ctgagtaaagtgaaatgacccggactgaaccaggaaaacccctccagctccttaaaaggtcaatgacagtccgagtttgaccagaattggtcgcagaaaaactagtttcttccgcttccattggcgaatcttggtgaatgagcacaattggagattcagcaattggcattttggcaaaactcgtcaacatcctaaagattcccggtcccgatcttagcctttcaccatggggtgtgtatgccgcatattcaacgcagttgacaatttctggatgtgaacggtagttcacttccaacgttgttttgtccacaccaggagatgagtctgtgttgagtaaaactgtgtcaaagccgaagccgactcggagttgttcagggatgtccttcatgttcacggccagctgataacgatcaccagtgatgaacagcttctgaacttcctgaaggggtgagaggaccgagcagacttggacaaaaggcgcttggcccgattcgtcaagcactatcatgtttctgtccatgat

SEQ ID NO: 83010 - DNA, 48 bp, Heterodera glycines
atgcgcgagcggagggacccgtgccggttgttctgtggcatggcatgg

SEQ ID NO: 83011 - DNA, 2914 bp, Heterodera glycines; identical to SEQ ID NO: 18415

SEQ ID NO: 83012 - DNA, 975 bp, Heterodera glycines
  unsure (1)..(975): unsure at all n locations
atgtgtgccgcgttttttccaattgagacacaaacagcggtaaaaatttaccgaaagagggcagaaattctcgcccaaatgtctgatcaagatctctataagagatttcgatttgacagggaagggataaaggtaccatttttataaattcatttagaaaagtaaattaagtacattactaatttggtgcgtgaagaagttgagtctaacggccgttcgagagggggagcaattccggtagagttgcaagttgttgcaactcttgcttatttggcatcaaattcttttcaaatgatctgtggtgatttgctgggatttgatcaatctacagtgtcccgatcagtgctaagagttactacagcattacgaaatttggctggaaaattcatttattttgctccttatgaacaagtaccggaattatgaatgaattttggtcaaaaaattagtaccctttgcaggccagagaaataattataccaagcttttataatgttgctaattttcctggtgtaattggcgccattgattgtacacacgtgcgaattattcctccagcatccgctcacgaaaaggactattttaatcgaaaaggatacccctcgattaacgtccaaggtacaatacatataaaatggacagaataattcattagcaatgtgattaggtgttgtcgatcacaatggccgattttcaaacatttcttgccaatggcctggttgcagccacgatgcctttgttctccgccagtcaaacgtatgggaagcatttgaaggtggccaaatccaaggaattattctgggtgatagtgcttatccaacacgtcgctggctaatgacaccttttgcaaaccccacaactgctgctcaancacaatataattatgcacatgcnaaaaacagggttattgtcgagaatgcatttgngagatggaagcggcgattccatattttacatttcgaagtacgaattaaa

SEQ ID NO: 83013 - DNA, 372 bp, Heterodera glycines
atggtggctcgcttgatcgcaagagaacaagaggaaagtgccgaattttcctcacagcaagttgttgttgaagaaggaaagtcctatgccgttcttggcactgtgccacgcggagaggcggtgaaaactccaaaatttgaatcaagcacctctcgcgtgccattccgatctcgtgccggaactgcttcaactgttacagctgctgatgtaatggaactgcagcggagtgttctcgagatgcaattgaaagaaatgacaaaaaaacaagaaatttttaaaaaatttgaggatgttcttgacgatgttaagacattttttactgagggtcgcgaattttttcgtggaaagcattcaaatgagaaagaaacttaa

SEQ ID NO: 83014 - DNA, 314 bp, Heterodera glycines
ttctaggtggttatgcgacagcacgataggtaattgtacatttatgtaattctttcgcttctgatcatttgcaatcgccgcacgttatggaacacacccttcgctgtcctctgttgaaatttagtcgtcccacttttggcatcgcacagtccatcgcccttccattggatgtatctgtcatttttggcgattcgtggccattccctcccttcgtcatgcttttcctttccttccctcccttttggctttttccaattacctattcccctctgtccacacattccctccctcccccccgctgctgctgttgtttc

SEQ ID NO: 83015 - DNA, 578 bp, Heterodera glycines
ttgtatcaaaaatgcaaagaccgataatcgtaaatataattgctctcgctaatctcggtaccggaattaaactaaactctctgacgatcaccgaatgcgaatttaagtataaccctagaaaattcaatgccgcggttatcaaatgtataagccccatcaaagccacggcattattatgggaatccgggaaaatgatatgtctggggacgaaaagtctgatagactgtgaaaatgcgataaaaattttcatagaaataattaagggctcggggtgtccgggggcttcttacacctgacacacgattgaaaatattgtttcgacctttaaattcggacatgaaattgaactgaacgaattcagaaaaaatcgtcgtgcattttatgaaccagaaatattttgcggtttaaatttcaagcggggtaaaagcatgacagcgttaattttctggaccggtaaagtcgtaattacgggaactaaaaacaattctgaaattgaggaaatgtatcatcatattctcccctatttgaaaatggctcaaaagaatttaatgagacgataaaaatttttatttattgag

SEQ ID NO: 83016 - DNA, 134 bp, Heterodera glycines
atggctgtggtccgtctgcgaatgttcgcccatcgaactgcactcgcagcagccattcgactcgagcaaacgccgcacattgtcaatcggaccttttttcaaaacacattttgccaatcccttgctgttcgaga

SEQ ID NO: 83017 - DNA, 915 bp, Heterodera glycines
atgccgaacaaaggttggcaagagaattgttgttttttttattcatattgacaaattcggattcttctttgatgccctcctgctgttgctggtggtgcccgtttgattcaaacccagcggaattttaaatgcgtaaatttacggttttttttaaatttgtctcagttttttaaccaaaatttcagcccaactaaagcggaacatcaaaacaatgtgcaccacggacaatgaagaggagaaagctgagccgtggaagaagttctgcaaaatgttttcacgggttcaggtatgtgtcctcaaaattattcacctaaaaagacactttttcaattagtcgttcaagtgattggccgaacatattattatctcattatcacttccgaaatcaaaagggacgtaaattctttttttaagatgtccttttgcttggttttcttgctcctttcattttctgtgttatgttgcgcctccaatccaactcttaccaacaaagtttgtgtttctttttttttgctttaaattcttttttgtaactgtaatattttcattttccagcaaatgccgttaaatgcttccacgcccgtcacgcctaagcccccgttttggctggtcactgatcccttttggcgtcccgtggtcatgacaatgttttacacaacccttgtcatgtgtggcctccttttcgtttttgtctacgcatattcatactcatttattgcctgttgtctcgtatggcagacgatggaagagttatattgcaaccccgtaatgatattaaattccctaaaaagacgaagaaaaccgtcccttatcctgctatattgcttagccaatggaaaacgtttagacttgtacgtgtgtaactgatttacacagaataatgcaaatgttggagccttgcaagctcaaaataaa

SEQ ID NO: 83018 - DNA, 916 bp, Heterodera glycines
atgccgaacaaaggttggcaagagaattgttgttttttttattcatattgacaaattcggattcttctttgatgccctcctgctgttgctggtggtgcccgtttgattcaaacccagcggaattttaaatgcgtaaatttacggttttttttaaatttgtctcagttttttaaccaaaatttcagcccaactaaagcggaacatcaaaacaatgtgcaccacggacaatgaagaggagaaagctgagccgtggaagaagttctgcaaaatgttttcacgggttcaggtatgtgtcctcaaaattattcacctaaaaagacactttttcaattagtcgttcaagtgattggccgaacatattattatctcattatcacttccgaaatcaaaagggacgtaaattcttttttttaagatgtccttttgcttggttttcttgctcctttcattttctgtgttatgttgcgcctccaatccaactcttaccaacaaagtttgtgtttctttttttttgctttaaattcttttttgtaactgtaatattttcattttccagcaaatgccgttaaatgcttccacgcccgtcacgcctaagcccccgttttggctggtcactgatcccttttggcgtcccgtggtcatgacaatgttttacacaacccttgtcatgtgtggcctccttttcgtttttgtctacgcatattcatactcatttattgcctgttgtctcgtatggcagacgatggaagagttatattgcaaccccgtaatgatattaaattccctaaaaagacgaagaaaaccgtcccttatcctgctatattgcttagccaatggaaaacgtttagacttgtacgtgtgtaactgatttacacagaataatgcaaatgttggagccttgcaagctcaaaataaa

SEQ ID NO: 83019 - DNA, 7003 bp, Heterodera glycines
taaatttacgcatttaaaattccgctgggtttgaatcaaacgggcaccaccagcaacagcaggagggcatcaaagaagaatccgaatttgtcaatatgaataaaaaaaacaacaattctcttgccaacctttgttcggcattctgcttttccctgggtaaaattcacaatttttgatttgctagactcattctctaattagctaattagtgtaaattatgacagtggcccaaattttgcattttaaaccctatcaagcaatgtccactgtccgccgcactgtcgtccgcggtgcgtccgctctcgcatttccgcgcattgttccgcttgcttccttctttacggcgcgggcatccgtttttggcacacctttccgcgcttgcgcccgactcagtttttccacccgcttcatctcctattcatcgcttttccgcttcaacttatactttgcgtgttgacaaagtttatgcacaatgatttacaatataccaaaagttatgaacaagtttgtttttccttttaagttgctctttttttcatcctgttttgttgttttactactgtctcttctgccgatttcgactttcgagtaaataaaccgcagccaagcggactcgaaccccagacccccttctcatatgacccctcggtgattagaattgatttttatcaattcatattttttgtaacatcataatttttaaaaaaaattttgatatgtaacattttgccataaaataaaaaaaattttaatttaaaaacaaagaaaaaattctcctttctccaaattcttcacttttgttagttatttcccttggaagtcaattaaataatttcaacagtgaaaatttgcaacgtaaattggctgttaaatcgatgcttaaacttatataaaaatcatcaataacagcattataaaaaacgatcaaatgaaaattttttaataaaaaattattcatatttgcccaaaatcaactaacctgcttgcttgtgtacttttgtctataactttgttcaaattaaacaaaatttgttgaaatttttaggctaatagagaatttttagagctagcgaatggtttcaagactattccgaactcggacccgaattcgaacaaaaagtcgaaaatccaaaattttcgaaattcttacttttgttcctaaattgatctaaataagctaaatttagtcagaagccattgcaacatcaaaaatggtcattttttacagggacgaacataaaagaaaatttcgaactgccctgccagttggagtgtgaagttctttgtttaaaaaataaaaaagatattgatcatttttatcctatgcaataaagcaacatttttcattcattcaaaattggtttcatttaattttccgtttcgcgtgccctgtattatactacatttttcctctccaaatttagctgcaagtgctcggctacgacatttcctggacaacatttaacatcattgaagtgatgtcgagcacgcgttacagcgaaaaacgcattggttatttggccgcggtgcaagcattcaatgacgaaaccgatgtctgtgtttagggccctggtttttcaaaaaaaaatttaaaaacaccagtgcaggggggtagacagacttctttgatacaaataggttcaattattaccaaaattctcaaattttttcatggcagcgtctgatgggtcactcattcctcgaaattttttctcttgttaaaggccgaaaagcaaaaaaaaaaaaaaatcgtcgcccaatgcggcctaccccccccccccccaagctagggctaaccccctcctcttttgcttttttcacccttttaatttttttaactgcgttttttaggtgctcatgttgacgacaaatcttatccgaaaggatttgcaaagttcaaacactgatgatgttggcgtcgcactgattgtgagcggactttcctgtttcaccaccaccgatttggtgctggacaccgcagaggaagcaacgttggcatatgtttttttggtggacaacaacggcatcggcatcgcttgtttaagtcccaggtcaaaaaaagcatatggctgacaaacgccatgaattctggcaaattcataaaaattgagttgcttgccaagaattctcgggtcgttttaagagagaatttacaaaaaaataatttccttaaaatctgcactgttttgaagattgtacactcggggagcagttgctttgttcgccgtccgacgaaccgtgtgccatcgaatttcttccactctgctactctccaacatttgcgtgccattcgccaggccggacgagttggttcaccaacagctgctgtgctacatcattgactccgtgccgcatcgtgcccttcttgaaactgagcccggcacaccactgatgcggcacttctgggcgcgacttgtgcgtcgacagaagagcggcattggcacggcaccgttggtgaaggacgcgcagcgacaagtcagtgctgcgtttgaacttctgaatgcaataatttaagctcatatttttgtcacaatttagagcaagtttataacaggaggccgatcgtccttattcataagaaatgttctgaattgaattcaatttccccgacagcgcctgccggcaccgggatttgaatccgacccagagaatcaaatctctattatatccggatcacatttgtccgcgaaaattttgtttttgggttcattggagaattaatagctaatctctttgtttttgggggctgaggggaaattctcgtataaacataatttttgccaaaatttactaatctcgggcttggcccactttttccctccccctcgtttgactaatcccacaggcattggcatcttatcaactggatctttggtggaaatgtgccgtctgttgttcttccactcggccccctcccgccactgaacatcacatcccgcccgtcttcgccatcggcccaccgtaccatcgctcgcccattcgcccgcgcccgccccgccctttggcccaagcacatataaaagaaagatggatgagtctcgagatcataaccttttcctcttcgttttttgccctgctcttcgaagatcttcaactctctacaaaccccttttttcaccactttcgcttataaattttgggaagaacaaaaaaaaaatcaaaaaaaaaaagcggtacacgccccatgggacaatggacctggccaagttggaccccaacactccaagcctccaccacgtcccatagagacaataagacgtgcttttccagtggtgggggagacaaaaaggggatttccgaatcggttatgctcactgtgcctacgggagggacatcagccctccaactgtacggcctatcgaacggcggaccagcgaagggctcgcctcgctgaacaagggcggtgctccctttgcgcccgggaagggcactattcagacaattgctcgtcacgggcactttgctttcgatgtggagaaaaacatcacgttttggtatgcccgagtccggaaaagacacctaccaaggggagcaatttggctccgttaggcacccgtgcaccaggcggaaggacaccccagtgggaaaatgcgcccactacttcttcggcatccccccctcagggcaacagaaatggcactcaaattgccttggcaattgctgagggtgaattttttgcccctactaatgagttttacgccgaggaaaaaccccgaccaaaggcctatctcatgatcaaaaaaattcctgtttttaaccctaatggaccctctccgatgccggtacctgtcttttttgacccgggttcagcccgctttcatttcatcgcccctcgtctcgcggatccgccctcctctgatgtcacaagaaaacatgacagttgggggcttcttgtgggatggaccatcccacacaatgaaatttgcttcctctcgtttttctgtccgcctacgtcggaaagacggtggttgggagactgtggaattgaatgagagtcccaaaataatcctatcagtcgagtttttgagggaaatccattggaacccttccgaaaacgtaaaaatgggagtgacagttgaggagccacaaattttgcttggaatcaaggaaaacttcgggtggtttatgacgcttccgtgcatgagaagggcaaaccctctctcaatgagctgctcctccccggccctaatttagtccctgagttggcgggggttttactccgcttccgagcctcgacctgtccagtgctaggggatatagaaaaagcatttttggccgtgggacttaaggaggaggacagagaagcggcaaaattcctttggttgagagacccctccaaaccactgaccccggacaatttaatcattttccgtttcaaaaggattgcatttggcgtgagttcttctccgttccttctggcatctgtcctgcgctaccatttggcctctttgggggatccattggggctaatgagcaacttttacgtggataatttgcttatttgttgtgaaactgccgaagaagccgccgaatctgtacgcaaggcacgagaagtgatggcccgggccgggatgcgcctccatgagttcgtagccgcaaatcgagccgttttacggggtctccctaccgaagaagtgctggtgggtgatgtccaaagggtcttgggcatttcatgggatttgtcaagggataaactgatttttgagtttcctaaggcggttaattttcccccgactcggagaggagtcctgagctcaattgcctccctctttgaccccttagggctatgtagcccgtgcctcgttaaggccaaggtctttttccaatctttgtgggattaaaacacgggatgggatgccccgatcggggaaacgctcttgagcgaagtgccgttcacagacaatcccccctcaggcaaaaagagggaccaacggcgacaagggattttgaagtgggctgaccgccctccactctcaaaaaggcccaccctcggagccgacaaaggcaagcctatgcattttcactgggcgacgcgcttgcccttaatcacagtttttattccaattttaacccttttttgtggtacggatgctgccacccgggctctctcctgcgacgaacagggaatttgggtatttttgaacccacaggcggagaatagcatagtgtgctgtgagggcatatgcagcagtaggggaaacccttcaccctatctactgccccttcccccggacctgttggcaagcgcttttgagtgccacatctcctattcaattgcaggggaaaaaatctcatcacaaattcagtgcgagcccgtggaggggtgtagcctcatcaaatgctatttgtgttgggaaagagtccttaattcccattgctccccgttccttcttgcctttgcggtcggcaaatgaaggcgaggttgtcatacgccatcggaacttaatagggggagtggacccacccaatcggtcggaagtcgccggtcccgaggagttttcccgtccaatctcgccccgaatggatgcaaacaatccaaaccgtttaactcgtctaagttatgcgttagccccaacccttctcgcatttttggccattttaagtttttccttaatttcttcggtaaatggcggcctggaagtagtgtcagtctcagcagacacggaggagtgcattgttgaccatggggggacgaaatgcctattcaacagtgtcacctcccttactcttttacctattggccaaagggtggaattggttttccataccccccatacagtacccatgggcagtctatccttcgtcctaaaagggttggcccttcggtgcatcagagaaaccagcagttggacccggtcataccgactcaacatatcctcaatgctgcgttgtcctgcagcagggtcttgtacgggctccttttgttctgatttagagccctatcaatcagtaccagatttaagtgatgcttttccaggggtcaatttttgcaaggaagcatccggttttatccgccagggatgtctctcgccttcttatgcgtgcttattttacagattgtttgcggcgcctctttccccctacccctatgagctgtacaagtgccctgtttggcaattccaattgagactcgggattattttgcagcttaatgggtccacaaaagctgaagaaataactatgtctccagggattacccaccattggccgttagctaagttgtctgtcacctttacccccagcggtttgccacccttaccaattttgggaagcgattttattgctaaccgttcacatgcggcattggtccccgaatggcattgccaagaattctcgggtcgttttaagagagaatttacaaaaaaaaataatttccttaaaatctgcactgttttgaagattgtacactcggggagcagttgctttgttcgccgtccgacgaaccgtgtgccatcgaatttcttccactctgttactctccaacatttgcatgccattcgcaagggcggacgagttggttcaccaacagctgctgtgctacatcattgactccgtgccgcatcgtgcccttcttgaaactgagcccggcacaccactgatgcgccacttctgggcgcgacttgtgcgtcgacagaagagcggcattggcacggcaccgttggtgaaggacgcgcagcgacaagtcagtgctgcgtttgaacttctgaatgcaataatttaagctcatatttttgtcacaatttagagcaagtttataacaggaggccgatcgtccttattcataagaaatgttctgaattgaattcaatttccccgacagcgcctgccggcaccgggatttgaatccgacccagagaatcaaatctctattatatccggatcacattcccggcaaattttggctgggtcccggtcccgtaaggcttctaaaaacaggaaaatgtaaattctcaatcatttgtaaaaaggcaattggatttttagcccatgttttttgaataac

SEQ ID NO: 83020 - DNA, 724 bp, Heterodera glycines
gccattcggggaccaatgccgcatgtgaacggttagcaataaaatcgcttcccaaaattggtaagggtggcaaaccgctgggggtaaaggtgacagacaacttagctaacggccaatggtgggtaatccctggagacatagttatttcttcagcttttgtggacccattaagctgcaaaataatcccgagtctcaattggaattgccaaacagggcacttgtacagctcataggggtagggggaaagaggcgccgcaaacaatctgtaaaataagcacgcataagaaggcgagagacatccctggcggataaaaccggatgcttccttgcaaaaattgacccctggaaaagcatcacttaaatctggtactgattgatagggctctaaatcagaacaaaaggagcccgtacaagaccctgctgcaggacaacgcagcattgaggatatgttgagtcggtatgaccgggtccaactgctggtttctctgatgcaccgaagggccaacccttttaggacgaaggatagactgcccatgggtactgtatggggggtatggaaaaccaattccaccctttggccaataggtaaaagagtaagggaggtgacactgttgaataggcatttcgtccccccatggtcaacaatgcactcctccgtgtctgctgagactgacactacttccaggccgccatttaccgaagaaattaaggaaaaacttaaaat

SEQ ID NO: 83021 - DNA, 372 bp, Heterodera glycines
ggagcaaaagagaattttgtgctaatttgggttttggtgaatggctttggcatctatcatttgtgcttttatatgccatgatgtctctgcccatctctgctgttgccattttgtttctcttctctcagattaattgccgttcatctgtccatttgattttacttgggttaatttgagcggctaaatgccctcctgctagtgaatggggacgggcggcattttctttgctcgcacaatggcactttgggaaaggtaacttaatcttcaaccaaaaaatgaaaaacaaaaatgaatgggtttgatttattttctctttaggccgaaagtgatcatttaaaagtgaatttttataaaaattaagcatatgtctaa

SEQ ID NO: 83022 - DNA, 560 bp, Heterodera glycines
atggatttgcatttaagcgtaagtcaaaaaatggagggctataatttgtgttcatttagttctgttttcattaaattttcaaattctagcttccgcctttcaccgatttcactgatctccgccccgaaatatttgtccatccgtcgtacggatcaaaagaagaccttctcaatctgttgaaccctaaacacattcgccaggtaaaaaaaggtcgaaattaatacgatcaaatttagaaaattttcattaaaaatcctattgttttagcaaaaatttcatgaaaaatttaaaaatttaaaagtcctaactccaaaatttggcatcattttaatccgaggtccgctaaccgttcagttgaagaactttctgcgcgaaaacaattggccggtcagccacgaaattcggagggacctttggcgcgtgttggtctccaacggggacaaggagttcgactcctcacggcacttcttccacgaacacattgacactttgtttcgtggaaagggtaaaacggcgacacttttcccacggcgtcacaaagggatgggccaaaaaataaa

SEQ ID NO: 83023 - DNA, 115 bp, Heterodera glycines
atttcaattttgccttcgctttaaaaataaaaacaaaaaaaaaccttttctcttttggctttacattaaatttctccgcgtttttggcccctgatcatttctggggcatttctca

SEQ ID NO: 83024 - DNA, 2777 bp, Heterodera glycines
  unsure (1)..(2777): unsure at all n locations
tccgctcgtcccctccccccagcggtgcccctccgactccgtcgtgtactcttcccaattgcncatccaacagccactctatcagatttactaccttcgtcctgctgctgctgacccacttcggctggccgcctcctcctctccctcagcttccatttccgcttccgacccgagctcctccattctcaccactgtcgacgatatttctaccgccgttgcgcctctccgattagaaaccatcgcggaactcagcgggtgggacagccaatcgaaatgcatcgccggaggggaagaacagcgggggacgaacggacgagggacgcgcaatgagcaggacaaggtggaggagacggacaggtcggcagaggaagggaggatgcctcagacggaaggcttctactgggaattgtctctgaattaattggcgggtccatcggccgatcccatcatgagatggcatcatcagccgatcctctatagggtgatggcatcattgcctatgggatggcatcatcggtttatccccaatgggatggcatcatcagccgatcctctatatgctgatggcatcattgcctatgggatggcatcatcggtttatccccaatgggatggcatcattggtcgatctcctagcgggtccggggaatgccattctccccatcaattccgattatccgctcgttgtgattggttatgcttttttagcgtttgcaatgatcccactgatatcgcaagtgtcagctcctcctctgccgtcgttaacattcgtcgtcattcgtccaccgcctcatcgtccgccgattcgggaagaggtcccaaatttgatttttttttgtccattgttcccaaatgcttttccttgccctttcacttcttttcccgccgtttttcagctgattcgctctctcgtatctcctcatatccgagcactcccaacactttgccggtccgaagggaacgtttgcttgggggcagcaaatacggctctcaacggtcactttggtgcgaattgcccggtaattaattgtccacattaattacagctattaattatttaaaattaaaatactcaattttattccattaattacttcgcactctttcccttttaagaagtgaaagaagcgggccttctcgaccaattggacgacggtcagaagaaattgcaggaggcctatttcgaagtcggctgatttttttgggttttccttaaaaatcgctttttcgccaggtgatcacttccgaggcctcctatctccgatcgctctcttttctcatttcccactttatgtcctcgcccgaattgctcggctcaaagagtgaccgttccatcattacggtacgtgtgaatgaatatatactgttttttttactgtcaaattttctcgtttatttttttacttttcagacttccgagaggaaacatttgttcaggtggtcctcatattagcacaaatagtcccattcatttgtactttttctcagtaatattgttgcgattcgcgactgcagtgagcgccttttgtgcgacttggagacgcggctgaaggacagtttggtgctgagcgaactgtgcgacatcctttgctactattacgagtgccatttcagcccatacatcagctactgctccaaccaagtgattgatcaagcccacatcctaatttgagccatttacattccattgcttaaggtgtaccaggacaggaccctcaaggcgttgaagttggtcacagtgtttgaatttttctttggcatttgccttgatattcccttcccccccccccaaacagggcgtccaactcgctcttcttggcctgtattcagcgtctcgagacggaccgccaatgccaagggttggacatgcgctcttttctgatgctgcctatgcagcgaatcactcgatatccgctgctcattttcgccattcgagaacgactccatcccgacaaaatccaacactccgtcgccacgcgggcgctgactttggccaaccaggcaagcgaaggcgcggaaaagcggagacaatggcacattcattcccttcccttttccgtttgtgcacaattgcaacgaaggagcaaggaaaatggcacagacggagcaactgttggagatcgacgcgaaggtcgtctacagaggcagcgaattgcgccgcgttccgctggtgtccagcgggcgttatctcgtcaaaagcggacgcctctctcagctggtggtggagcgccgtgggacgagcgcactgaaaacgcggcatttggtaaaataacgaattaataattaagtattatttgattaattagcgcttaattaattaagtgattaattaacgtttcaatcatttgcatatttctaccattgatatgttggttttgttgtggtgcagatgctttttctgttctccgatctgttgctggtcaccaaagggcggaccaacggcactttcgtctgcaaagattacgcccttcggcgcttcgtcttcgccgaacccctcgaggcaaacgacgcgcgcgttcccttgcgcgcactgcacgccattggcagcagcagcagcaatttgcacctgatattgtgcactttagcgcagaatgccaggggcaatcagcagatggaactattgctgaatgccgacagcgaaagcgacagagaacgatggctgacggcgatgagaccgcccactgtaaggaaaacgaagttgggttggggggagccatgagagaggaagccaaaggagaggaaagagtgccaagggcgaggaaagagtgccaaaggag

SEQ ID NO: 83025 - DNA, 1446 bp, Heterodera glycines
ttatcgctacttttaaattcgcagtcgcaagaatgcgtcttcttatcaatacaacggatgcgacggaaattcgaataatttctgcgacaagggacgattgtgaggtaataagagagaacggaagaaaaaatgagaaaccaatggcagagttattgcggagtcgggggatgcccaaacggagggacgccggagagaaacgaattcggacaattaatcgtttgtgggacgggagttaattgcccatccacgcacgaggcgagtgccattccaagggaacgtgggcggggggcggcacaggttgaaggctcacaaatggtttcagtgcacttcggtgaccaccggcacaagcgtgatcaaccgctgctgtcccaccagaggtgctcattagcgtaattggccactaatgagtgtgtctccctcagcttacatttgctccctgccgcctcagcagggcgccacttgcagttcgtccgcttcgtctcgctattactttaacattgtcaccaaagaatggtcggtccgttcattcataacacaaattgacagatgttcgttcgctttatgaatgtttagcacccaattcacttacaacggatgcagcggcaatttgaacaatttcggcaccatcgaacagtgcaacaatttttgcctttcggccgcttgtactcccggcgacgtggcttatgtgaacccaaacacaaaggtcgccctccccaccccctaccccaaagttggcatttgccctctcaacccggcacctttttcagttgccattcgagtgcaattccgcgctgagcaacagctgccccaacaactttgtctgcacctacgaccctttgtccacgaacagcgtctgctgcggtgccacaaacatgggtttgttcagtggatttgcttcatttctcgtgggttatttcttatggtattggtgttgtccgttttgatttccccttggatatttcatctttccctcttcctcatggctttttcttttcccatttcccctcaggcgtttgtcccgagggtgaaaaggcctatgtgaacgcgttggacatgagtgtgcgcgagtgtctcattaatgtggacggaagttgcccctccaattatttgtgccgtttcaacgcgcccaaaaatcgctattactgctgcgcgtccatttcaggaggtgctttttgttaaggccataattcaattcatcacaaaatattcactacagacctttgtccgatcggcaaagcattggttaaattggttatccattcaaaaaaaaatgtcccatttcaaagtatcgcgatccgtcctcaaaaatggcggttagatgtgccatcaatggacccaacaacccttgcccgtaattgatcagtcatttctgtgataaaaatattaatttctttcttcattagccccacttattcgtgccaatccgaagtgcaaagtgctttccag

SEQ ID NO: 83026 - DNA, 1294 bp, Heterodera glycines
gagggcatttatcgtctcatccacattttccggcagagcggtggttctttcagcaagattgatctactcgagaaaaagtattcggacaactacggcacccgtttgaactccaccgaggtgtaaagaattatacgttcgtttttaatactcttttttttgtagcgaaatcgtcttctcggtgccccggccgccactcgcattgccaaggactccttctcaaaggcggcctacccgggattatttcgagtcaccgagcgcatggccaattattacggagtcaatttgttgccatgccttacaggcatgaatttttcgcaaaatttgtttttcatttaaaattaatttcctaggcaactgcgtggatccttcgttgttttggtctgcttctcctcctttgagttcagcgccaagccgtccctccacctcagcgtctatcaaaagggaaccgccgtccaacgtaccatctccggcgcattccgtggacacaacagcacggaagcctattggcggaggacaagtaaaatgctctatctaactttttggaaattctgttttttgaagactagtccatatattttaactgtgagcagataaaaaacaaagcagaatccacctccttccctttctgaaatctaaattttgtcaaaaagaaaataattataggattgcgaaagaggccctggttttattattattattattattatcagcccaagcctgctgatgacatccctcaatttacgcacttctgtgggcaaaaaattgagtctgtgctgaggtagtttctttttatcattatctttttaaatgcattcatcctttttagcgcttactccgatttgttggagtctctgaaagaaccgccactttctccgccgttcactgttggccagttcgtgctgttccgtcatgataaactcggcatgtgccacgggacagttgtgcgtcaggacagtcagcatttggttgtgaagcacttggtcacgcaagacgcacactatgtcaagatggaggccattttcgcctttcccgaccaacttttgaaggtgatttttggtattactcaaaaaagactgagagccattttttacgacgacttcggtcatttctttgaaaaaatgggcagtttgcttaggctgaacggtatttttcttcattaaaccaaagcttgctgctttatttttaggagtgttcgacaaactctcgtcagccacgcagcgaaatggcttctcatccgggcactcaactcgcttttgctgtgcccattagtgagcagtttttccaccatttttga

SEQ ID NO: 83027 - DNA, 345 bp, Heterodera glycines
atgactcgagagtatgctgacagcgaaattttggagtttgtgtccgcgggtccgaagcagtacgccttgaaacttagaagaaagaaggacggtgtgatttggcacaaaaccaaaatcagagggatgacattggatagacgaaacgaatttaaatatgatttgttcaaagagatggtgttggattacaagaaaggggtcaaaaaagtttttcactacccggagaagattgggccgacaaacgacttccgggttctctcaaaagatgtacaaaaagaatatacgccggtgcagaaaaaaggaattattgacgatcactttaatgttttgccctttggatattattaa

SEQ ID NO: 83028 - DNA, 647 bp, Heterodera glycines
atgtcaaagaaaaacttccaagaaacttcaaaagaaattcgccgctcgaaaaatacaaaaaattatttcaagaacagtgctaatttgggaaaatgttttgaagaagtggagagtcacataaaggaaaataaaaaatttgggataaaagagcacgtgacaactttctattttaaatgccccgaaaatgaagatcccgaaaaaatgtttaaaaaaatcctgaaaaaattaatgggggatgcaatgagccgagaagatgagccgggctggaaaattgagaagatttcagtggacctttattgcagtgccctgtcagacccagtgatcatccctgcccgccccttccaacaatcgaacccagacattgttttcaatgagttcatgcacaggcagcaatcatttggggaagtgaatttgttagaccagagaatttcaataattattgccacttattctttccctgttaaataaaattttttcatttttccctttcattattttttgttcattccattattatttattcgagttttttttctttattaatttttcagttaaaatgtattcgtttcaaaaatattttgtggaggctctcgaaaaagaagattttttctggcagaaaaacagagcagaagtggaggcattgttaa

SEQ ID NO: 83029 - DNA, 2339 bp, Heterodera glycines
atgaacagtaagaaaacgttggatttcctgagtgaaatgaaaaattaaaggggcttatacgaactgatcactttgccacgcttttaccaacaaacgattggccaaaccgaacgaatctctttcaaagacgcggccataattaatcaaatttattgcaaaggcaaatcaattaaatataattaagtgattttccatttttcagactcatgcaaaggacatgaggacaagtgccaaaacgggggctatttgaatccgaatgattgcacaaaatgccattgtccggacggatacggtggccaatactgtaaagaactcgaagagagtgagattaactaattatttaattcaacaattaaaataaattataaataaatttgaagatttgaattgcgaggatttgagtggaattccgagagaattggtggccaatcagtcagcagtgttattgaagacgaaggccaaatgtgtggggaataagccgtgccgatgccattggcgaattaaggcaataaataatatttatgaaatttttgaatttattttgagtattataaatgcaaattttaattgctttcagcctgaagctgggaaggcgcgaattcagttcaaaagtttgagcaatttgtttgagtgcacatacaactgctcatcggcgtatgtcgaggtcaaataccgagccgacaaaagagcccaaggcaaaaagacaaacaattaactaattaatcattaattagcaaaatgatggctcattaaggtgccaaactttgttgtgccgcatcactcactgatctgcaagcaaatgaatacaaaaattggattgaggcggaaaagccgggcatggacattgtcatttccgcgcgcctttcaacaaaatggaccgtaccatctaccgtattcgagctgacgtattcaggcaaggaaaattgtaaaataaattttattggtttttaaatttttttttaagtatttattattttaaattgacttttcttcaaaggctttcggtaaatcagaaccattacacaactgaaactgttcaaaaatgttaaggcaacgtcaagctcataaaatcgagcaagtgccgttatgccggcaatttgtatgccgaaaaaaggaaccccggcagcggcactttgcagtgttatgacgcggtcaagcaaaaatacaatgattgcccctgtagtgatggtgacaagaaatgcctcactgaagaaaaatggtcacacgaccactttgtttgcccaatattaaaggtaattaattcgttaattggttaattaattaatgccaaagggcaccgccacagaaaagttcacttaaatatacaatttaatttttaggcactaaaaattaaagttttttgttccttttgaatcaaagttgaacaaataacgattaataaggacgaaataagtgcaaatcttagaaataaggacaaatgatttacttgtaaactcaaggtcaatggaattcaaatccaaaaaaatcctggatacaattgggctcggattgatgttgtttgttatgtgagtttggtattctaatttcaaaaaccctttttaattgactaattttacagaaggccgaaggtggtaccgtaagcttttggggctacagtaagccgaataccaaagaaatcattcgggtggacgaagtccactgcttgcaagcttgggcagttgctgaagtgccaaaacagtccaaaagtttgcaagtcgaagaacagccgcccgccgttggcaaaaattgagtccgagtccattcttggccaataatgcttcatcacttatccatgtgttcgtgccatttgttggccatccatgagagaaaagggggagatcagtgatcattggatgatctgtcttctgccgctgatcagcattggccaatttccaatcagcaaatttattttttttttaaagtgtcattgttttgagtccctctctattcagtcctatacgcatttttaaacacatcatccaacagcatgtgctatataattttttggcaaaaagtacaaaaatatcctctcttaaatacacaagaaatatatatatatatatatattattatgtacaaagatttgtcaaatttgattaaatgcatcgaaaatatattaaatacaaacaaattaaaaagttaattaatgcctgtggagatgtctttttttgttcatcttttttcatgttttgtaattattatttttttaaatgacacattaatgtatttttttattcatttaattatttattattttatgctttataaaatatgggccaatatctctgaagacaaaaatgtttatgaaaaatttatgaacaaaaaaattttaaaataaa

SEQ ID NO: 83030 - DNA, 2247 bp, Heterodera glycines
atgaaagatccggaaggtccgcccagcgaaaagcaccgttatttcgatgcttgtaacaaagtgccaacggaagaaaaatgcgaaaagtaaaagaaaattggatcatcattaattagtgaaacagtcattaattaatgagcggggcacagatttattaagtgccttaaaattgggtcgggtcactttggagcggcatttttggcgctaccaaatttaaagtaacataatgccaaaatttccagaaaacacaattttttgggcttttggccatatttgtggctcattaaattttgaaatttaatttgtcgacaaaatagttggcgtcaaagtggcctggcaataattagggattatggcaattaaaatttgaacttgctttaatgaggaatacattcagttccgaagagctgatcgggtgctacaaaagctcgaaaaaatggcccggaaacagtccaatcgccgaaatgtgccaaaaacatttggaaggaatttcggatggtgccgatgccaatgccaatgttgccggattcattgtcaaaatttgcgcccaccgtaacgaaaacgatctcgtcattgagtcaactttcaacatttccttctccaatgaaacgtataatattgattttgcatttaaaatttaatctgagaaataatcaaacaaaactttctttatattattcattagtaactcttaaataaacttcattaagaagtaaaatatcaaaaagtatatggccaaaaaagatcttacaaaattcaatttaccaatttttttttggacttttgaaaaattttctgaaatttcttaagataggtaggtaggaaccattagggctatctaatgctagcaagaatgtttaaacgttttgcttctaagcaattatgtagaaatatgtaatttattgaatcgatttgagtcgaattaaaataataaaaattaaaaataatatttaattgaaattaaaaacattaagttgcaaacggacgcgaacatttccaatttcgttggaaaaaataacagaaataacaaattggatgccaacattcttaatcgaatttggcaccgaccagcggaaaagcgcaatccgagaaaagggcgacgaaaaaagcatttgtgaagaattcaaaacggtcaaaaaaatcataaattaatttatataaattaatcattttttacagagcaatggcattggcaccattctcaaagacatttcgccgcaaatggtcaacggcactttggtaaaaataattcattttgtgccgccatcggatgatgacaaaatgcacgcgtttttccaaattgaaaggccaatattttcaaaacgcataatcaacgacacggatttgttgccctaccaagatgatccgaacagattcagtcagtaaaaaataaattgaatttttaaaaaattaatttcggcactttttaagacagtctagacccatgtgatgaatacggcgcagattgtgtgccgatcagaaatttgttgttgaaaattgaggcattggcaaactgtgggaagaacgaaagcaaaacaaacgcagtaaaaaatagaaaaaacagtttaaaaatatttaaaaataattttagattttcaaaaagccagactgggccccacttccgccagagatgccctggaaaaagccatccgaaacattgttatgtggaggggatatgttttgtgacaaacgaaggcttcaacaacagtacaacagattgcggaagagtgagttcaatttgcaaatttaattaattaaaaataaattaattaaaaacaaaattaaaaaatccaaattaaaattcacagtttgtggacttcagcccgaggaagtggaaagtcagcggaaaaaacgacaatacaacccattcgaaaaatggaccgaattcccgatcaaaatcgcattcaacaaagatgctcgtaataatcttgccacatcatacagtatttgaacaaatgttttaagtgccaaaggacgggtaccaatcatggaagcatgcgatagaaattggtgccgatttgataatgtgagaatgatatttttaggtttagttaattttcgggaaaatgtcggggtcttcagccgactttttatacaaccaaaaaaaaaaatgcgtaggggaggtttcatatattttttattcatttctctctcttctgtacagggaggtgacctgtgttcgatttgaatttgtcgataaaatggtgaaaggacagaatggaattgcggttaaaaatggtgttggcg

SEQ ID NO: 83031 - DNA, 465 bp, Heterodera glycines
atgaatttgattgaatttatgacagcatcaacattcccatgctgtgctcccgttacaagcatctgcaacccttttggatgtttggtttggcggagtgtttatacatttggttggcactttttcaaatttggcactttcaaaaacataatgccatttaaaaaaaaggtttgtctgctctgcttggagttggcattgcccgctcgacaagtgcttgtgttcaaaaaggctgattcaaccctgccaaatgggacttacaaatcgtcaccgatccaaaatggtaaaatgccaaagaaatggcgcgcaatggcgccaatttgaattatcaatgaagtgccaaagaaatttaatacgaatttattaaaatgttgaaaattcaatgattctccttgaagcttttccttttgcatttagcttatctttacgtgatttgtagccaaaaaatgtacaaaaaatttaaaaaataaa

SEQ ID NO: 83032 - DNA, 826 bp, Heterodera glycines
atgctttttgcaattggcaatttgttcctcggatttacgcgaaacaatccattcggaagcccgggggaattaaaaaatatgctaattgactattcgaaaagcgaatggtttgaacagaacaccaatgcaatggagacggtgctgcaactttggcagaaatttccaaagacggcactgctggttacggtaatggcaagggaaatattgtagtggtgcttttgtgccgaggacaaaacaatgatggcattttcatgaattaaaggcagagcgattatttatagtgaaaacgaaccaatatgtattatatgaaattaattttagaatatgttaaatgtcgacagaaagaaccgtttaacagccaaagggattttaaattatattaaaggatcatgccaaattggagagttcagagaagtcaaaagttccaaagatttgcgaatttttaattcagtgaagttcggcgaatttttaaataaactgcgaattatcaaactaaagaataaagcgaaatgtttgattgaaaagtatagggaattgaatggaacatacaaaaaaataaagataatggtaaagaaagtgatcgaagagcaacaaatggaaatcgaagaaaagaaaaacccggaaaaactcgacgattgcgaaacgaattgatcggcggaaaagcgaagcacccttcaaaatttatctaaaggatttatttgaagggagtgagggcaaggcatgtgagagggggcggcggacggacggagcctttagaaataatgtcgagagtgtttgtttttaacgtggattttattacaaaaatttcctttatttctaaaattga

SEQ ID NO: 83033 - DNA, 189 bp, Heterodera glycines
atattgatcataggccccaaactcaaaaatgctttaaaacggtcagaatcgatgtaaaaaggttcgaaatgggttggaaaaatagaattaggggcgcgcttgccctttttcaggctgaaaaagtgccggaattggagtgccaaactcagctgggactcaagtgaccgcactataaaaagcactcaaaag

SEQ ID NO: 83034 - DNA, 1812 bp, Heterodera glycines
  unsure (1)..(1812): unsure at all n locations
atgttttcggcaaagtcccaacggagggcgtgggccccccgtgccgccctcaacaacggcaccagcaaaaatggcactaatttcggcgatcgtcgctctttgccggtgaacacttcattccgtggcacttacagttggggcccaacgaatggaaaagcgaaaaacgccgtaaaaggatccaacggaagcgacactttgccaatcggtgacaattcgccaaaagaggcgtactgtacggtggaggaaatccaattgggcaaaaggcactcaaaatcgccgataatggacaacggaatgggtaccacaagacaaattcagtggaggcacaaaacggaggagggcgaggggaagtccgagcagggacaggacgagctggaggagaaccattacgaggacggggacgagggcgaggagagaaacagcggaggaagcagcagcagagagcaagcggaaggagggggacggcacgggaagggcacggcacaaatggccaaggtgggccatttggccaaataaatattgacactgctgtcgagctcattccctattgtatggcataatnttgcaattgtttaggccctccccncacgagtgccgcctcttccgccgccccttccgccacccaaactttttgggaatggaaagagcgagatgaagccgaggccaaagtccaatttgacaagggtaagcccgcttggcttatccaccgcaggtgttcgctaacggcatttctgttcagttttggcccgctttggcatttttggcgttctgtctgattttgttgtccatcgctttcctctctctgtgggtagccaacaacaacagcgaaaagaggcacaaaagtcagataaattggccactgaggctggtgccggtgttaaagccatcgtcgacgacccacgcgacgacgcccaaagggcggggaaaattaatagcgcaaagagaggaagaaaatgaggacgaagggaccgatgaagatggggaggaagagggagcggaaaagggagcattggcatcggaggaaagtgatcagcagtcgaagggagcggcggcacggccaatgcaatcggaaacaccggcaccgcccgagggcacaacggcactcggcggggatcagcagcagcagaacgcggtggaaagctgctcacaaatcctctgttcatctgccaaagaaaacgatcaccaatttgtggcacaacccgaggaattcgtccggtggattgccgacggacagatgagaaaacggctgcggttgttcgaagttcgggaaaggaacaggttagcctgacagaagagagagaatattctgactattttcattttgcttttggccattctgatcattttcccctttcttttttagtcattctgatcactttctgctactctgatcacccccccccccattccttttcattagtctaatcactttcacttattttgatcacttttctttcccattcgatcagtctgatcatttcggctactctgctcatcacctttcttcccctttgatcactttcagccatcctccgacccccgtggcattgccttcggccaaagtgcttcttctctcctctctgtcccacaacggcgtccccgtccatccgttgcaattccaacgacttttgcgttctgaggaggtcgaccacggctctgttgtgctcctttacgacgtccaatcatcacaacaattgtgggcccattatgccatttggatatttcgtgttcgtttcttttgtttcgtttcatttttcctctccaatttccccccttttcagctgttcggtttggaccgttcccttttgctaa

SEQ ID NO: 83035 - DNA, 976 bp, Heterodera glycines
taaatggcttctattacgcacgtggtcttcgaccttgacggtgttctgatcgacactgaacgtcattatacaacggccaacgagcggacgttggagaaatttggagcaaaattcactcgagaaatgtgggagttttgtttgtttaatacgttataataaagcgaaacaacgacaggaacctcaaaattatgggacgcaaaaagacggaggcggtcacggttttgctgaaggatgcggggatagcggatcgcgttacgatggaccaatacattgcggagtacgacaaacacgtccttcaaatcatgcgcgctcttacggaggtgcaattggtgtgccttgctttcgcttttttctgcttttttaaatttttgctttgctacgcttcgcttcgtttttatttcatttaatgaagtgtaaatgcaattgttaggaattgcctggtgccaccaaattgatcgaccatttgtacgcccacaacattccaatggccatctgtacgggatcggacaacgaggagtttgcaagcaaaatgcttaaatttgacgaatggcttaagaagattccgcttcgtgtgctgtgcggaagtgacccaggcgaatgaacgctcaaattccaatttgttttattgtaactgtttcagaggtacgcattggcaaaccgaatccggacgcatacgaagtgaccattggacgttttgctgccaagccgacttcgccgaagaatgtgctggtgtttgaggactcaattaacggagtggaaagcgcgttgggtgcgggatgtacggttcgggtttaaaactgttacaatacggcacatcatcaaatttgtttccttggttcaggtggtgatggtgcctcagcgtgagtttctgccgaatgattggcccgagaaagaactccgttcgcgtccaaattttgccgccttgctcgattcgcttgacaatttttgcccgaagcaatttggattgccggattat

SEQ ID NO: 83036 - DNA, 2529 bp, Heterodera glycines
atgaacgctaataaggagcacgcacataagctattacaccagcaatttaaaaaaggcgaaaaagcggcgcgaaaagtgaatgaatttctcggcgcgtatgtgatctctcctcgtcaagcgcaaaaatggttccaacaattccgggcggggagaaacagcaccaaacgcaaacttgggtctggaaggccgtcgacagtggacaaaaacgttttggcacaacggttgcgacgacacccggaaagttcctgcgcagaattgtcggtgggacattgccataaaacaacagcatggcgctggcttcggaaatctggtcgtcggccgatgaggagcaaatgggtggcacaccgtctgactgatcagcagaaacagcggcggctaaacctgtgtctttcgaacatcgcaagacacaggagaggttatgtgctgaaccggctggtgacatgcgacgaaagctacatctgttacgatggcacagcacagaaaattgtttggagaaagaaggttttggtcccccgactcaacctgcaccaaaaaaagcgcatgttgtgtgtcttttggtcagtacatggcccactgtactgggaactgctggcacctggcactattttggacagtaatagatacataaaccaactgcgggcggtggatatcgcttaccgcatccggcgccagcagggccaatttgacggtcccctactctttcaccatgacaatgctccgccacaccgtctcatttgacaacccagtacatttcccagacattgaattggaatgtgttgccccacccgccttatagccctgacctagccccctcggattaccacctttttctttctctcaaaaactttttacggggtaggcgcttcactgaagacgccgaggtcgaggaagcggtggggcagtacctgacctcaaagatcggcccagattttttccgtcgcggcattaggaaacttccttctcgttggaaataggttgttagggtccagggaaactattttgttgagtgatattgtatttacagttgttatgattgttatttttgatattttatttataaaatttttttttctaaaaaagcgcccttttttatgcaacgaccttaattgtgcaaattgattattcattttttccttccttttttatttttagcacattttcccacccgaacaatcgacggaagaagcagagaaagagcactcattatcggacgacagcgaaactttaatttgcaaggattgtatggacaaatacgcttttttgggcttttatgtcaaagtgccatcgacgaatgaggaggaaatgagcacaagtcagaacagaaatgccgaagaacaaagggacgacgtgtgcaaattggaagcaatgaaaaagaaaggggagaaggaaaccgggaaaagtgtgtggatggaagtggggtggcgagaggagctttgccggtgccaaaaatgcatggtaatgacccataattgagtctttaaatgggagagagtgaagcgcactgtttttcagaatctgtacgaagacttggactgttcgtttctgctcgagcccgaggacacactcgcgcactttgaacaacaaaaccgagaaaaggcatcccaaaaggacggggccaaagacatttaccaaatggtggtggaggagacgaaggaacacgaaacggcactgaaaatgatggtcggctttgagcagatgaagcgccactgtaaggagtttttgcacaagcgagcagacgaaaagagcggactcatcacgggggaggacgtggagcagtgcttcgcggagttgcgggcaaagcgcatgaaactcgaggaagagccgcagcaaaacgagccgaactctgggggggatgggccatggactcaggtggaaaagaaagggtaaagaaaagcatcagatttcgtatttagtaacaaatgtttgcgatttggatgtttggatgtaaagctctcttaaataattttcattcgcatttgcatgtgtgcttcggtggctcagtcggtagagcgtcagtctcataatctgaaggtcgagagttcgaccctctcccggagcaaaattttttgattatattttttatgctgttatatttcgaatttttttctaagtacactaattgcgctgatttgatcattgtaaacgaataaatgattcctggctataatcatgatttcgttatttataatttttaaaaaaacgactgttttgtcgatcagttaatatcggtcctcctttgtttgcttaatttttgatttaattttaaagcagtgactgcttggttctttattcaaatggtttgttttctaattcatttttaaagaattcaaatttataggggcgacacaaaaagactcagaaattccgcaataagcttcagaaactgatcaagccaaccgatgacagaatgttaggatttgaatttttcttaatgattgctaattaatgctggtaataattcagaaaagatgaaatccgcgtgaaaaaacctcccaaagaagatgaaaatgcacttaaaatcaaggaagc

SEQ ID NO: 83037 - DNA, 1061 bp, Heterodera glycines
atgtctgacaaccgaaacgaagcggagcaaaagatggcgaaagcaatgtaaaattaaaatgccatttttaaaatttcaattttaaattttgttttccttttttcagcttcatttccgccgattgttggctttgtgtgtacgatctgcttccggcttcacaacttggccttggaattgcgatgatcagccaccgttttgacttctacgtggatgaacacttcaagactcgtcgctggaatctgggatcgatgaaaatcaaaatgaagttcgaagcggatggcaccaaggaaatggatgttgtcaatgccaatttggaatcgtttggaattacgcaaaagccgttgccaaagagagtcgtcggattcaaagccatttcattgaagcgagattttgatacttttctgttttgtaaaacgattccatcatttttcacaggtacttcaacaacaatgtcatcacttttctcggccgttttcgtccaattttggccacccgtcccattcatttgaccatcgacgacacatacttcgatgaccgcactttggagtcgatttggcacaacatttggcccatgatcgcgacaaacattcgtggcatccaattgtccaaagaaagtttccgccgtttgcgcaaattcgtgccgtcaattctcaacgactgtccatcgcttcgcgttgtcaatgccaattccaatggtttcttcaccgattttccatgcgatgacagtgccgcagcatcgaatggacaagtggtagccaaatggcttttcactccccgttcggacaatgtgccaaaggtgttcaaatgctggttgaactacggtagctggcatttggagccagagattgaagacttcaaagcggtgattgcgatttgattgttttatttggcatttttacggtctttggcgcgcactgacaaaataattatgtatatccaaattggggcaccaaaccgtaaaattcatttatcatttcgtatttcttaaccaatttttccctattttaggaattttacacggcttcatctcccgtcaatttcatcgctgtcattcgcattga

SEQ ID NO: 83038 - DNA, 933 bp, Heterodera glycines
  unsure (1)..(933): unsure at all n locations
atggcggaggaggagcaatcacttaaggtaaattgccgaaaagaaatgcacaaaacgtacaaagtgatttttgaagaaatttgtcaggtagaaaaattggatgaaagcgacgaaaagaatggataataatgaaaaatgacggagcagcaaccacttttatactaatttattttccaatttttacacaattttaataatcagtcgtagttcgacgccttactataaaagtcatcactagggccgcaacttttagtgactaaaaatctcaaaatagttaactaaaatagtgagtaaaaatgccaaaatagtgaagaaatagtgacaaaaagtccgaaatagtgacgaatagtgacataattttcagacaaaaattaagcaaaaataatttttattcactgattgcagttacaaatgaggtacatttccaaattttgaggcaagaaactcatccggttatcgcataaaattgttttgtaaatagagaaagtccgttcaacatcgcatgaagtgagaggggcgaatttgtagaatggaattacggtgggggaaacatcacaatcaacattttttccggaaagaatttggcaaaatttggcaatttgatcaaacgagggattttaagtcccccatctcgttaaaacagcctttggaggcattgccaaatccggaaacatttggtggtaaatggccgtacgttgaggtgctttaacaaaaacggccttcgtcttcgcgatcaatttgtcggcctttttgaattcatctcgcactttctctgcaacacggtgtaaagcatgacaaaggcacattgtgtgtatgagatttgtataanaaacctgagaaatatttaaaattaagtagtggaagttcccaactaattaccctttagttgttttccagcttttttcatgtaagctgcagcgtccgtgacaagca

SEQ ID NO: 83039 - DNA, 830 bp, Heterodera glycines
atgcttttcaaaaaaattggtacaggcttgggatttttatacatatttcttacatatttggggattacatgttatacatattttgagacgtttcttaggtataatttgcatccctaattaatgaataaatcaatatatttcataaaaaatatttaatcaatcagtaaactccagcaaaaagcattggtgtaaatcactcctggacaataaattattaaataataaaactaaattaacacaattaattaatggaaaaatacctttgtggccaaaacaaatcaatgaaattctctccagaagatgcgatattgatgacaatttcaaaaaagaagtaaaatgcccaaaaggtaattagactgtgccattgaagtgaccgtaaaaataaaaaataaatttcaatactttgtcctaattgttacaagatacaactgaaaaatcgaggacattggcgcctatctgcgtcaccggccccggacccaataagtcataattttcataaaacattggctcttaattgaaatgtttagtcatttttgacaaaagctaacgaagtattcagaactctaaaatcttcaggcctaatggcggcaacgctggacccctattttaccacatttgttaaaaattcacccaaaaaggcctgtgacaataaaaaacttgtaagcattttacgggtcaattttcaagtcccgaccccagtcccggctatttcgaaattaggaactgccataaacacatatcttccaccaatcagccaatgctggaatatttgttagttagttttcacaatttatacatcaaacttttttcaaaatatctgagtaaataaa

SEQ ID NO: 83040 - DNA, 750 bp, Heterodera glycines
ttttttgtcagtgccaatgccgccgccggtgttgcgctgacgcatgacgcggtgctgcgcgagttgggcgccgcgctgacgttgcgcaaggagcagtgcctgcgccgtgagcgccgtgcgttggcacgcgcccgcggccttccggacgaggcggcggtgcccgcggaggagttggaccgaacgccattcgcggcggcggcagcggcgtgccgtgacgcgacgaccattgtggcgccggcaacagcagcggtgatgatgacggcgctcaaccaggcggcgttaatgccgagcgccgaagcggtggcggcacagcgggtcgcaattttgagcgccggtggcggcgcggcactacatcagcgggacaagatggagcagttcggggacgatgaggaggacgaggaagaaaatgctgatgatgacgaagcggggacacagaaacagcgatgactgactcataaaaaaacattttgttaccgtatccgccgcgtgtatctctctcttactgtagtgccgtgttcataaaacccgagactcaccacttttgacctcgctgtttttggctgcgttctttattgaacgtggattttatcatatggtctcggcaaatacagtacaccacagagtactgtagtcgccggaaaaaacaaaatttttgtttattgaaaaaacttatccgttgatttgaatttaaattttctttcaatatgatttattttattttgtttttcatttaatatttttgtcaaatga

SEQ ID NO: 83041 - DNA, 1470 bp, Heterodera glycines
atgtcgaaatcggatatgatcagccgggaaaaatcggaaattaaaatccgaagcttcaaatttcacgaattggcaccgatcacagcaaatttcgggaattgggagtccatgaatccaaaagtgtcgggaatcggcatgccgaataaaaaattgtcgggaattgcaacccgtcgattcaagaatgtcgggaattggcagccgaaccaaaaaatgtcgggaaatggaagcccatgggttcaaaatgccggaaccggcatatcgaaatgtcgggaatttgaatccatggattcaaaaattttgggaattcattttcagagcttgtggcaataccatttcctcgtgcgcagcgagttcatccgttgtgcactgctcgcactcagccgcgacctccgacgccgcgagcatttggcgttctgtcgcaatttggcgctcattttgaacaccgtacgtgccacaacaacatcagtgccgttgtgcgtccccaatgtgtacggcagaacgagcagcaggacaaatgccaacaatgtgttgataagcagcgccgatttggccgtcgcttcccgggcctcaatgtgccgtgctcagttggaatgggcactggagaggcgagtcaaaattggcatttggaattgtgttcgcgtgtcatgccaatctgagttttgcgcctttctaaggcttcaaccttcgccggacgacggcggtgccgactcagcgtggccgcctccgcccgacgttgtcaaatgcgtggaacaagtggccgtctcacttcggcacgcattggaaggtgccgtggcattccggggcgcaccatttttacagggaaatggcaagcatttgtgggcgccaatttgaatttgcgcccgagagttttggatttttgcccgcttttttggggatttatccatggcgccgtccctcccatttcgaattttacgactgtatggggttggttattcctcgattcaagacaattttaccaaaaagtttggcacttttttaggtgtaacacaaattgccgtcctcgtctaatgtctctcgatttattgtaacagaatgccaacaaaaactgtgcccgccgcaccaattgcccgccgggggcggcgacgacgcttcatttcactggaaaaatgccgatgatgaattggcacaatgccaagcgaaaagttgcggatcaatggtggacaatgaggaggattatcaggtggtagtgattggtggtcgagaatttggcggcgcgaaaattgaattttcgaaacgggaaaattaatttaatttttaattggctaattagagagtgaaggaaattatacaccaatgaaggcgtgataattaggtaattaattaaatgattacatttagattttcgagttggacactgccgctgttgaaaatggcaacaacaacaacagcagaaaggcggggaaacggagaagcatttgcgaggaggaggacgaagtgtgttcaaataaa

SEQ ID NO: 83042 - DNA, 1634 bp, Heterodera glycines
gtactgccccaactgcaaaacgcatcggcgcgccttcaaaaagttggacctgtggacactgccccaaatcctggtcatccacctgaagcggttcagctacggtcggtacacgcgggacaaaattgagacggagctggagctgcccattcgcgggctggacttcagtgacaaggtgttgaacccggagcacagccaggagaagtacgacctcatcggcatctccaaccactcgggcggtaagccgcgcgcttttttatgaaatttactcaagaaaaaatctgaaaatttttttgaaattcccaacgacgtctatcggcaccgcctgaacccctccaccatttttctcgtacttttgggaatttgactccaaaacgacaaaaaaatggcatttatcagcgaaaacgtctaaaaaattatatattttttttctcggcgctgaacatttaagaaaaacaaaaagttttaacccgaagggcaaaaaaaacattaggatttcccccgcctaaaacttgtgcaggctacgggcctggtttcaccattaattttgtaaccatttaaaaacagatttcggttgcgtcttccacaaaattgaaaaaaaaaatcgctttcctcctaataaaaatttaaaatattttgtattcacccccccccccccctcaaaaaaaatcgcatttctgatgttggcaaatttgcgacacaggccttggctccggccattactccgcttgtgccctgaacgggttgaactggtgcgagttcaacgactcggccgcccacccattgacccacgatgtgccggatgtgtttaactcacgcgaggcctacatgctgtaagtgtggttttttgtgcagttcagtccttttttattgccaagttttgtaaaattgttatgttacacttttttaattgaaattgtaacaaaaaaaaaattgaaaaattttctttcgaaaggggtttataatttttcttgcgtttttgataggacaataaaacaccaaaatttttgcccattcgtcttgcaccttccccaatccaaaaatgcgggctcatcttcaaatctggcactggcatatcaatttgtacacccaatatacattcattttataggggccataaattggcttaaaaaaatttttttttgaaaattcaaaaaaaaaaaccctgccaccctgtaacaggtactatcgtcgccgaggcgaacaacaaccgcaacaaaaacgccatgggaatgaggaggaggacgggcaacagcctcaacaaatggcaggcgaagaagcacaaatgcagcagcacgaggaggggaaggagtacgggcagcagaagcagaattaacacaaaacaacacacggacagacagaggagagagagagagacattttgctgatgatgatgagatgaggagagatgtgaatgatgacaacacaccaccaccattatgactcattaattaattaattgacggggaccgatggcaccggcacgccacatattttattaaaaatagataatacatacatacatatattcgttgctccatcatcatcattttttttaaatatataaagtgtgacgacacacctggcgacggtccatggaaattcgggattttttcgggacttggttctcctgggca

SEQ ID NO: 83043 - DNA, 481 bp, Heterodera glycines
atgtcaaaacatcaaaaaagtgctgttacgccaccaacgacgacgacaacggcggcagagagtggcggcgaaggagacggacgcactgagacgacaagcggacagcggaagcgacacagtgcaaaccaaacggactcggcgaacggcgccgctggggggcaaggtttgttttcgggttttgagttctgggaggggtccatgtccacaaaaatcgccacactgttcgtcattggtttgagtttaaaatggccgggagtaaaattatttgttttttcgaaaaaccatatcggagatcattttgataattgacccaggtgcgttttgaaataccccaagtccattgactcgttaagttaccgattgactgccggccaaacaatttgtttgtttagggtcgaataacgccgttgttttgtcctcttctgagtcggctgcaaaggaagcaaaggtcagaaagatgtcgacaacatcgcagaacaag

SEQ ID NO: 83044 - DNA, 126 bp, Heterodera glycines
actgtgcccgaacggccaaaggacttcaatgtgccggaactgccgccacaatcatcaccttactgccagccgatcaggtcaattcgtttgtgatcagaacgcagcaggacgagctcttggggacgg

SEQ ID NO: 83045 - DNA, 2086 bp, Heterodera glycines
aatcccaacaaataaaaggtgaaacgaatgaattttttcctttaaaataataattttgcctttgaatgttttttatgtgcctaaaataaatccgacggaatttaactcaaataaaaataaaataaaatatttcggcgttattttgcggaacatatgggcaaaataaaaagaaataaaaagacatttgaccgggagagagagggaaaatatgtgaaaagttttaatttattatgagaaaaaagaaaagtgaacgaatgaaaaatcggcaaatcaaagagataaacatttgtgcaggtttcgcagaatcgcttcttccaaatattcgccaccatttttgccttttgggggcccgcgctaattatggtaattgtttatgtgaaactgtggaacgcggccaaggaaatgcaacgccaggacagaatggtaaacggaggaaggaaatgccaagggagggaatgccaagaaaagtgccgaagaaatgtcaagggagggaatgccaagaaaagtgccaaagaaatgccaagggagggaatgccaagaaaagtgccaaagaaatgcttaaggaaggaaatgccaaggaaggaatgccaaaaaaacataaaaaaactcactgtatttcaatcagtaggcccaataaatattaaatacccacctgtttggcaatgtcaaagcttgttccttccctctcccctttttaggttctccgatggcaagggatgcaatgccaaaataataccgactcagtgccaaactcaaacggttttcctgctgaaaaggctatgaacaattcgcactcatccgcctcattgttggcaacagcaaacgcacagctgacaaatacccccaggcaaaattaattaggggaaaatgaactgatcagtgatcagaacggagtaaagacaaaactttgaagccaatcaaatcgattggattattaatccaaactaccttaagaaattcgacgcggcaaaaagtccaacggcaaagcattgagcaggacaaaaacaacaacacgagcaacaaagcaaaagcagacggagaaggaagaggaaaagcggacaaaccaagggcatcggcatgttcactaatgaccggtgcaattcgaattcctttggtcggtcaattaaagacaattaaccgaggtcattcccacaaccaaccgtatccccccgccacttggccatactgtacctcttccgtgcctttttttcaccccattttctttctctgcagaaccgtaccaactcaatgagtaccgtacctttcgggatagcatttcattgggataccgtattaccccaccgttgtcttgtcctaccgtacacatgtctctgtctatccctcgtctcttttccgatctcatttttgttccctccgtcagttgggctcctattcctccaccgcctcttccgtagtcggcgtccttaccggcggcggatttggaaaatcgcagcacagtcagtgtgaggacaaagcccgaaagacgctgggcgtgatgatgtcggtgttcctttgctgctgggtgcccttcttcatcttggctttgctcaagtcccagcgcctcgtcctccaagtgcccacttggctcgactcgttggcactttggctgggctactccaacaggtagaccgacctccaatttctgaataaaagaagagtaatttaaagagccaccccatgcctcctaaagaacccgtttacccttccaaacaaaatttataggctgatcatttcactgatttaattaattaatttgatcgacttcttcattagtttggctttatcgaatggattgtctgtcccttatcaattagcttttatcgagttgtcctttgctcggctaatcatctcttatttccatcacccaatttgtgttcccttcttccatcagcgtccaatggtctgaatccgatatggcaggaacgctttgtgttccatgtgcggcacccggagatggcactgctgcgctttcatgtggaagacggcgatttcgtcggtccgaagacggatccgttcattggccaggccgtgtttccgctcgactccgtccgctgcggcttccgctccgttccgcttcattttgagt

SEQ ID NO: 83046 - DNA, 1427 bp, Heterodera glycines
atgaagcggaacggagcggaagccgcagcggacggagtcgagcggaaacacggcctggccaatgaacggatccgtcttcggaccgacgaaatcgccgtcttccacatgaaagcgcagcagtgccatctccgggtgccgcacatggaacacaaagcgttcctgccatatcggattcagaccattggacgctgatggaagaagggaacacaaattgggtgatggaaataagagatgattagccgagcaaaggacaactcgataaaagctaattgataagggacagacaatccattcgataaagccaaactaatgaagaagtcgatcaaattaattaattaaatcagtgaaatgatcagcctataaattttgtttggaagggtaaacgggttctttaggaggcatggggtggctctttaaattactcttcttttattcagaaattggaggtcggtctacctgttggagtagcccagccaaagtgccaacgagtcgagccaagtgggcacttggaggacgaggcgctgggacttgagcaaagccaagatgaagaagggcacccagcagcaaaggaacaccgacatcatcacgcccagcgtctttcgggctttgtcctcacactgactgtgctgcgattttccaaatccgccgccggtaaggacgccgactacggaagaggcggtggaggaataggagcccaactgacggagggaacaaaaatgagatcggaaaagagacgagggatagacagagacatgtgtacggtaggacaagacaacggtggggtaatacggtatcccaatgaaatgctatcccgaaaggtacggtactcattgagttggtacggttctgcagagaaagaaaatggggtgaaaaaaaggcacggaagaggtacagtatggccaagtggcggggggatacggttggttgtgggaatgacctcggttaattgtctttaattgaccgaccaaaggaattcgaattgcaccggtcattagtgaacatgccgatgcccttggtttgtccgcttttcctcttccttctccgtctgcttttgctttgttgctcgtgttgttgtttttgtcctgctcaatgctttgccgttggactttttgccgcgtcgaatttcttaaggtagtttggattaataatccaatcgatttgattggcttcaaagttttgtctttactccgttctgatcactgatcagttcattttcccctaattaattttgcctgggggtatttgtcagctgtgcgtttgctgttgccaacaatgaggcggatgagtgcgaattgttcatagccttttcagcaggaaaaccgtttgagtttggcactgagtcggtattattttggcattgcatcccttgccatcggagaacctaaaaaggggagagggaaggaacaagctttgacattgccaaacag

SEQ ID NO: 83047 - DNA, 680 bp, Heterodera glycines
atgagaggtatttttttctctgcactcttttatgcagtgccaactttaacccgtagaataagagagacgaccatggtatttatcacagcggcccaattttgggctccaagtacaattatgctggatttttcgtctcagtggtctgtgagttagtcaccaaaagggggtctcaggttcgagtcctccttatgttgtgtgttaatttcaatttcttcttttaaagaagaaggcagaattattttttcattaataaaagttttcgtgtcaataaaaaatcatattcaaaaagcgttggttacgtacaacatcgacaattttatgaaattttcttagcttataacttggcgaatactagagcaaataaaaccattttatgctcattttgaagggaaaattctagagaatattgttagttttatttgatttggccttaaattgcgcacttggctaaaaaagaattaaatttattgaaattttcactagggtcaaaaaaattttcctcgggtcagattttcttgaaattttgcataggcccatattttgacctcctctatcgaatcacagtttattttttagctgtctagtttttaactcgagatcggctcttctttttttgcaagggaaaatctccggaaaattttaagttttgcaaagttttggcgttctgattactaaataaa

SEQ ID NO: 83048 - DNA, 495 bp, Heterodera glycines
atgaatgataaaatcgactggctcggccgcttcgatctctgggactcaacccaccagcaattcaatctctggggctcaattctccggcattccaaacaatgggactcaaatctcccgcaatccaaacactgggactcaacccaccaactttcaatgacattccaatctctgggactcaatccaccagcatttcaatctctgagactcaatccaccagcattccaatcactgggactcaaatctccggcattccaaacacggggactcaacccaccagcatttcaatctgtgggactcaaatctccggcattccaaatactgggactcaacccaccagcatttcaatctctgggactcaattgtcaggctttccaaacacggggactcaacccaccagcatttcaatcactgggactcaaatctccggcattccaatctctgggactcaaacctccggcattccaaacactggaactcaaatctgcggcattctaa

SEQ ID NO: 83049 - DNA, 384 bp, Heterodera glycines
atgacaattgtatctacagtaattatttatgcattaatcgccttaataattcattgtcggaaaggtttttaaatgctgcagcaaatttcgaatttttttttgtttttttttttgccatttttttcagtaccgtcaaattcaagcgcggcacaatttatcaaaagaatttttcgttcactattcataatcgttttctttaattttggtggttatatcatttcaatattcgctgttatattactggaatcaattgacattgatcacaattccatatttttatggaattgtaaacaaattatgggcattttgttacattttagtgctgcttcatgtggcccaattttgtttttgacaaggcaaaaattgaatttattattaatataa

SEQ ID NO: 83050 - DNA, 345 bp, Heterodera glycines
atgaatttaatgactacttttttgacaacaaaaagaaaatcttgggttcttatttcatttcatttccagtgagtcacaattaaaatttcccttaattgacccaattatggctaattaaggaactgtggacccgagcaaaggcttttacgacaaaagtgaggacaaagcaacattggtcatcgatttgacagtgaaagaagcaaaaaaggagcacaaataccaacataattttgtaaagtaaatgtttcggtttgaaatttacttgacggcatatttttattccgaaagttattagagtaaatgttctcacattttgatggcttattttatttgagattcaataaa

SEQ ID NO: 83051 - DNA, 649 bp, Heterodera glycines
  unsure (1)..(649): unsure at all n locations
atgccgcaaattaattttgtgattattttattcatatttttattcgtgctaattgatggaattgatgaagatttatttgatgatttatggaaaaaccaaaagccatcgacctcaaaaaacttcaaaaaacaaaaattcggtaaaaattatgcaataaaggaagaaattgttgataataatgaaattcatgaacaacaaaatttcaataaaataaaaatggaagatataaagccaaaaaaattgcaaaatattaaaaaggaacaattggaggatgaaaataacaatttaaaaataaaagtgccaaaaattgaattggacaaattaaacgaagatccatttgaaaaagagtttaatgaacaagttgatcagaatatttcgtatgctgaacaaagcaattctgccaatgaagaagcttacaataatacggtaatatgaccgataaaagaatatcatacctagaaaataagtatttttanaatcgataaattctaagattttaattaaaaataaatgattttttagaatcgagaaacaagaaacaaaatggagattttaaacgaatttaatttgatgaaaaggaatttgcgaaagaaagtgtttataaaaatttgtcccattctccattgggaatgtgaaattngcaaaaaan

SEQ ID NO: 83052 - DNA, 1110 bp, Heterodera glycines
atggatatttcaaacgaatttaattttatgaaaaaggaattacggtggaattataaaataatgccaattattaaatttgaacgtgaaattgcaaaaaagttggtacaaatcgtatataaatttattaataattgaagcaaaaattaatattgacaatcaatttaaattccaattccatttaagggaaaatgaaaatttacatgtgcaacaacaaaagcaaaataataatttaaaaataaaactgccagaaattgaattggaacaatttcaatgcttttcttttttctgtattctaaataaataattaattatttagttcaaatttatcagtttccgagactaaaaaccgcggccgagaacatagaccgagaagcaaaaacccgacaaatttctcaaaccgagaaattcgagtctcgcacatccctaataaacgctgtttttttatctaataaaaagaaaatgatagttggccaaaattaaaaggataaaattttttaaaattgcaatagaatttaaaattttgaagcctaataaatctatttgttaccccatgtcaaaaatactaaactatgacgaagcggcaaataccttgaaggaaggtactgtagttaatagaattttattatttaaattaaaattctctaataaattaatttttttatttagtttcatttattaataaatcgagtttttttttattcatttcgattttgatggttataatatttttatcccatcccttagcaattttctttccaattcaaaaagttctgagaatatacatacatacatatctctaatattttcggcgttttttgggtttatgtgaaatctttttactcaaattaatgtttaattaattgaaaaaagagcgaaattaataaaatgttgataaattaccaaattatgttaaatataaacatacaaattactaaaaattgaccctaaattatattaaccacattatcttaatctgcacatatgtctatttcaggatttattctgtaaaagaggacttaggtgtccaaaattccgacggtgccattatcaaattttctgatgcccaatttaatttaattttttatttaatataaatcgaggatcaataaa

SEQ ID NO: 83053 - DNA, 919 bp, Heterodera glycines
atgaaattaccgttaccggtttgtctagtaccggtaccgccggtaaaaatttgcactggtaagaatgggggtctggtcgagaaaagagtaggaaattggtgaagaagaagaaatttttgagaaaaaatttaaaattttaattttaaaaaatattccaacttttttctttcatgttaagcatcctaaaaacccaaaacttaatcaattgttcattttttttacaaattctgttaacaaatcgcattaaaaattacaaaatttttcccggcggcgcctatcggcaccgccggccctccttgtcccccaaaagtcttggaaaaaacgtgccgcgtaaaaagcggtgttgaaagcaaaaaaaggtcattgatttacattaatttacatggccggagaccccttcgcaaaattggaaaattggccgctgattattcaaaaaaccgcatgtttctatgacttataccggctgaggtatgggcacttcaattttgacgtagtgtaaaatgcactattttcttaagaaatacagtactttttataggcaccgaaataaaagtcgacgtatctcagcgggcctaaatcgtagacccactattccaaaggcaattcggtagcaaattttgtgctctataaaatgggcctactcaaaatttccagaaaaattttcccaaccccctagaaattttttttgaaatttacccctcgttcccagccaaaatgggctgatcagatcaccatgaaggagtgatctgatcaacttggtgttgctaccttttttgatcagcatccaaagttatgcttacctgaatttttttagatttttttaatgctgatccagagaagcaatattttaaaaatgaaatgggacttgaccacctatattttgatcaaattgtgaatatggtaaaataaatcaaataaa

SEQ ID NO: 83054 - DNA, 62 bp, Heterodera glycines
cataaacatttatttgatttattttaccatattcacaatttgatcaaaatataggtggtcaa

SEQ ID NO: 83055 - DNA, 757 bp, Heterodera glycines
atgtcctttcttttcggccattgtcctttttctctttcccttttttgcttcttctttttcctctgcttttcgctgctcgttttggctgatgaatttgccgaaaatggccaaaacggcgctttaaaaagccaaagtcagcccaaggaaagacggctgcgaaatcgcccacgcgactttctgtcggaatgtgtgacggggtaccgggaacggatcgaattccattgccaattcccgaacatggacaagccttgtctgcgcgaaaatgccgaaggtgtgacgacgttggcactcaaattcgttttttaatggcgatggggcccatattgtcctcaaaatgatctctttcacccacagattccgtccatcagttggacgtgttggctgccgagtgctgtgcctcccctcgcctttgctccgtcgatgacattgagtcgttttgctgtcgtacgatggactgcttgggcctgtgctatggcgactccttcttggcacaaattcaaagccgcttccgttatgcggacattttgctgaaacggcactcatcaaaaggggcggaaaagaggggacgaagaacgacggaggaggaggaggaagaaaaaagagatgaagaagaagaataatgagatggacgatgaagaagatgatgatgatgatgatgatgatgatgaaaatgatgatgaagaagaagaataatgggacgaccgagtgaattttgaggggagatagaaaagaaattttgcagatcaaaatttacaaa

SEQ ID NO: 83056 - DNA, 1639 bp, Heterodera glycines; identical to SEQ ID NO: 3069

SEQ ID NO: 83057 - DNA, 771 bp, Heterodera glycines
atgacgaggaaccgaaactccttcaacaataaaatggaagggaagggccgtacggaacttccgttttttcgggacttattttcccggtgttacgctcaaaaaacggggccgtgagtcccggcaaaatcccggcggagccccagtcccgtcctgtctcaattaattaacaaggcaatttacaattgatacacctttaagtacatttcctccgcttgttcaaactttgcgtcgtcttccaatttctccgcaaatttttgttgtaccaatggaaatcgatgggaagcgccaaggcgacacaattcgaaagcaaagtcaaaatcactgcgaaaaaatagaatttattcatttttttataaatgttgcactttttggaaactgccatattaatggtctcctccaacaattggtgcttattcaacaatttgacagccgaatcgccacccaaacttttggcccattggtaagcaacctgaaaatgcagtaaaaagtcattaatactaattactaagtggaaaaatccgatgctggatgaagtcaaaatcaacgacgggcgaagctcggcttaacatttgatgtcgaagctcgaaaccaagcccaattttttcgcagtatgaagtactagccccaaaaatgcgaagttttcgaagtacgaagctcgaaattcgaaactcacccgtccctggtccgaattaggtggccaaaatttagtcaaatgggtcaacaaggcgtagtttataaaaaaattaaaattactttaattatttaaataaa

SEQ ID NO: 83058 - DNA, 1711 bp, Heterodera glycines
caaaatgtgtgatgcctatgcttcatcctctcatcaatgtgccctaaatttcaggtgactttcacaaaacgcaaattcggcctaatgaaaaaggcctatgagctgtcggtgctttgcgactgcgaaattgcgctgatcattttcaactcgtcaaatcggctttttcaggcaaaataattttaaacatttattaaattgcgtttcgattcactttttacttgtacagtataccatccccttttacagtacgccagcacggacatggacaaagtgttgctgaagtacacggaatacaacgagccgcacgagtcgcgcaccaacacggacattatggaagtgagtaagcgatgcggcgaaaagaaatgttaaaaatattaattttttttttgaaatttcgcttttttgttttaaattttgaaaccgaacttagcgttgttaaatactaagcaaaattttataaactaagctaaaattgtggaaattttaactataattcccatatcttccaattttataattaaaataaattaaaatttgtttttaaataatttatttttgattgattttttgcccccccccccttcagacgttgcagcgcaaggagggcaagcagggcgtcggcgccgactcggacgacgacggcttcagtccccccgcgagtccgtccgctttgcccgccaccgtcggcggcggcggtggcgtggcacaattggctaacgaccaccaaaacggaaatggtgggaaatgtatttttttgaaaatcgaaataaattttcaaaaaattttcaggcgctttggcctcccaaatggcggcactgagcggctcggctggcactgcggccgccttcacacaatcgcaaattgcgacgctggcggcgaccgcggcacagtacgccaacggacaacaaggcgagtgccaaaacttgaaaaaaaaaacaatttggataattaaaaaaaaattattatttatttgcattgaattaaaaataattttttagctttattaagtgaactttatttatttaaatttaaagaaaaagtcattttaattaattacattaagctgagattttagattaaaaataattattaatatttgcatattaattaaaaattcttacaatttatgctattttaaattaaatatctctttaacttttaaattaattgtccaaatatataaatgatttaatgttgggattaattatcatatttaatttaattatctatttcaaaagtaccaatttttctatttatttgcaaacgaataaattagttaattaactaattattatttttttaaataatcgacaatataaattgaatttttaaattcatcttcaaaaaacaattttcccattgattttttaactatatttttaaaataattaacataattagcaattttactgtttattttgcgcctgtttaggctcatccggcgcctctaccgcctccgttccgtacgccgattttaacggcgtccaaaacattgcgcaacaaatttttgggccaaactccgccacgaatatgttcttgcaacttcaacaacagcagaggcagcaacagcaacaacaacaacaacagcagcaacaagctgcaccaaaaattgtacaccaccagcaacagcaacaacaggtggaaaggaggggagaccgggaaactttgatcggatggggatcccgaccaaatcccgcttatatcccggtca

SEQ ID NO: 83059 - DNA, 1152 bp, Heterodera glycines
atggccagaacagcgtattatggagttgtaccattttatcagcatggtgttcaactgtttgctgtccatacggcactgaattggaccaccgattttgatgcacggaatagcagtgaaatttatctaacggaatgggatttgaagagcaaatttttggattttgctgaaacatattgtgtgccaaaaaagtgagtttggctctagtaatcaataaatcaaatctaagacgaattttttttttaaatttagaattttattatttttgaactcattttattttttgaaaatttgcacaattccttatcatatttcatcgaaatttgcacaaaaaaaaaaaattccggcaccgctggaccccataacacataacattctttattgataatgtgaccctaaactacatattctttttatcaccccggcactccaaattaaaaaaaaaacaacattggataaaaatgtttttagcccgaagagcaacaacaaaagttcttcgggtgcatccccgattttttttctggatacgggcctgattatagcccaattaataccaatttgaactgataaaaaataaaatggttttattcctaggaaatacaatattttaatttattatttctgaatatattcaaaaaacaacaggtggactggcaattgcgacccatacgacccgaaaatgcgtgcctggtttgcggcaaagggttggacaaagcgtttggagtcttggctgcctgtgactgtattttaattacagtaatgcaatcctgaatttttggcctgttggctggctgttactgtatttccgttacagtagtttactcaatttaatgttagcaattttttttacattaagccggttcaacttattaatgaaatagttcggtcagtatagtagtatatgaattttctttcattttccgggtctcattccattgttttcttgcctttttaccaccaccgtttgtctattttacatattatatgtatgcacataattttatttatttttttacgccaattacattgaatgatggcaaatacttattcaaaatggcatatcttttcaaacatttagtctggttatatcaaatctcttattgttacatatgcatatgtgtgttagcttctttgtttttttttcatttgaagaaa

SEQ ID NO: 83060 - DNA, 177 bp, Heterodera glycines
atgcggccgagtgagtactttaagctcaggaaaataattaactggggttcattatttatttattttttgcaaaattaattcataagtattttttcagaaagtgctctgaaacacaccaaactttatttacaggttaattaaggctctctgatgctttttctatcaaaagggagatga

SEQ ID NO: 83061 - DNA, 1100 bp, Heterodera glycines
aaaaattttattcatctcccttttcgatagaaaaagcatcagagtgcctaaactaacatgtaaataaaatttggtgcgtttcagagcattttctgaaaaaatatttatgaaataaaaaaatcgattttttcaagtgtccgtttggggtactcaaacaattatggggagcaaaaatccaacgcagaattaaagtacagactatagggaagctattcccgaaggattcggtctccccataaatctgggcgcatcggttcggggggactgccccgaaaacaaaaaaatcgattttttcaagtgtccgtttggggtactcaaacaattatggggagcaaaaatccaacgcagaattaaagtacaggctatagggaagctattcccgaaggattcggtctccccataaatctgggcgcatcggttcggggggactgccccgaaaacaaaaaaatcgattttttcaagtgtccgtttggggtactcaaacatttatggggagcaaaaatccaacgcagaattaaagtacagactatagggaagctattcccgaaggattcggtctccccataaatctgggcgcatcggttcagggggactgccccgaaaacccaaaaaaaaatttttttgaataaaaattatttaaatgaactgactagataatatttaaaataggttatttctcttcctttcagtatccctgcaaagtttgctgcgcttctgatcagtttctgaaaaaacgttaagcctaacatcggttcagggggactgccccgaaaacccaaaaaaaaattttttggataaaaattatttaaaaaaactgactagataatatttaaaataggttatttctcttcctttcagtatccctgcaaagtttggggcgcttctgataagtttctgaaaaaaaagttaagcctaaactttttggcctgtttaaaaaggaattaaaaattttttaaatatttattcatctcccttttgatagaaaaagcatcagagtgcctaaactaacatgtaaataaaatttggtttgtttcagagcagtttctgtaaaaatacttatgaattaattttgcaaaataataaataattaatgaaaaagt

SEQ ID NO: 83062 - DNA, 1236 bp, Heterodera glycines
atgattgtttcaaagaaaatcacgttggacgacggcacaactattaatggcaccagtgctgcgaccgtcgactcgggcacttcgtttctgatcggtccgtttgatgaggtcaacaacattttacgccattacggcgttgacccggaaaacagcacaatgccatgtgatcaaaaatttggccccatcattttcacgatccatggccaggaatacaaagtggaagaggtgtattgtggttgattgagcgttgcttttttcttgagatttattaagcaaaatttgtagtttatttatttgtttttttgatatttcactaactatttaaggaaaagacgcagatttttcgttttttttttaatatttccttttattgagccctcctgaatttgtgccctcttatgattataaagtttaccttttgatcaaagttggaaaataaagccccgggggatttaatttcaggaaataggcatttaaaaaaatccttataatttcatttgagatcatttggttttaataacaaagacccagtgaattattatcatatttaccataaaattttcctctggaactatttatcaaatactatgaaatttttaaattttccagctaaaaaacatgtgtaaaaaacagtttgaaaaatcacacttttaagtctggtccgaacggttttctaattaagaatgatttattttttttaattatcatgccgttcacgtaaatataaaattttaaaaaatttcaaacaaaattatagaagacgctgctctttgataagggcgatggcacttgctttgtcggcctgcgcaccttgaactcaatcccattttggctgcttggtgacccgttttgccgtgaatattgccaagtaaaatatccacacttttatttatttttatatgtaattttaatttctaaataatttctctaagtaaaaagtgaggagaaataatttttaaataataattattttttaggaaaattaataaaatttgattaattttgcattttcaattttttgctctgtattatatttttatacaattttaatcaattttaccatttaagattcatgacgtcgagaaaaagcaatttgcattgccgcaagcgatgaaggaaaaataaattttttgaaaatttacaaaaatggaaaataattattaaaaacattaaatttgtcaaatgctacctaaatgataaaaatttattaagggtggatattgactttattttgca

SEQ ID NO: 83063 - DNA, 668 bp, Heterodera glycines
atgatgctgtgggaggacgctccgaacaatgcgaacagagttttgctgttcaatgcgttggcaatttgcatcaaaaaggtaattggcgaatatgacgccaaatcaatgaacacaaatttggacaaattgaaagaatttggggaaaaaacgagccaaaacatgctgaagtgtatggcaagattaagctcaaaaaaccgccaaataaaagaccaatttttggccaaattatatttggacaaaattaccaaattaattgaggaagacgcaattagtgaacagctggaaaaagcgctaagagaaaagagtaatatttttttattgaattaagagaaaaataagccaattaaaaaataagaaacaaaaagagaagcatttttatttagcaaaccgcaaaatttagtttaaaaagctaattgatcccttaatgtttcttgtttgtattttaaaacttcagatgagttactatacgaactaatgggttcggaggatgttgacaaacttgagcaactctataaagtgatttttcaagacttttatttaatatttatattttccattaaattaattaataattttattttcagcaaaatcacagttattttttgccttctgaaaattttatatcgtcggacgaagaaacttttcatgatgcagtcgatgataaatga

SEQ ID NO: 83064 - DNA, 2082 bp, Heterodera glycines
atgaacgaaagtgaaggccaacagagcaatttgaacaacgaaagcgaatggtcatcggaaaagaattcgtcgaaaatttgggagcaaaatttgtcggaagaaaacgccaaaaaaataaaggacgaaattttggggttaaaaacggaaacgaatttgtggacacagacggaccaatacagaaaggggaagagcaaaaagttgaagaaaatttacaaaatggaggacaaaatgggaaaaagtgaggaagaaaattcatcaaaaaaggacaaacaaaatttgaactcaaacgccgaaacaaaaggccaaacatccaaaaagttggaggaaaattcaaatttgaacccttcaatgctaataaatactgaaaaaacacatcaaatgctggagggaaaaaatcaaagcgaggcaaagagtcaaaaggccgaaaaaaaattgaaaaaaatcaacaaaaaacaaccgaaaagtggaaaccatgaggaaaaagggcaaaacattagcaaaaatgacgacatatacccaaccgattgcacaatgttaatgggacaattgggaatctacaaaatcaggggtaatgttgaaaaaggctaatatgttcagtttatggcccaatcagatttatgcgtctaattataatataatttatttatttctgtgcattttaaaaatttcactgttattcactttttatcttttggcaaaaaaacagtaaatgtttgttgttggccgtgttgactccaacccaaggcttgctattaacaaatcacaaaacaaacgtacaaaaattaacatgattctctctctggccgattaagtgcatcattttaagtttcttagattgtcttaaaaaaacaattggacgcataaaaagaattagagccataaataaataaattaattaattaaaaatatgcaaaaaacaatcatttaaattcattaagatttatttaacgattcattaatgagaaaattgcacataagttcattggaaaatgttttttacaatgaatgtgaaaaatatttgggcatttctgcatttgcactcgcaattgaggcaaatttggaatttaataaattttgccatgaaaattatgcacagaaaagtgaatttgaacagttagaaaaaagttgggcaaaatttattacaacagaattggatcgatttgaaggaactcaatttttgttggagaaattatattttgtgctgaatgagctgatcgaattttcatttgagtaagaaaataattaaaaaaattaattaaattaaataaaaatattacaaaatataattctcgttaattaatacttaagcccttctaacaaccaattcattgaaaagggcttagcttttatggaagagcctcagcttagactaattggcaaatgtaaagaaaatgaaatggataaaattggcaaaaattcaccaaattcggaaaaggaaacgccaaaaagggaaagtgaagtgaaaagctcacaatttggacattactcaactgacaaattcgaactaatgattacagttttgcaggaagatatttttaacataataaaagcaaaaaatgaaattgaaaaattggaaaaaaaggaaaatgaaacggaaaaatgggaaaatgaatggcaggaaaaatttggtgctaataaaacgtttaataaaaatttatttgacttatacgaaaaagcaatcaaacaaatcgtggccatgcaaaaattaggtatcattaagcagttaataatttattttattcataaattgacaaattaatgatgctggctggggctttaatgcagccaagggtttccaacgtaaatttttttttaaattaacaaaaaattgaattcacgggtttttttcgaaaaaataagacaaaaataagagatcgtatttggaatttattaaattataacaaaaattagaaacctgcataaaatttaaggggataatttccgttttacattcggtcaacacaaagacttggcctagaaacctaaaaccaagttcgaaatcggtttttcatgcttattaaagctcaacatgcaaaaaatttaagcatttcttcaaaaccatccctatttttcaacaaccaa

SEQ ID NO: 83065 - DNA, 1246 bp, Heterodera glycines
atgactgttggatatatatctgttagatgttttgaaggttaatttcgaggtggtcgttattttcgggcctgcgtgactctcgagaatgaatgccattccattttcgcacatttgtccattgatttattgcattcgtacaattcgttgtaaatcttttgattatgcttttagtcagtcatttgattcgcattttatttcttataatgcattatcttttttactcacagaaaaatttacaaatgaaaatttggcagcatttaacacttatttttttatttttgttcttacaaaaacccacatcaaatgccacgactgaaattcaggcgaagggtatgttttaaattttgcagattttgcatcaaaacacaacctttctgttctgattccgagtagcgaattggcaaattttaagtgccgttctctagttgtggactttgaactgattattaaaaaatatggaatagatcttatagtagcaacaacaggcgccgccagggataaattggcacggctccttgttagattttgttcgggttaaatatttagaaaaaagtaatttaatgaaccaacgcgctttttaatgaatttgttaagaaaaacgaattaaatttaaaacaatgcactttagtaacaactttttttatttagacctaatagcccaatttatctcgtcattttttcagactcaaattttgcttcaacgataaggaaatttatggagaaaaaccgtgacaaaatgagtcaaatttttgcggatttggtaatttaaaaaaatgttttttattattctttttcatttggcaggaaaaagagaaagaaaaaagaaaggaccaaatgctttctgaagaagaatcgctgcaaattgtaagctcaaaaaatgtatacaaaccgccaggttaagtttttagaatgccttgaaatttgtagttaagattttgccataacgactatgaaaaagtgggagttatttctcaattacaaattaacaaaggtaacatcgatggaaaatatttttctgcatttaattaattttgaaaatactggaaaacgagctaaaaatcaaacatgattgaaatgcttttttaggtttattcatattcatcttttttcatttctcctatattagtcatttaatttttgttttttagccaaatcgttggagtgtaagcaaatcgcaaatcggtttactgattttggagcctgactatcggaaagcagcagtcattggaaatattaacggttaata

SEQ ID NO: 83066 - DNA, 671 bp, Heterodera glycines
atgggcaacttttgggcctgtgtggcgactgtcatgcgcagtagggctgttccctggtgttggtggcacaaggtgtgaagcagcttaattacaattaattagggtgcaataaattggatgtggattgaggagggaggggtgaattcggcatggaaaaggcacaaaaaatgacaagatataaacaaaattgcacaaatttttgcattgattcttttttaatctagcttaattgcatttaattaggtgacatatataaattagatttcagaaatgtgtgattgattagtcgtggattgaggggggggggggggggggtgaagtcggcattcgaaatgattttccaaaaaaggcatgcccgagaaaaaaattggcattttaaggctaatgattaacaaaatttggcgcaaaaaatgactgtcaatgccacctttttttcttatagaaaagtttcagcttaattattagcctggctttttatttccgatgtgaaaaattagcaatttatttttttaaataagcataattcaccagcagatggccgaggtttgttgtcaacgttctgcaccacatttgaaactaagaaagatttgaattagtggttttatgtaactccaaaaaatgacgctaatcattatgttaatttgagataaaaaaattttcatttgaataaa

SEQ ID NO: 83067 - DNA, 1264 bp, Heterodera glycines
gacaaacgccgcctggcagtccgaaaggtgggcacggcaacaacaaatcgccaacgacgccgcacagtacaaaacgggaaacagaacttataattgagaaaggtaaccaacagaaccatgctaccggtaacacatttattcagcaatcacaaaatttttatctaaaattaacatgaaaattagaaaattttataaatatatttaattattttatataacatatatatttatcagaatggcataacattttactcaaataaaagtgaaatttctgttatttttttttgtttcgctccaaatgtgtccaggaccaaaatggcggtgcataaatggcaccgaatcattaaaataaaatgtttaacggtgttagttgaattttcaaaaaacaataaaaattggttgttagatagtaaacatatttttcacgattttaggaaaaccgtcgccagacagtccaaaacgggaaacagaacttataattgagaaaggtaaccaacagaaccatgctgccggtaacacatttattcaaatgaaaatttttttatctcaaattaacataatgattagcgtcattttttggagttacataaaaccactaattcaaatctttcttagtttcaaatgtggtgcagaacgttgacaacaaacctcggccatctgctggtgaattatgcttatttaaaaaaataaattgctaatttttcacatcggaaataaaaagccaggctaataattaagctgaaacttttctataagaaaaaaaggtggcattgacagtcattttttgcgccaaattttgttaatcattagccttaaaatgccaatttttttctcgggcatgccttttttggaaaatcatttcgaatgccgacttcacccccccccccccccccctcaatccacgactaatcaatcacacatttctgaaatctaatttatatatgtcacctaattaaatgcaattaagctagattaaaaaagaatcaatgcaaaaatttgtgcaattttgtttatatcttgtcattttttgtgccttttccatgccgaattcacccctccctcctcaatccacatccaatttattgcaccctaattaattgtaattaagctgcttcacaccttgtgccaccaacaccagggaacagccctactgcgcatgacagtcgccacacaggcccaaaagttgcccatgttgccgccgccgccaatttgggccaaggacaccaagaaagtgccaacgtgtcgcgtgttgatgatgtaaccg

SEQ ID NO: 83068 - DNA, 198 bp, Heterodera glycines
ttgttaaataccacgagggttggcaaaaatctggatataaaatcgcaaaaatgtggccataaaatcctttaaatttaaaaccaagataaaaactatttttttatttcgtgcctttcacaccctcccagtgtccagggaaaaaataatggattgctgccatataattaattgccaaccatataaatcacatttttttaa

SEQ ID NO: 83069 - DNA, 1029 bp, Heterodera glycines
atggccaattcgtctctgatgttgccaattttcagtctgttcgtcgtgctcattgtgattcaattttacgccactgagcaaagttcaatcagcgtagacctagcggtgataaaatttttgatttaaattttataattttctgttatttatatgtagtattatttaatgaattaaagtgaaaaaaacacgataaattgtgtactttttattattttgaatttttggtattataaataactggaatttaattgaatttttaaattttcaaactaaatttatatttgtcctaaaatttaaattttatgggaaattttttgacaaaaaatatatatggaataaaaattgcagcaattggatcgccaaattagtgagaaaaagcaacgagcggaccaattgcgacaacaaattgcaagtgaaaagaacccggtgattaagcagtcggacacgcgcacattgcaagcaattttggaagagatcaacaaattggaagcgcaaaagaaatcgtttcaaaacacggatcaaaacgcaaggaacaatcttggatgagagacacagcaaaaaatgaaacggagatttggcaaaagtgatcagcagtgagcaaaacgattgaaaatgtctgagtttgatcgatcgattgcgattgatcagaaaagagtgattggtcgatctatttatgtctttaaaatgtttttaattgtgatttaaaaaagttcaatatcagagaatttaaaaatttattatagaaacaaagtaacgacctctaaacattagcatggtttgttacccatacgttaccgtaatggaaaaggacagaaatcagccggtcaacgccaacaaagaaaatgacccaaacggaggaaaacaggccaaagattgacaaaaactgaatgaaaaagtagccaaaattgctgatcatgttctggccaagcaacgaaagggcaaagggaccaaaaatgagagcaaaaagagaaagttaaatgagccgatggccaaaagagcggcacaagtgccgcgctgattcctaaaata

SEQ ID NO: 83070 - DNA, 525 bp, Heterodera glycines
atggctgagaagcagaaaattgggcccgttttggctgccattgtgcgcggaatgcaacgcgaggagtcgtccgtccacgtgcgcctggctgcggcgaaagccctctccgaaatcgtcgattgggtcgccacgcgaactttggaagagcacgtggacgcaattgtggacgcaacttgcgcatttttgtgggtgtttttctcacacatattcaacgggtgtctcagacaaggccatacgacggagcttgggatggatgagcagatctgctagggagtgtctcggcagcaaattttcatacggcggtccacttttttctccggcgtcgaccttttctttacttttacaccacttttcttgaagtgcgctttttccaaaaaacctggggagcaagaagggtttgtcgtatccaagcccgtagtcataaaaaaatttcggagggtcgaacccggactttttttttgttgctcttcgggccaaaaaagtgccgccggacaaattttattaacttttatgaattgttaagaa

SEQ ID NO: 83071 - DNA, 2730 bp, Heterodera glycines
atgactttcttcactgctcttcaaaatattgccgcaattttggtttcttttgcttttctcccccatttttgtggcggtattttttattttgcttttttattaaattaataaatattttaatgaaaagcattgaaatgtgcctgggggtcaaccggagttaaggatgaccttccatttcgagttcaagactgtccatctgccaagaacctctattgctacaaaggaaattgtacagccggtaaaaggcgatcgggctgggtcgtttcttaaatccgccaagaactagaaaaccaaaaaatggaaaacatataaattactaacttggctcaatttcaatcaaattaatattttaatgtatatttaatagtttaagttatctaccagaataataaatcgaaatttttttacaataaaaaaaagttatggtcataaagtttcaataagtttttaatcatgattttttattttaacttttttgaaactcaatagttttttaatttattaattttaatagattattacaatttaaaaagaaaattttaatgttattgcttaaaagtagagatcgaccacgggacagacccgtgcacggggtttacggaccccgtaccgcgtaacccgtgtttttttgggctgacagggtttcactgggtaacggggttttagcccgtgaccacgtaccccgtgttgtttccaaccccgtaacccgtgcccgtatatttcgggacacgggctacggggttttttcctccagctaaattgtgtttttttttcatttcgccaaaataatcatttaaatgcataaaatttaattaaattttgaaagtggaagtgaattcgggttgtatctgttcattattttgtaattttactggcaataaaaattcagaattcaaaatcaactgcaataaaaagggtaatactgccagattcttaaaaaacggcttaaaatttcaaaaattagaaattttaaaaagttctatgtattttccgtttttattactgttttcgtcaaaattttacaaagaatgtcaattaatcacaaaaaatgcactaaaatgctaaattaagcacaaaaaaattagcccagcattttataattaaataattattcaaaattgtatttttgaaattgatttttacctgaaaaaattatttaaagaaacccccgtgccagtgtacggaccccatgtcactgttgaacacgggtttccaaccccgtagcccgtgcccgtgtatgtggaaaatgccgatctctacttaaaagcattaaacatgctatgattaccatgattatgcatacatatataattatagtgattaaaaattttaaatcatttaaacgtaaattgagccgaactaatttttatattcggtagccttaaaaatcttgatttaacgttagactttaaaaaattcattgattttaaaaaaatcatcatgaaaagtttatacctagaagcctctaaccatgttagaaacgcgtttttcatgcttattctcatgagttgtacagtacaactcctttgtcagcagggagacagaattttaatctattagaattaattattttcattttatttcagctgattcacgcttctttgttatgggttgcgaggatttaaacaataccgatagcatcaatgaacgcatggttcagcaaatttcaacgccgaactttgccgcaaaatgggagtgccatgtcgtagtaggggataccaacgaaccaatgcctttcccaatgccaggtgatttattggaagggagatatggatataaaatcatgaatatgtaccaaatcacgaaataaggatatttggtttttaaacttttttgtgaatcgccccgatttcattatttgtcaatcgcctaaattagcaccttttgtgaatcgaagaaccaaggatagcttctctataactgagtgaaaattatttattgaagcgattgtttctataaaaaaattttttaaagtaaatttttgtttatttaaaaaaatagatttattaaaattggattctttttctcaaaaattcttcaaaattcgggtttttccccgtcgactgaccaaaaaaacattaattttctttaaaaaattgctctaaattacaaaataggtaggcactttttttacacaatctttaacaaaattgcactcaaattcaaatgtttccaggcggcgcctatcggtacctccaaacctccccctccccttgttcccaaaattttttagaaatagcgcgccattaaacgatttgaaaatcaaaataatcatatttatgttcttatccttttttgtcaccccttgaaatttttttaaaataatttttctgggtaattttgaatctaacattaatttagaccgattccgagccctggacctaaattcgaacaaaaagtcgaagttttatcaattttagaacaaaaattaaaaattttaaaaaatttgaattttaaacctccagggaaggcgttttacacgactttttgaaaactttattttttcgaaaaatcggggggggggggggtcaaagcacattattaccgacgaaattctgtagttgactagtcaaaaaatttcacgtaacacacgtaaaaacataacagctaaaaataaacgtcatatatttgttcagcacataaaattaccctagaaaatataatttaaaaaaatttcagggggggtgaaaaaaggataagaacaagggatgggccaaattgaaaaataaa

SEQ ID NO: 83072 - DNA, 186 bp, Heterodera glycines
gtcaaattgatacgaaaaaacaaaagcctaaaataacgcatgaaggccagcttcggccggtgggctgatcgaatgaaagaatgtttcggagacggcacattctcattggcacctccaatgttctaccaaataaattgtttccatttcttcattttgttaattattatatttaacgaaaaatttcat

SEQ ID NO: 83073 - DNA, 892 bp, Heterodera glycines
atgggtctccccgaatcgcagaaacaaaagccgtccaagcgagtcgctgaggaccgaactgccatctcaggcgttctcgataagcttggtatcgagagcccaatcactgtttacagaatgggttccccagaccaaacaaagacaggtcaaaaccgcccgagattgatgaaagtaatttttggatgctccaaacatcagaaacaaactttggcacaatggaaggcacaatggaacaaagtgcgcgcgcaaatcaatcaaaaaatggggatgagcaacatccgaattcgcccttcgctcagccaagaggaactcaaggcccgacgtgtgctgcaagaagagtgtagcaggaaaagaaaggaagatggcggcgagtgggtggtgtacgcggacaaagtgatgctgacaaagggaggtggccaagtgtccgtgggatttcaaaatgaaacttggttaggtggatagagcaccaatgggttcttaagaaaaatggttttattttctgccaaatgagcacgagtgccgagttatgacgtgccaaagtttttagttttttataattaaagaaaaggaacaactatttcctttcttcaaagaaattgttagtgtagaggtaattcgttagtcaaaattttttttgggtcaaaagttcgaatcccctatgtgtaaattcattttgtaatttttatttttgctttttgtgagcaattcaattatcaaattttatttctttatcaaaatatttattttaattttattccattaaaaatcaaaaattgcattaaacataaatgtaatacatacatattctgtcaaattaaaaaatattttttttggcgaatatttttattgaatattttgcgcattaaaaaatttaaaaaaaattaaaaataaa

SEQ ID NO: 83074 - DNA, 799 bp, Heterodera glycines
atgtcttcgcaaaagcccaacaagcaggacaatgacgtgatgtttgttgtttctgagccggactgggcggtgtacgatgaaaatgagaggagaagggcggaacataagcgcctacggcgtgaagaacaatctaggtttaggatacattcattatatatttgcttattgtttgtttgtttgcttgctgctcaatggaccgcgttatggcaactgattggattcacaacgcctaccctgaatataaacagtctggagccggaggcggaggaggagacgaaaacaacgaatcgagcaacgttgccattgctgatggcatcaactggctaagagtcaatgacgaggacgaggaagaggaggaaaacaaaagatgcaatggcaatgaggaggcggaggcggaagtggttaattcttttatgttgctatttaggtttttttaagacaaacaactataatttcaaaaaatgtaaatgtgggcacggcgtcccataccagcagaagcaacagcatgaagcgaaagaaattgaaatgccattgattgagcatttgtgtcaacgctcaaagtgcacagccatggaacttcaagtgttattgcaaaatttgacgacacgtcgccagatactgcaacatatgcgtttcaatatccgcctccgcacaaactatctcaggccggccatccgaaactttgtcgtgcaatgtagcgatttgtcgaccctttccgctagtgatacttttgcaatgcgtggctatttgggcattacggtttgcttgttttttgctaatgcatttggtagttgtataa

SEQ ID NO: 83075 - DNA, 83 bp, Heterodera glycines; identical to SEQ ID NO: 69364

SEQ ID NO: 83076 - DNA, 1088 bp, Heterodera glycines
atgacattcaaagcggaaatcattgtgaaaaacaagaagaaagagccaaccatgtaattaattaatgattaatataatgtcttttaaatttaatccatttttagtaagtttcaagcagaagacaaattaatggttaatggcaaagttatgaatgtgaacaaatatgtaagaaatgtgaaaatttaaatataaaacttaagaattattctttttagcttttggccgctcattcggtgtttttcaaaattttgttttttgaatttaacgaaaaaatgccaaaaatagaaattgacaatgataaaaatgcagtgggaaattttgaaaaattaatttccttcatgaattcaccgaatgccgaattggagggtaattttgtgggcatggaattcccatcgaaaatcgatatatttttacggttttaaatttgcacaataaaactcttaattgtattaaattataattaagatgattgtgttgaaagggtccttctattggctgatcgttttcagttgtattctgttgtgaatcgttgtgcacattttttggtccaaaaagcaaaaagccattcattcataaatttctgttggcacatcaatacaacttcattggcatgaaggtaaagaatataaccttaattaaataatttgcaatgattcagaagaaaatttcggaagaaatgtcttggcacattttttatttaactgttgaagatatctttccaatattaattatctcgttgaaaaattcctaatcactcaagaaacaatgatagaaaataacctttacaagatctatgagtataaagataaatttggcaaagtcgaacgaaaagttttgcttcaaaaatgtcatttttctgttcgatcatttcaatgaatacgctgatttggtgaaggaattgaaagagaaattccgttattactgcggatgatcggacagtggacaatcggacagttggacaatcggacagttggacaatcgggcagtggacaatccgacagtaaaatgcataaaaaagatatgaaaatgccgtcgccggagaggatcgattgtgccatatgaagaaaaagggaaaacaggcaaataaa

SEQ ID NO: 83077 - DNA, 1135 bp, Heterodera glycines
atgtccgacttttccgcatttattgcatttgtcagttttctgggacggatattcgcacatgtatgccttaccacggcggtaatatggcttactgtcggcatttttgctgttgcagggccctttggcacgatcatttcctcctcctcttcctgaaattttggtcacattgccttacaatgaatccggtccgatcacataagcgtccaccagggatgggccaaattgatcatttataaacagtttttcactgaaaattagccaatttataggtaaaattttgaaaaattttatgggaatttaatccaattcttagaggtgtaaaagtcgcatttcgcgccaaaaagcgaaatgcgaaatgcgaaacgccaaaaaatgcgaataatgcgaaaggcgaaaagcgaaacctcggcccatccctggcgtccacattcgattttcccgaacaactgccaattgggtggcacattgatttgtgattcttgtttctttttttagaaattgtaaaaattgtcaaaaaaaatccgtttttttccaatgaacatgtccctgacagagtggtgcgacttttggggatttgcaacttggggagtttggcatttatttggcaactccgttcacttcaccaattctgcagggacgccggacttttcgacagaaatatttgaaatttgaggaggggacttttcacagtaaagagtaattaagtctcaatttttggcgtgtaaagtcataaaaatttatctaaaaaccaacaaaattaagccagatcagtattagatactgtacagaattttgaaaatcaaaaattcttgtcaggaaaataattttaaaaaatttggagacataatttttgagttactaaactgccaaaataattattttttagattctaaaaaaattagagtggtacgggaccgggaattttgggtgtaaaaccgggaccgggacctgccgggatccgagaagccaggaccgggaccgggacctcggtttttgtccgggaccgggactggaaaccgggaccaaccgggaatattaaaaattcaaaaaaaaatttaaaaaattaaaaattctaattaaaatcaagtgaaaataatactaaattaaatttttattttgttttttatttaataaa

SEQ ID NO: 83078 - DNA, 600 bp, Heterodera glycines
atgtacttgcttctcataaagatattatcaaatgctttaattatgtttatatttgtttcagccttacaggctccacaaatatttgtgtgcttcaaatgtcgggacacgtgtattaacgcgttttatgttgttgccccacttttgcgcagatacatcgaccaaactgtcatcgaatttttccgtttaaacaagcaaatctttgaccgaaggggcaccaaattgaaattgcacgcgtccactggaacagcgatttgggatgtgttggtcagggagatttggcccatttttgcgccaaccattcgtcatttggccttctattcgcctgcaaatttgaacaatttgcgcagtttcgtttccccgacaattctcactgatctgacgcaactgaaatcgatcaattcctatcgtctgttccccgctccaattgcttatgacggaaaaaatgcaactgctggcgaagtgttgtccaaatggttgcacacgccgacaaccgatggccaaccaaagcatttgctttgccgcttcacaggcaattatgcatcaaggggacaagaattggtcaacaagttcaaggaggtcgtccatcttcttagtccgtga

SEQ ID NO: 83079 - DNA, 3299 bp, Heterodera glycines
gatgtatctgcgcaaaagtggggcaacaacataaaacgcgttaatacacgtgtcccgacatttgaagcacacaaatatttgtggagcctgtaaggctgaaacaaatataaacataattaaagcatttgataatatctttatgagaagcaagtacattccatggaaaattttgactgatcaagggaaagaatttacagctcattcagtaaaaaatattttgatacaaaagatgttgaacatttttgcatgctgacttcccctcaattccacgctggtatggctgagcgtgccaatcgtagtataaaagaacgtttatatcgttacttcaccgaaagagacacttacaaatggattgaggtagttcaggacattgttaagggcattaatcagtctataaactcctccattggaatgcgacctgctgacgtaaattttgaaaatgcagaggaactgagacaaaagttatataatgaagcgaaaaaatttccaaaaaagagtcctaaattcaaagtgggcgaccgtgtgagaatagaaaaatacaaacatgtattccaaaagggttatttaccacgatttaccgatgaaatatttacggtagcagaagtacatacagaacgctcgcccgttgtctacagattaagtgacgatagcaacgaaattataaagggatggttttattccaatgatttatgcaaaattctcaaaaacaaagaatcactatatgatattgaacaaattttgaagaagaaaaaacaaaatggtattgaatacgttctggtaaaatggaaaggatacagtattaaattcaatagctgggttccattgagttctatctccgagaaaaatatataaaaactttattgcgctttatcttttaaaaaaatgccatccaattctttttacattgttcttccttcaaatacaaatgttgaaggtatcaagacaaattcattccgggttcgtttaccacgaaaactacaattcaactccgaatgggaagttggactcgctgttattgtatatcctcatacttggccttcgattggtactgttgaacagcaatttgtagaagttgaatggcaaacaggaaatacggtgcgtattgaagtaccaccatcgaatgtcacaaatccaattgacttgggtaaaagtctgtataggctcttagacgaaggaagtgaaccgttagcaaaaaaggtacgaaccgcacagaattctttttcgcatgctacaaactctgctcgtcgtggggctagagaagaatacataaaacgaaaaacgagagagaaacgaagtattcgagatgaagaaaaacttctagaagccttattgacggacattgaaacaatggttgacctttttggtgtgactcaaagtcttttagcgcgtgagaagcgcgcggagacgagcaaaattccgttgagaatgtctgctgatgacaatgaatcataccaacataaattggatgaatatttttcaaatttaagtggtcccgatttggacatactcgaagaaatgatcagagcaaaattgaacgaagaaattaaaaatatggtagaggaggaccgtacaattcttgatgcaacgaaagaaatgggaatggaagcgtgggttcaagcgtaccgtaaagttaggctcgtttgccgatttatttttgatgtcaacaaaaatcgtttcgagttaatatttgatcagcgatatgtaaggagggttaaaatttcttcacaacttgcgtatatcttaggctttgacagtacagattttacgacatcggaaaatgaagcaaaatttatgccagatatgaatggtggcgtatcatcttttcaagtttatactcccgatctcattgaaccaatgatgattggtgatgtcacagcaccagtgttacgcatcgtcacaattcgaggaaaacctgatgaaatagttgaagaacaatttttagcaatacaatatcacaaaattttaattaaggaaatttctgaactcctgatcgaaattcgcacaaatagcgggagcctaatgccattccaatatggaatatgtacattaactttacatttccgaaaactgtcctacttctgaagatgaataccttggaaattgataaaattttatcgacaagcccactcacaaaacagacttatatcggctgttttgcggctgaccagataccaaatatggaaatggtaaaatttccaaattgtctggtaatgaatattgacccaatcacctctaaaggatcacattgggtttgtgcttacagtccttctccgtcacacattgaatactatgactcgttgggcatttggccaccacctagcatacacattgcaaattatttgtcaagattcaaacaaattcgttatagtataattctacttcaatctcccaattcaagtgtgtgtggtcgtcatgtgctcttcttttacgtttgttcagcaattaaaagtgaccgttggaaacactgaagtttacgatagcggaaatttatatccatacaaagcctacattaccaatgaattgagctttccagtaaatgcaaaaaagaactttctcggctcaacgggatattatcacacggaacgtcacgatgatccaacggatgatggatttaaagaacgttgtaaagtttttaaaggtggtaataatgcacagttcctctctcgccttgactttgacttgggaaaccaagaactctacctgttaaataatttggatttgttgttcacaatttacaaagcgaaagacgcatttcttttgaaaacacttaaagctaatgacgacacaaagtaccgtttgaccgtgcacgatgttaaaatttacgctaaaatgattgaggttcagccctcactcaacatgaatctttacaagacactagaaaagcagccggctacttatgctgttcgtaaaaccgaaatcaaatcttcatacattagcagtgggcgctacgaatttgaatacaacgtgttcagctcgacaatacctcgtcgtgtaacaatagcgttggtcagtaactcggcttttaatggtgattacaaattgacgcccttcaagttcgatccatttgctttgcgagaaatttcagtacatgctgggggcatggtctatcccgttgtaccacataaattaaatttttcaaagaattactatgtaagagcattcgtggagatgtatgaagcgttgggcatggctaattcagaacgttcatttgacgtttcaatggatcaattcaaaaatggatgggccttttttgtcatctctttgaattcaaccttagacgatagctgtggatttgagct

SEQ ID NO: 83080 - DNA, 413 bp, Heterodera glycines
atgggccgctgcctttttgcagctggagggcagtgtgaaaaaaccgtgttgcagacaaaaacggcaacagttgcttcatcggtcgccaggatggccacaccaagggccactgctccaacaccaaattggtggccgaatttcaaaagttcaagttttttttcaaacatacattgttgccacggaaacgccgaagaaggaggtaaaaaacatataaaattcaaaaaaatttacaaaaaacaattttgttagccaccggttgccggctacgacttcgtgccggcaaaaaaggctgaggaaatgtacaagtgccatggccttacgcagttcctcctttgcatgtacgttttggcaattttttcgatttttttatgatattcaatgcaaaatgtgtatttacaggggtacccttgtaa

SEQ ID NO: 83081 - DNA, 571 bp, Heterodera glycines
atgaataattgtttccttttgtatttgggggctcccggtaaattggacactggaaaattggacactattgtacataaaataaataagttaaaaataaataaacaaaaattttaattgaaatatataatgttattattatttgtagcatcagcagcagaacgccatcatacattcataacgaaaaaagttttcattttgatcgggttcccattttttgcgtatttttggcacattgaacaaccatcgccaattttctacattttttggcatcttaaccaatcatcgcctaatttcgtacactttttgccacatttgatcaataatcgtgcctatttaatgtttgatcgactctaaatgccttaatccatttatccacaccaattatttttcaagctaattcctgtgtttattttttaaaagaggaatttggtgtccagttttccagtgtccaattttcctttggtgtccaaaattccgacggtgtccagttttccgcttggtgtccaattttccggtgtccaattttctggtgtccaatttaccggtccccatttttgggacaagccttata

SEQ ID NO: 83082 - DNA, 1447 bp, Heterodera glycines
atgaaactgtttactccattgtacgttggaccaattgttctcaactttttattgaaattaatggtttgccgttcaagtcgaacaagaaggacccgaataatgtaagtgatgcagtttagtattcgaacttcggtgcaacaattgcagaacgaacttagtgcctgccgatatttcaagattaaattttgaaaaattttaataaaattatcaacttggttgtttaaataataataattttttatgtgatttttctatttaaccgtattgaaaacctgaaaaattcatatataaatcttttcacaaaatttttttgaacatttggctagcgaactacgtacacgaatagatatttttaggtgttgaaataaacataaattaatttttatttcggccgattttcaaatatgatactcagataccgtatgctaagttggactcattcagggtactgtatgaaagataatctacgcaatttactcaggtcaacaagatgcttataaaggtgtttaaaagcgtgtccgctttctgcactcaaacaactgttgatgatttgcaatggctgcaaaaatgtaaaattaactttttacatttgctttaatttaatttaatttcaactacattttattaatttaatttaaaatgcacataaaagccaatgtacaccattttttagatctgtccgactacgcatttttcttctgctacaaatacgcttctctgctttttggccgctctccgccgagttcaaattctgtgaattaaacttcattattggtttttagcttgaaaaaagggataagttgatgattgatacgttttttggttttaaaaattcaaatttcaatgctttttttaaataaattctttaaaaatgtcaaattttcttcgggcggcgcttaccagcagtgccggaccatcaatttcttaagattttaaaatacttaggtcaaaaacagaaattttgtcttagttttataccgtttaaaataattatttttgcatgttttttgcattttcgaattttagcagtggccccactgggtcaacaaagtgctcctatcgtccattgaagttgtgtcccattgtggcacttgtgccaacaccactgctgacgaattgcgatcaatgagaatttgtaaattcaaattgaaatctatttattgcatttatttattattttttcatattttccgctaattaatgctaataatgcgcaactttttcagttctttgctgccatgcgttgaagagactaaacgaaacacaatacataatatacgattttcatcaattctgatcaaagaaagagtgatcataataattgggccagggattcgatcgatattcacttattggtacaaaattttgcaaaaaaaaaatatggaaaaattaggaaccgccggcggtgcatttaggcgccgcaaattgtggaattttgattaataaa

SEQ ID NO: 83083 - DNA, 659 bp, Heterodera glycines
gtcgatgttttctctgagaagatgaatggcacattaaaagcgaaaaatgcgattgccgatgccaacataacatgcggactgaattcaaacttctacttgtacgtttgtgtgttagttcaataacaacaaaatgggattatgattatgccaatcacaaacacaatgccgcgaactattggcatttagcattgaaaaagcggcaaatgcaacgaaaaacaaaatttgccgggattcaatttcttttaagggtcgttgctttatctcttccttatgcccttttgcatgccaaaattctatttttaaaaaataaatttatatgtaaggcggatatgttttaattacgacgcaatagtgccgaacattttgtccatttcttgttcaatgggaaaaataaaatatttaattgttatcaaatatttatttattttttatatttaaattgtgccccattttcagtggatggtccacctgcatgaaagtgaatttgcttctttttatgtgcattttttttttgattttttgtttcttttttcagattgcattctacggggatgacggctatgaaaagcatgccgcaaaatacggtctcgagcaaacagaagggccggaggaaaacttcaagaacatgacccagttcgacaaatacggcttcatgcacg

SEQ ID NO: 83084 - DNA, 950 bp, Heterodera glycines
  unsure (1)..(950): unsure at all n locations
atgctggacctgaccaacaacgacaattacgacagaagcggccagtacattgatgccaaattggtcaaaatggagcctaaaatagtgagcccaccgaagccaacggtagggtgccatacaacaaaaccaagcaaaattatttagaacaaaaaaacattaaatcatttttaggaaaaaccagatgttgtggagcctgtggagccagtaagtctctttttatctgaacaaatcatttgtgagaatataaattattataatttattattattaacgcacatttgcaaaaattagtcatttaataatgcctttcatttagacaccggcggggaatcaaacagcagaggttaagaagaaggaaaaggtggagtcaaatataaaaagaaaaagcaattattttttaaatggtattcattaaaattccattttttaagaagtcgaaggaagaagagggcgaaataatgttcgacgagaagtcgaagtcggaggatgatgagttggaggagaagaagaagtagaaggatgggatggaaggatgaaaagcggtggtgaagaaaacaaacggacggatcagagaaaaacccaaaaaaaatgcacccctcccaagcccattttaatcatcatttgtgtacccctccaattcctcgtcccccgccccaaatttcattagccaattgcccccatcaacctgtatcatcatcaccaacccaattcaaaattagccattgccccacccaatccacccctatcgtcncagtctcccctccctctccctccctttgttttggattaattttttgaatttaatttgtattttaatttatttggaatttgcataaatttaatttaaaatgcggtgtctttcaatggaatgaaccatacaaaaattaatcaattagacgcctaatttaaaagcttttaagacaaacaaattccttaaagttgggctacaa

SEQ ID NO: 83085 - DNA, 608 bp, Heterodera glycines
atggcattttgccttataaacgatgatgacgacgatccatcaccaaaaagatggggagttttactgctcgggattaggcaaaactgtccaaactttgttttgctggggtggcattatgaagaagaaatgccgaaaatggaaaggtcaaaaataaagttggaaagaaaaaaacaaatgacgacaattttctgttggtgagagagtaaaattaacaaaaaaaaaagaatttgcacggcatggtgatctgatgatcaccggttgcactgttgactttttcatggtctaattacggaacgggccaactctgtcccagtcaactttgaaaaatatacaaaaattgagtttttttccagctttcaagcgagaacttttttgtgagctgcttaatcaattaaaaaaggcttacaaatatcttctagatatcaagagcttttgagtgatactaaggttgttatgtttggtcaacaaaaaaaaagttatggctttttaaacttgactggacggagttggcggacggatttgacccattccgtctaattaaattataaaattaaaaaaatatatattttagtttacgtcaaagttcagtatcattgtttatttgttga

SEQ ID NO: 83086 - DNA, 379 bp, Heterodera glycines
atggcactgttggacacggaaatgaatgataatgatgatgatgacgatggtgatgatgcaggcattttgcgggcggtgtactgctccaaaatgtggtgtgatatgtgccaaaatataatttaaaaaatgcactaagtttggtggtgctggatgaatgaaagaatgaattaaaccgatttggttaacgaaagtatatatttagagaccaaaaaatcgagaattcgtgtttccgagttttttttttaaacttgtaaataaaaaattccagaggcctatttcaatttccgtcatgtcactcaatattctgacgtcataaatttgacggatttgaacatttagggaaatcgaatgaccatattttcgattctgaaaaaataaa

SEQ ID NO: 83087 - DNA, 176 bp, Heterodera glycines
agaccggccaggatcgggatccgagtttctttggatctgactcgggaatccgaccggttaagaagcaaccgaataggaatgccgaaaattttctaatttttatcccaaaccctgttccggaagcaattctcgaagaatgatctctgagctctgaatttcaaaaaatccgatctcta

SEQ ID NO: 83088 - DNA, 1707 bp, Heterodera glycines
atggtacaaaatcagttgcaaaatgatccggcacttttatacagtttggaaaaattatttttcatttatcaaatgctgaagagcttaaaaattggtacgtttcgggcttaatggaatttaatcgaaaaccgcacctaatattatgttcattataattaattacttgctgattctttctaagattggcaacaaattattgcaatatttttgaataatttaattcaactttttcaaaattttcgggactatttttttttttttgcctttttgttgccaattttcaattttcgatggaaaggtggaggtaaaagagttttggggtcaaaatcttaggatcaagcatatattattaataaaatctacttaaaaaactatttttagatgccaatcgtcatgaaaactatttgaccgcctcattagaacattctatgaccttaatggccaaccgttttggcattcggttcaacgaaatttcgaatgttgttgagccaagaaaaagtgcatttatgcttaaagaaatcacaaatttgttaaatgatcaatttgaaaatgataggactggaaatgagcatgaaaaagaagaaaatgggcaggacggatatcggaaaaaccaaaaatgggcatttcgccaactcagcaacaattcgaacaatttgtttgggaaatggtttaattcatttcataaaggtaaaggggtaattaagaaaaaaatgtgttagatggcttaacaatgtaaacatatacaaaattgcatttttatgggtttaaaaaagaaaatggttatttttcgctaaatccaaaaatcattaccccttcggagaatggcaaatttggcttttgcgcgccaatatatttttgaagcaataccaaattgttttttttttaaattaaatatacattttctacctagaaatgcagcgccgtcgtcgtcgaaaaaagcgcagagattttttcggcataatgggtattttaattatgttgggattagttatgctttgtcaatggattgtcagaatcgttactttttgttgcacttggcattctgacgaagaggcagaagaacaatttgcaacagaaacaacggcatttatactttcaaccgaaattggcgaagctcgtacaatttttaatttattttagggttaatcgagtccgatatttgtgaaaagccggattcgggaattgcgaaatccagaaaagccgagttcgggacttgcggaatccagaaaagccggggttcgggacttgcggaatccagaacagctggcgggaattgcggactctaaaaaagacgggttcggaaattgctgaacctaaaaagctgggttcgggaattgcggagtcagaaaaaacgtgttcggaacttgcgaaatacagaaaagccgggttcgggaattgccgagttcagaaaagccgggttcaggaattgctgagtccagaaaaaccgggttctggtccgggtccaagttttccaaccgcctccaggtaccgggtccgggtcttggaaaagccagatatcggggtctggaccagcttgggtacccagacgacatgtaaccctaacatttttaataattttttttaaattgtgtctcttaaatgctaagacatgacggcattcgaccaattgtccggcacaaaaattggaaaacgaagttcggcacaatctgggccggaaacatgcagaatttgtttggacgaaataaa

SEQ ID NO: 83089 - DNA, 1199 bp, Heterodera glycines
atgggcatttttgacgaatttgttattgttgacgaaaaagcattcaccaatttgctgattgagaaaggaaacacatgccaccttcacatcaactgtcttggttgtgcaaatggccgcacaaaaaacgtcacaaaattcagtgatgtgactcaattcgcggcactgtaaaattattaatttgcaaaaaaaaattgtaaaattaaatctaaatttaagcgaatttcaattccaaaatgcgaattgcgcattggaagtcaaggacattggcaatgcttccgagtcggatgtgccgttggcacaaatcattgtgtggcggtggaatttgaggggggcacagacggtcaaaaatgtgcgaacgaactcatatatttttttctaattaaccctcgagacatggcccaaacaaaaaaaaaccaagaaatatttggatgaccccctttttaggcaataaattttcaaaatctctgtgttaaaataaggattttcggggtcggaggaaaacccgctttcggcacttaaattttgaaggtatgccaccaaaaaattgtaaaatattagcgtggtctccgtaaatacgaaaaagaaattttttccaaaaaaaggggggggggggtccatctaagcatagtattaccgagatttcccttcttcgagactctcgaatagaacccagaaaatattttttgtccctttaattttagcggcaaactttgaacattggtggcactttatttttccatcaattttatgccagttcttccattatcattcgaattctcaaaaaacggcaaaaggacggaccgaagtaaaaaaaaatgatcatttaaaatttgggcattttaatgttgtttttttttgaattttcagtccgactccatcatttctcggctcaccggcggacgacgatttgacagttcaaatcggcgacaaaaaggtgaaatcggcaacagtgcatgcaattattgagtttaaaagtgccgaaatgaattaaaaagtagccaaaccgttcgcttttcttttggggggggggggggggggggctctatccaaaaactatttgatttatttactagagaccggacaagagggtcggtcgaacggtttcggttaaaaaaccgaaaaaaaccgaagaaaaattttcggtataccgtttcggtttcggtttttttgaatttttttatcttttcccaaaaaaaaca

SEQ ID NO: 83090 - DNA, 225 bp, Heterodera glycines
atgtctgaaaatgagcattcaaacgttggtggcgcatctcaccaagatgaagattcttcggatgatggactttggaacgagttcgaaacttgcgccacttcaggttccgaaagtagctgtttggcattgttcgaatttggattgttttcagtgactcacctttatcgcaattccaattggcgcacattgcaacaagcggccgcttcggctacccaattgtacaag

SEQ ID NO: 83091 - DNA, 204 bp, Heterodera glycines
atctctcaatctctaggctagggctcaatacatacacacctatttattgatttgtttttctttttgaatgacctcccccacccctcccgaaaattgttttttgttccgccgtcggttaacctttgccctttacacattttcccaatatttgtgacattggtacgttcaattcaacagcaatgttttttgatacataattttgtc

SEQ ID NO: 83092 - DNA, 1634 bp, Heterodera glycines
cataacaatgccaacaacactgttggaggaccaattatggtaattttgaaaattcattatgcatattttaaatgttgcataaaataaaatcatttaaatttattatttattaagccgaatgtgacaaattccaacaacaaaattcgagagccgattaatgtattttgatcaaaagctaaatttacctaatagttttaatttaaagaccaatttgtcaaatgccaacaattcaacccgaggacaaattgtaattaatgttattttagataatttaattaattaaaaaaatatttaatttaaattaaaaaattaaaaatttttattattatttcagcaaagtccggcgaatgcaacaaacccaagtcaagatgcaattttggtaattattatttaatgtaaaaaaaatttttaaaaatctatcaaactttctataaaaaataaaaatttcaaaattttagcaaagtttcgtaaaaaacgacacagtgcgtgatgtaattatggtaaatttaagagaattaataagcaaaaatattattttaatcatgatttttagtatttgtacagcataattcaaaaaactcccaccgaacaattcaccaaacactaatgattagtaattattaaattgttgtaataaaaaaaatctccaaaattttcagattattccataatgcacatagcgccaagaatgattgggcgtagccgaaagaatgccaaaatgtgaaaaaatgctaatttaaattaaattccaaatatccatttaatgcttcgttgctttttatcccaaattttatttactcgcattattattatgatttggtcattaataaaaataaaatttgattcactaattaatgtgtcatccaattaaaaggaaattgaaaaaataattattaattaacaatttggccaatattaaacagcacttcataaaatatgatggaatttaattttttgtgtgacgtaaaacatttattatttggcgatttgtttgctccactaatcactcattcacccgccactgactgactttacatgacggaaaatttggaggaattaaatttggaaccaccgaccgccccatttaaacccataatttgcagatttttgatgaaatttcattcgtcaattaaattaaaataattaaaataaactttcaaattctgcaactatttaaagaaaatttggtgttaaaatttatttataaatcactggttcaattttggcttattttatttataaaaaatttatttcagtcaaataaaaaactattaaattattttaggctaaaaatttatttaaaaaaacctctaaattagtttcggccaaaagtattattaaaaccagtcgtcttttaatgagtttttagctatttaaataaaaaattaaattttattgttttaattttaaataaattaattatattgctttttaatccttaaaattaaatatactcaaaattatataaataaatatactcataattatttgcagaattatatggatttatattcattttatgatgacaataaccaattaaatgcattgtcattttggcattatcaaatgaaatatgggaacgaagtcacttcaacattgttgaccaaagcaattgatcgggaatgcgttgctcg

SEQ ID NO: 83093 - DNA, 970 bp, Heterodera glycines
atgaataaattggtgaaaggttcgagttaatataatgagcatagttctccaagtttgactatttacgtaatcttatgataattaaaattaaattttattccatttttattgtaattttaaatgatataaaaaatattaaatttttatttaataataagaacaattatcttaaaaagtcttttttgccattttaaatgcattagaaaatttgccaaaattcgattttgtaaattgacaaaattcacaaatttgaagatattcaatttctttgatgcttgatagtttatttcttgtataaaaataaatataaattgttttcagaaaaaatatttttaaaaaaatattttaggtttataatatttttagtgacccattagggaaaaaattaaaattctataaaaatgtaaaatttaaaagattgattttcaatattctttttattttttcacttatcatattattattcattttaaaaattttctaataattattttccaatttcttatccacaattgccagtaaaaaagaatttttttaaatctttaaattttttaaaggtaacgagggatgcctacgagcagcgcattgagcgtgtcaacgtggctggcggaaaccgacgcgtgatttcccgcgaggagaaagccttgcggccgcgctcatggtggaaggccacgagcagcgcacctactgatcggatgtgaactgcctgagcaatgagtcatccaacattgcaaataacctaaagaattattaatatttaatcatttttatagaatttattttttcagaaatagttgggttaatttttataaaaatgaaaattaatatattattgctatgcctattactgattaaaaacactatagatcagattgtctcaatgaaaataaagcaaccgaaaggatttgacgaaatatttggccaaagatgggacgaaagagcagaggacaatgaagttgatcaaacttga

SEQ ID NO: 83094 - DNA, 461 bp, Heterodera glycines
atgccaacaaaaatgttagagaaagaaattgccaaaactttaggcgtacatgaacgaacaatttatgattggaagaaaaagtttggagtaaacggaagtaaattttaataacataaattaaataaataaaaatttatgctttattaatcattgaattaagaaagcaaaattaaaagatattccaaagaacaaaaattcaaaattgtacaacaatttgacgaaatcaaaagtcgaaagaaaggtaaatcaatcgcaaaatcggcaaatgaaatggaccatcaaatttctaaggaattgggagttagccgttcaatgatttgccaatggaaaaaggatttttgcatgacaagtacttttgtgaacaaatacgttttctcttcttggaataaaatatttttaaattttagagtataaaattttaaactttttttatttgtaatttattgactatatttttttca

SEQ ID NO: 83095 - DNA, 1006 bp, Heterodera glycines
atgtggaagaaggcatttgggcccaacttcagcatgttcttcgtcctcgaccaaaacagagtgccgatgggttgcattagcatggcattgtacccgcaggtggcacattggagcatgttctacgtgaaggacccttatcatggccaccaacttggccgtgcgctcgctcgcagagcgctggaatttgcaggggacagacccgtatttggttatgcaggtcagaaaacatacggcagttttgcaaatgcttttttgccgattgattgctccgtagaatgattaatcgattgatggcccatcgatcgctttgccgactgataaattgattgatggccaatcgattgattttgtcagtatccctgttcttttcaagttcctgaaatgtggcacaaatacgaggaagagtacgcattccatcactatttggactggcgactgtggtcattcggtgcgaaatgtgctgacgtgcgacccgaacggttggatcacgactcgagcgtggagctgaaggactggcgtgaagcttcgttcgacaaactgttgctttttgaccgtcagcagacggtgggcattgacagatcggcgtatttgcgggaggcacttcgccttccccaaagtgccgcaaaggtcagcagcgactagtttttggcattcgctgctattttaatgacttaaggtagccgtgtgcagggagacgggcgacgtggtcggcttatgtcaagtgcggcatttactcggcgatcggctcggcatcagtctgttctatgccaacagtgaggtcagtcggtctttgcccccgctttacgctcctccgttttgcttcagtccatcgcctcggctcttctccgtgccgttctgctccaatttgcgggccccgatccctccgccaagttcgactcgttcatctacaaaactccgtccaccaacacggagtccatccgtctcttccgccaactcgtccaaaatgggccggtcgaacgtcggcttttctacccgcaattctcgc

SEQ ID NO: 83096 - DNA, 1508 bp, Heterodera glycines
  unsure (1)..(1508): unsure at all n locations
atgcatcatactttgaccattttattgtgctcattagtctcgacggttgcttcgattgaagaagcgaaaattaaaattgagccgaaagaagaacaatttacagcagaaattaagaaagaatttgctccaattacaacagtaaaagttgaactcgaattagagcaaagaaaagcggtgaaaaaagagccaaaagaagaagccaattattacggtttaatggaaagcaaaagcaaccgatttagggaaattgaagagggaaaaaacgattcgtcttgtgttgatcactctgacgaagattcagccaaatctgatcagtccgaaggaggtttaaccctatctgatcggcatacagaccaaaatgggcaaagcagaaagcgaatgaaggaaaatgatcgaaaaagatggaaatttacaaggaatatcggaaaatgaaagaaacaacggcaaaatctgaccctgaaatagcgaaaataatgggtgtaaatattagcatgattcggaggttaaaagaaaagtttggacaaagtgaaaaaattaaatttaaaatgattataaaattaatttccaaatattttcagcaaatttaaaaaaagcaaaaaaactcgcttttttattttgttacaatatattacattataaataaaaattaattttaaagatttaaagtccgaaagaaaaaatgattgtcagcgacgtgaaattcttagcaaattttttaaaatgaaaaaggagcgttttttatgtgatggaaaaaataaaactgtccataaaattgaagaagaaatatcggaggaattgcaagtcacacgaaagtcaatttacaattggataaaaaaattcggaatgaaaaacggtatgatttagtcaaataaaattagtaggatgattctgcatttgaaaatcactatgggatttaaaaacaaatttttgtgggttatttgttttacagaatttctcagaaatacctgagaatctaagagaaatcaaatgcttctaagttgagcttaggtgatttttttactgaatattgtatacaaaacatttatttaatttcggggattaatttttagatttcagactaaaaagataatttcttaaatttaagcctctaaaatatattccgacgaagacaaaagaagcattgtgaaacagtttaagaagctcagaaatgaaaagcaaaaagttaaagaaataccaaaaatgttgggaattggcgttgggaccttttataaatggaaggatgaattttccggtaaatttacaaaaatgtcatatttattttcttanaaagagtaaaaatttcataattttcattagtaaaagcttcttttaagttaattntgttttagatgaagaagacagtgaaaaatcagtgcaaaatgactctaatgaatctgatcgatcgatactacccgaaactgatcagtncgaggaagaanaattnncagaactcccnaaagatgatatgattctgctgatgatggaccaccacccgttgatagcaangc

SEQ ID NO: 83097 - DNA, 1066 bp, Heterodera glycines
atgaaaaaggagcgttttttatgtgatggaaaaaataaaactgtccaaaaaattgaagaagaaatatcggaggaattgcaagtcacacgaaagtcaatttacaattggataaaaaaattcggaatgaaaaacggtatgatttagtcaaataaaattagtaggatgattctgcatcactatgggatttaaaaacaaatttttgtgggttctttgttttacagaatttctcagaaatacctgagaatctaagagaaatcaaatgcttctatgttgagcttaggtgatttttttactgaatattgtatacaaaacatttatttaatttcggggattaatttttagatttcagactaaaaagataatttcttaaatttcagcctctaaaatatattccgacgaagacaaaagaagcattgtgaaacagtttaagaagctcagaaatgaaaagcaaaaagttaaagaaataccaaaaatgttgggaattggcgttgggaccttttataaatggaaggatgaattttccggtaaatttacaaaaatgtcatatttattttcttaaaaagagtaaaaatttcataattttcattagtaaaagcttcttttaagttaattttgttttagatgaagaagacagtgaaaaatcagtgcaaaatgactctaatgaatctgatcgatcgatactaccgaaaactgatcagtcggaggaagaaaaattcaagaaactcccaaggattgattatgattctgctgatgatggaccaccaccgtttgatagcaaagcgtgggcatggaattttagcgtggcaaaaaggaaaaatcatttaaaaaacggaataaaaattaaaatttagaaactgggaaaatgaggcccaaaggcaaaaacatacaaaagtttagtttttcgaggttgtggaaacgataaaaaaatcaaaaaaaaaatgcagcaaatgtttaacagatttttgaacaaaattatatatcagtggatagaataagagtgatttgtattgtgaaattttttccttttataaatttttttttaatatatggaaacaaaattaagtta

SEQ ID NO: 83098 - DNA, 77 bp, Heterodera glycines
ggattgctggggtcgtgggttcgagtcctaccgggcgagttaccttttatgttctacatatgactgtaccgaataaa

SEQ ID NO: 83099 - DNA, 882 bp, Heterodera glycines
atgggtggtcgagtcgcgaatttgccagagctcgatcaagttcgaagctatcattggctagagcgagcaaggatcgggaaacgttcgttccgagattgtattgcggcacaagagggccagttaaaggcacgggaattaaagtgcccgcacatgagcgcgagagctaagtggtgccggaggtgtggtgatccgcgtgtcgagaccgaacagcatatccttagtggatgtgcttggtcccgaactggaactatgctagataggcataacggtgtagtacgacaagtacacacggctctctgcagaaagtacgggttgcccgtgtcttcacatactgtgcccctacacgcagtacttgaaaatgaacgagccaagatcctctacgatgtagcgttacacactccaccagcgagtgttcttcctcaggaaggcgggagtactggttatattggtctgcgaagcaacagaccggatatggtagtatttgataaaggaagccgcacgatcagaatcgtggaaatttcagtgccatggcgagagaacctgagaaatcaggaactcatcaagtggcggaaatatgcgatcaattctatgattgaaccattggaactagcggaagttgaagtaccaggaccaaacctgcaaaatgtgttaggtcgcgcttacggaaaagacttcccaatagtgaaagtggtgccgattatagtcgggtcgtgcggtgaagtactaccgaatataactggtaggttgagcgagcttggtatttcagcccgtgaagtaccgaacttgcttgagtcaatacagcgagctgcgattatcggttcaggacatgtgattcggacccatttgagtgtgccgaggaacgggtccgaaactgacttgtag

SEQ ID NO: 83100 - DNA, 224 bp, Heterodera glycines
tttggggcgcactcccgttttaccgattaagtaaggaatcgatgaaagtagtggtatttcacgggcgccttgcggctcccacttatgctacacctctcatgattcttcacaaagtcagactagagtcaagctcaacagggtcttctttccccgctaaatttgccaagcccgttcccttggctgtggtttcgctagatagtagatagggacagtgggaatctcgt

SEQ ID NO: 83101 - DNA, 992 bp, Heterodera glycines
gtgcgtggtcagcatacgaaaacgaccggacgtaaaggacgcactgtgggagtgtctaagaagaagggaggctaaaacaaccgtttggttaccgatcatgaagtcgatcagttggaattgttgttgacgttatttgatgaggtctatgtaaaatgttattgttggttcttacgctgttttttgtttttcacttttgtaatgtgaatgaacaatatttttagttacttttttctttgctttgaaaaatgaccactttagcataattcagtgatgatgtacagcctggggtctttctatggtgctcctcccattgcttacaatcctacaccgctcgccgccgccactcctggcgttggtccaatgcgtccgccagttccaatgagtgtccatggagcatcgcctcaacagatctatcagttcaagccaccgacttttgacccgtacctttgcgatcagtttttcccacgaagcagcacagaggctgaggaaacagctcagacacaggttcatccaacactaatggcaatcgtaagaatggtgggcccgtattttcctttgtgggcgttaaataattattcattaacaatcaaattttttttcgaattttagttcttattggccaaacacaatgacattctgccttctacggtggaacaatctgctatttcggcattggttggaaaagtgaagcagactttggacaaaatcattgttgctccggaaacatttaactctgtggtttgttttttaccatatttgtaataagcattgattaaaaccatcttttttgattgtaaggccattgaggaagtgcgcgaggtcggctcttacaaaaaggggacaatgttggccaagcacaatgtggccgatttggtcattgtgctgaagactttgcctctaatcgaagcggttaatgcacttggccagaaaatagtgcttgatctcaaggcagaaaaccatgccgatagtaagaatgaatgaagaaaggacag

SEQ ID NO: 83102 - DNA, 1258 bp, Heterodera glycines
cgactgtgtgaagaggaatgcgagcagctggtcggcattttgccatcccgatatttgaaggcggaaaataattgtgcaaatagcaatggcattatggcacgaaaagaccccaacaaaatgttgagcgaaagatttgctcaattttcactaaaaaatgcagctgaacgcaaaaatgagaagccggaggaactgaaaaagcaaatcaatgtttggaaataatttttatttaattaaaaaataatattaattaacttttatatgtaattattttgaaagttttttgttttttaggacctttatttggagacactctatacaattttgcataaaattggtaaagaagctgttgccaacgaggaccaacttgcgcaatatgccaaatcagctttccaagtcgaagaacgtactcatcaaacactgatggaaaaagcacggagcgaaaaagtggcattttaaaataaaatatcctttattaatttaatattttttattttaatttagccgccaatccttttgttaaatgtccttttgctggaggcccgtgatttaatcgccaaagatatgtaagagtgaaaataaattaagataattaataattatgcataaaaataataattgaaataatttatcaaaatttaatgtaataatttacgtaaatttgatttgaaaaagcataaaatataaatctcgaattagtaaacaataagcttagaaaagtgccttttatattcttaggttgagttagcaaaaaaaatgacaaattgctgacaaaagccgcttcgaaaatattctaaaaaataattttctaattatagtgacggcttttcggatccatttgttatgcttggcttggtgccaaggggtggcagtcaaaggagccctggcgcagatgatcagaattcgccaaccaatgtgattaaattaagaaaaaaaatagttttaaagattttaattatccactaattttattttaggaaatttcggaagcggattcgtctgcttcagctgctgacggtggtgccggtggtggtggcaattccgcgcgaaaaaatccgctcctgcaacgcttcagcggctcatttcgccgcaaagcgcgcaaggcgcgcggtgagacgcaaacatttgacgccgagaacggcattccggcacgcatcatcaaagcgtcatcagtgcagcggaagacgctgaacccgaaatggaatgagaagttccaatttgtgattggcgatgtgactgatcgcttccatttggacatttg

SEQ ID NO: 83103 - DNA, 575 bp, Heterodera glycines
atgccggcacaaaagtcaaaccgttgcccatctgtaaggtgtggtgccatttgaattgaacacattaaattaatcattttgtgccgatttagcatatgttccacaacgaatgcattgaaatgtggtaagcaaaagttattaggggaaatatagttaattaattaataaatatgctttaggatcggaggcggtcataatggttgtccaatttgtcgacaagaaatattggacacggacatgttgtcaacaacaacagaaaatgcacgtaagagcataataattaattacttaaatttatggcattaaagcataattattaattaaatcagttaaaataccaccaattatttagaagcaaataataacaacaataataattctaatggaggaacacaaaacgaagtgattatagaaataaatgataataattataataatggaacagaacaaaatgaacaacatcagcagcagcaaacagccattgaaaatgataataataatgatagattatcagaaaatgacagaagagcataataaagcagtggcatttttgattttattaacacattaataaa

SEQ ID NO: 83104 - DNA, 443 bp, Heterodera glycines
atggtggaaattgctcaagttgccataaaaataaaagaaaaggaaggccaaatgatgaagaaaaattccttagatttgcttttagagctaatcaaatcgatttggacgaagccgcactttttaatgggcgaaagggtaattaggaaaattagtaagtgttaagtctaattaaccattcagacgaaaggcgacgacggaggcgcaaacgaatgattttcgcaaatttactttgttatttgcttttggctatgtgcgtgctaatcattctttgcctgtctttgatcgcttgtcataacgcgcaaaatatcgcacggaacattaacagaaacaatggacaaacagaagcaaacggagcaatgagcaacaaacgatgtaataagaaggcattataatattaattaactaattagttaattaggtgtcacaatttttcaattaataaa

SEQ ID NO: 83105 - DNA, 613 bp, Heterodera glycines
atgtctgctgaattaccgatttgtctgcttttgctgctgtttttatccttttctttgtcggcatttgccactttcgacggccaacaaaatttgagggatggccaatttttgggttgccaaattaagaatttaaagctgctgcaaacaaaatttatggacagaaaattaatggaaaagtttcactttgagctgagcaaaaagcagcgaatttttgaggcactttttgtgggggaggaaaaagtaaaaaaaagaaaataaaattaacaattaattattgtcaaaaatttttaaagcatttgctccgctcggatgcttttcctcctcctttaattgctgccgatgaattcgaatgtctgaaaacaaaactgaattcgatccatgctaatgaccccgctttgagtcaattgctaaacggcttatttgctgctgaaatgcgcgcaaaacgaaaattggagtcattggcaggcaaataattaaatgcctaattaattagcatttaattgatcatatttttttaggtttcggtgatatttctttgttgaaagaattaaagcaaagcgtcgcttttgctttgcttttcgtggcaaaacgtcgccgaattcagctgaataaa

SEQ ID NO: 83106 - DNA, 1151 bp, Heterodera glycines
atgtttgtcgatggttgcgccattctttggagttattgggatcgcttcaaaaaaccaaaaaagaaaatgtaaaaaaaacgctgacccacgaaatgtccaagtctcgaatttgagttttttattattcagatggactaaggttaggcaaggggtaatataaaggggatattcgtattcagcgaccccgaaaaccctaaaaatcctaaattagactcattttgtttttataaattttgaaaaattttggacatttcgtgggtttttactcttttggacattcgtggcttggacactttgtgggggtgccaaaaaaacaataaaatttgaaaaataatttttcagctttatctccgccgattgttggctttgtgtcttcgatttgcttgcgccttctcaacttggcctcggaatttcaatgatcagccaccgttttgattattacgtggacgaacacttcaagacacggcgctgggcgttgaaatccatggaaatttggagcaaaattgaagagaatggcacacaggaagcggcaattgtcaatgatcgaaaagcattgccaattccgaaaattcgaatgccacgcaaagtcatcggattcaaaaacattataatagggtaaaatggattaattgtttgctttctttatgctatcatttaatttcacagatacatggaccacaatgtgatcacttttctacgccatttttgtcaaattttcgccgtctgtccaattaatttgtccatccacacgaacagcaatcgcattttggagttcgttttacgcaacatttggccattgctcgggaaaaacatttgtgccatggaattgtccgtcggagttttccaccatttgcgacaatttgtgccgtcaattctcaatgatttgccgttgctacgcattgttaatttccaagtcgccgatctcttcaccgaatttccggccgatgacagtgccacggcgtcggatggacaagcggtgaccaaatggcttttcactgcccgtccggacaatgtgccaaaagtgctccaatgcgcgttgctcatggacatggatgatgggaatttggtgtcgagggttgaagccttcaaagcggtgatttcgaattgatttatttggcacttttacggtctttgggattcgcttatttgaa

SEQ ID NO: 83107 - DNA, 223 bp, Heterodera glycines
tggcacccccacaaagtgtccaagccacgaatgtccaaaagagtaaaaacccacgaaatgtccaaaatttttcaaaatttataaaaacaaaatgagtctaatttaggatttttagggttttcggggtcgctgaatacgaatatcccctttatattaccccttgcctaaccttagtccatctgaataataaaaaactcaaattcgagacttggacatttcgtgg

SEQ ID NO: 83108 - DNA, 225 bp, Heterodera glycines
atggcacaacagatgacaaacattggcacagcgatcagactaaaaaatgagaaggaaaagtcgagaaaaaatgcgcaaaagtaaaaaataatattttgaaggtattttcagggagaaaaagtcgaatagagagacgaaaagaaataaatggcgagagcgaatgaaagagaatgggagaggagggaaggcttttattgcaaaactgcgtctataaacgaccgttta

SEQ ID NO: 83109 - DNA, 792 bp, Heterodera glycines
atgccaaaagtaccaaagcataggtttcaaatatcagtaagtggacaatacgtcagtaacaaatccataagcaaatttatttttaaaacaaaagaattaaatgataatttttcgagatcgtcaattaaacattccatttgagtttttgccgtcatatccctcatcctatccaaagtccatccacattgtgcaagtatataagtccatataatttccccctcggtggctgcgagctggagctgtttaaaacggtaaaaattgcttaaagccttaactccggggacacaaaagaaaagttacgaagttaaggcatttgttgattttggacagaagttgtatcctatgttaaaactttcacacaagttaaaacaattgttgctatttttcgatctatcttattcaaatttaaatttcaaccttggttttttaatttttccatttccgctctttttccgtctctttcttattctctcttctattttctctcttaattgtaccctctctatttggggatgttttaattttctctatttttttcttttagttcattaacgcttttctctcttgctcactcacactctgttttcactcatatgttttattccttaacttttatttccataaaatcttaaagaaattgaacaaaccaattaattgcagttccccttatttcagagggtttctttcttcacgactacagcaaatgcaaaattcatattgttgctgactgaccatgagatagggcacttggtagccaacataatgtgccctgatgggtttaaatttttaaat

SEQ ID NO: 83110 - DNA, 342 bp, Heterodera glycines
atggccttttgtcagcgcttcgactccgccgatcagtcgtggtctctgctcgttcgtccccatcaaaagaagcgcagcggcgattacgcccgatcggttgttgaggtgaacagacaaataatgaggggaaagaacactgagtgacaaccccttttccatcataccgtacttttcgtgtgtccttctacagtaagctttgtccttcagcgttacactgccattccgcttctgactctcgcgccagttgaccttgcgcatccgagcaatgtgttctcggtgatcgaaatgtacgaggcgaacggacggagggaaacgccggacaaagtttactttgtacgactc

SEQ ID NO: 83111 - DNA, 1479 bp, Heterodera glycines
atgggagaacaaatgttgaaaaaactgaaagaaaaactgaaacgattattcgcagtgaaaaagaatgatcaagtaatggcacagataatggagaatttattttcttttataaagaaaataataaaaggtaaaatgaatgaacaaatttggggggggggggttctcgagtttgttcactcaaattctcgagtttgttcactcaagcatataaagtttttaaatttttttatcatatctctccacccttttatttatttgtcgaataaatcacattaggaatggttcttcccatcaagaaaatgagtaaattttctattaatttcacctatcaattggaccaattgttttttatattgagtttttaggccacaaatttagcaaatatgtttttaagcttctattctttgttttttttttgttattctgtcgaaatttgtgagattgaaaaaaattaataaatttaatccgactttttaaaagatttccacctaaactactatagttaggagatctgacatccatagactttgttgagaatactggaaaattttaaaaaaatgttgaaatagcgaagaaaactgagatttctgctcttaaaactcacattccgaccacaattcgccgggaacgggatttagggttggaattaggccgggataggattagcgggattgaaatcccgtttttgctggaatttcaatctcgataccgggattcaaatctcgatttaggcgtgatccctaacccggccttttttgcaaaaaagacgggatcggaatcccgggaaaatcccggcgggttcccgttccgatccggctctaatataaaatagaacaattgtcagtttcaaaaaaaaaagtttaccaaaaagcttaaagaaaaggaaaaacggtaaaacttaaaaaaaaagtttacatatgaaaattagtttaaaaagcattcctattcttaaaattacatttatttcaattcattaaacccaaaaaatcagttgatacaaaaacgaattgaatttcgtcgtccgtcccaaaaaacatcggaaaattttaaattttttttaaattttgcgattattaattgttcattttttcacaggagaaagcccgcaaacggttaagcactatttgctgttcaccatcgaaatttttgcattgagagaacgaatttcgttgtccgaaaatatgacaaaaaataaaattgaaataaatcattcgaaattatttaaaatggttttggaggaaagcaacgaacagaaagagggcaattccgagagaaggaaaacaattttgacatctttgtacactgaagtgggaagtttggaagttccttccggcattgaaattaaaaaatgtaaaatatcaagcttagggagtgattaaagccaatctaacaaatccatgttaattttaacagaatttttaatgaaatactttgggttttgaagttttattattattaatttaattatttattattaaa

SEQ ID NO: 83112 - DNA, 1239 bp, Heterodera glycines; identical to SEQ ID NO: 18494

SEQ ID NO: 83113 - DNA, 90 bp, Heterodera glycines
gactcaaatcatttattattgttaattgtttattgcattctctaaaccattgccttgttttgtatgtattcactttgacatgtttgtgat

SEQ ID NO: 83114 - DNA, 479 bp, Heterodera glycines
ggtgttgcaccattacatcacctgcgttctgtgctgcatcactttgacgtggagcggcggcgactgctacgagcacatgcgtccgacctttgttgtgctcgtgtgctatgtgagcagtgtgcagataatccagtgaataaattcattgcatagtacaaatttaaattcgactttattttttccttttcatgtacaaataccaaacgggctgtttgcgcagactccgtaaacatttcgcctccattttctgctgaattgctctattttccccgtttttagatgccttgggacagcgtcactcaatggacattaccgttgaaggtagagcccggaaatttcgtatttgcggaaaataaaatttacctccatgttttggggccaaattcggggttttgagtaccgaaaaattttggtcttaaatatcgctaatgtacattccctccttttcaggtttcagcagttggatgttcaaaggattg

SEQ ID NO: 83115 - DNA, 569 bp, Heterodera glycines
atgttttcttctttgtgcccttccgttgtccgtcacaaatgccttcgctgttctactcgcactttggcattttctggccataatttgtccgattatttgcccgctgctcagccgtcttctcgctctcaaaaagcacgcgaaattttgaaacgccatcagtacgcgttgaagcgaaggcccaaaaagtggaagggagcggagtttggcacatttgttgaacaaatggactcaatcgcagcaaaatgctatttggggtgagcacaatttgcattcgaggcaatcatcaagaattggtgtcccgacgaaaaaaatgttaaaattttggcaggtattttttctaggcttaaaaaatgcgacgatcacgaatctgagctcagattttgaaaatcattgatttttatctaagatttttcgtcaactacttgatttttttcgatttttaaagttattttttaaaaaaagtttagcaatgaatttgggttaaaaaaatattctgatcacgaatctgagctctgattatgcatgaaccttcattttgtctatgatttttcatcaagtgtcataaaaaa

SEQ ID NO: 83116 - DNA, 76 bp, Heterodera glycines
acgagatttggcacacacagatcacttttttccacatacatttctgattttttgtggcgtaagcaatttggaggac

SEQ ID NO: 83117 - DNA, 1445 bp, Heterodera glycines
atgctgaggtcggccttcagtaccaccaaacatccgaaatacgttgtgctccaagggatcatcggcagctcttttcgggttcgcctaacatcacttgcctacaattttgctttcattttccaaggaatgggaagagaataaacagcccgtgtccgtggacaaaaccatcaaatacttcgatgggcaattggaaaatgccgacgaaattgcccaaattgagggcaatggaccgaaaaagcggcccaacatgaacctcaacgacttcaccttcaaactgggcaattggtgcttcgacaccccgggcactgttaacagcgaacaggtcgacaaccataatttgttgtgagggcggtaattattgttgaggcatttttcaattccaatcgccgaaggcccattttacaatatttatgggatcaataaaccgattctcccccgcagttttcatttgttttaaacttctaggattttcaaaaaaaaaattaattagtttttattacgactatttccgcgcctttcatttgcccatctttcttttgcagttgttagatttgttcaccttagacgaactgatcaacgtcgtcccccgttccatcataacccctcgcattttttccctgaaaatgtgccattctttgctgatcggcggcttagtgcgaattgatctgctcgaaattgacacacaatcaattacacatcagccgacagtttttgtgagttcactcgcataatttaaccccctttttttgcaaaatatgtaattaatttattgaaattcacttttcagcttacagtgttcgccagtaaccgtctcagaattgagctgatggacacggcccgtgtggatggctttttgcgccgtttcaatggccatccttcgcttggcgcgcccattggtgggccgaaacgaatggacaaattcccaaaggtttttcccattcatttgtcttttacgatttgttgtatttgcctatttcagttggaaccttgcgactttgtcgtccaaaatgagggggcgttcaacgaagaagagtcgggttttgcggacgttgttttctcctcagtcggctgggcgttgctcacttcttcggcggattcggtgaaggtaagcggactgacaatgaggaaaggcatttgacacattgtaacagttaacgcaacgaagtatggcatggcatttccatggctcttttcagatccgtgcctggacacccgccggcaaaggtttgctgctccgacaaccgccgctgctgccctacgcggcgaagtatcgcggacagcgacagccaggcacggacatttaccggatgcgaccgttacagcactgcgagacgttcagcgacacgcaacggagcgagcgaccgaaacgaattgtcggagaaaattacaaagcaccgccaaccgctggccaaattatggaatatgtgaacttcgattttgattaa

SEQ ID NO: 83118 - DNA, 629 bp, Heterodera glycines
tagtcgtaataaaaactaattaattttttttttgaaaatcctagaagtttaaaacaaatgaaaactgcgggggagaatcggtttattgatcccataaatattgtaaaatgggccttcggcgattggaattgaaaaatgcctcaacaataattaccgccctcacaacaaattatggttgtcgacctgttcgctgttaacagtgcccggggtgtcgaagcaccaattgcccagtttgaaggtgaagtcgttgaggttcatgttgggccgctttttcggtccattgccctcaatttgggcaatttcgtcggcattttccaattgcccatcgaagtatttgatggttttgtccacggacacgggctgtttattctcttcccattccttggaaaatgaaagcaaaattgtaggcaagtgatgttaggcgaacccgaaaagagctgccgatgatcccttggagcacaacgtatttcggatgtttggtggtactgaaggccgacctcagcattagggactcctaaatacaaaaataagatgtagtaattgccctcttggtcggttgtaactgtcaggtccaaggcggacttttcctcttggcatttatcacggtctctaaatgtttgatggactgt

SEQ ID NO: 83119 - DNA, 1276 bp, Heterodera glycines
atgagcatcggaggggccctcttctgtttgttcgtcgctttatgggcggttggcattgagtgagtggggaaatttgaaattgaagcagggccatgacggaattgcaaatgattttggaattcaaatctttcccaattttctctgttgtctgaccaatgatcactctcgttgtctctttgtcgtgtcgttcgttgcccactctcccccttttagcgtcgtttttcccctttctctgcttctgtccgcttctctcggctttctgtccgcttcttcgctcgtccacaatgcccacctgtgcttcggtgctcaaattgtactcgcccaacttctcaatttgttgccctccgccgatgactccgtctcaaaagggcaaacggcggacgaacagcagaaaaatggtggagacgaagagaacaaagggcaacggcacttcgccactttcaaggggagtggccatgccaatagaaattacattgtaccaccgtgggaacgcgttgaactcgacgcacggctaaaccacgagttggaggagctgtttgagacacttttggagagctatgtgagcagttggtcagttcttttctgacaatttgaccaaatccgacccaaaaaacaaacgacaaaggtacaacgggctgatcagcacggacaccgcctttctgctggaagtgcgtcatctgatccgccattcctccgccaaactgatcaatcgtttaagcagtgtcgacctgcgctcgcttctcatcaacgaactgttcccactggtgttggctcatgttgaacgcatttgtcgtcttacaaatgcaatttttgggcatgaaaatcatcaagaaattgcacaattggtcatctcacatacgcaatgattcagcaatcacactttttgctttggttttagcccgtctctctcatcgaattcaaagtgttcgaccaatgggccgacgacgtgcactgggcgatgcggtcggaggccaaccgcgacgcgtacttgcgaatggtggccgatctgttgatccgacagtttgtggacgacattcgaatcggcggatgctttgtggacgaagagcacgcgaaaattgtcaaccgaaacggggagggcaccgacaattatgccggtgccggcggcggtgctgcagcaatgcccccggcgacgtcgaaagtgttttgccattatttgcgcattttgccactccctcccatgtcagtggtcctgccacagttcgcggcactttctgcgcgagttgctcttttcctctgcgcttctccccactcttga

SEQ ID NO: 83120 - DNA, 581 bp, Heterodera glycines
ttttggcgttccgttttgtccttttctccccaactctcccccccccctttttccccctcagaaatgtctgtgcgtttctttggatgagttcgtttgggacatcaaattccgtcttctgcgctcgttgccccaaaaattggacaaagagttcaattttggcctttttctgccgccctgcgacggaagggccggcaaatttctgctggaggaccggcaaattcgcgaatatccattccacgactgtgtgccttatgttgaactgaagtacaaaaagagggtgagcagaaacggggaaaatagggaaaattggagaaaaaagcatacggtacgaaacagcaatacggtaatggcattgagtaaatgagaatgaagtactgtaatgaattaaaggaaaacaattggtaaaatacaacagaatattgaccaaaggtgtacaaaatgttgcgattggatgagaaggcactgaatgtggtccattcgcgcaccaatctgagaaaagtggcggaggcggtgcagggacgaaacgccacaaaagtgagacaaattggaaagccaaaagaatggcaaattcaattcaaaaa

SEQ ID NO: 83121 - DNA, 213 bp, Heterodera glycines
atgatgagtaatagtgccgccgtcgccccttcctcggcggacggtctgctgcgcaagtcggccaccagtgcgtcggcactgtacagcagttctccacaacatggcacgacggccaaccatttcccgacaattcctgaggaccagggcctgaccatgtcggctggtcgtgacaaaatgccacagacagccgcctccgccagtccgccgaaatcg

SEQ ID NO: 83122 - DNA, 1267 bp, Heterodera glycines
atgactgatgttggcactttgaacagttttttttgttttgttgagggcggtcagctgggcaccggtgccagcggaagtgtgtgcaaatatcggttcagaagtcgacccattgcagtgaaggtgtgtgattgaaatttccaaaaaaaattttggtcattccaaaaaaaatgggcatttttggtgaaaaatggctaaaaaaggcactcaaaatggagtaaaagaatttttgacctgaagagcagaaaaaagcttcttcggattccgccttcccaaattattttcttgctacgggcttgtccatgagaacaaaacaaattttcagcaagtttttgcaccgttacccaacatttgcgccccggacatttgcgtctttgtccaaaatagggttcaaacttacattttttcaatcccggagggcttaaacagctttaaataagcgattgaaagtgattgtatgggatactttgatcctcagcaactttttgaaaaaacaattaatttttcaaacaacatttaattattgttcctaataaaccaaaaagaacaagttttcttaaatttaatgctgtttaagacctctaagattgaaaatgtatgtttgaacccaattttggacataggcgcaaatgtctggacacattttgcaaaatttggaacttttaaggatttgtggcaaatttgaaaaagaatcaatttcatgaataaacagttaattccctgctttgtttggctcgtttttgcgagaggagatttgtacaatttaccacaaaagtttttcacccttaatttctcaaatttttgggttacgcgttaaagaaaagcatttttacaattaacaaatttagggatcaatttttgagcaattaaaatgctttatcaattttattaaatattaaaaatcccgtaaaactaattttaaaaatcctagggttgtcctccatttacaatattttcttagcaaatgaagcgcactgacaatgtgacggagacaaagcggattttcatggatttggaggtgatttccaagtgcaaggattgcccatacattgtcacttactacgggtacatcatcacttttgtgagtgttttgtaatcatgccaaaattgccacgaatttattttttgccatttttcaggaatatttgtacatttgcatggtgagtttttgctgcatttttaatatttttttagttcattgtcattcattaaattaaataccttaatagataaataatttattttctttttttaatcgtcagaaaataaa

SEQ ID NO: 83123 - DNA, 883 bp, Heterodera glycines
atgaaccgacggtaaggcattttttaaaagtcaaacaaattagtcatttatttagctaaactgtttttccataatttcagttggatttgcaacgacgtttggatggacattttccccagttttgaccattctcaactcggcctcaaattggcacttctttcgccacgttttatactttcgaatgataccaaaaagatagggtttgttcgaacatgaacaaagttattgtataaaaacccgggattgtcaattgattggactcataaaagtcgattggactcataaactgcaatagagccaaaatccgttccctaatcatgacacataaacaaaaagatacaaaaacattcatcaatcccttttcatgtctataaaaatgtttgttttttcgctttgtctcgcatttgaaaaaaataaaaatttctaacgcaattaattattctgctctttgttgtgtgacatcattcggaactcggccaaaattgtgctaattgccacaaaaatgaaacgacggtaattaaattaaaagtcacaaattcgtcgtttatttaactaaactgttttcccatttcagttggatttgcaacgacgtttggatggacattttcccatcctttgaccatgctcaactcggcctcaaattggcacttctttcgccacgtttcaatgcgttggtggacaaacatttcgatggcaaaagcgaattgacaatttggagaacgatcgaaattcgcaaggacaaaggaccagaaccgaaactattctgtacgaatcgattacaaatttgtggaatttccattgcccgaccgtccgttgcccagcaaaatccgttttaagcgccttcagattgagtaattcggaatcagagatttatggcaataaa

SEQ ID NO: 83124 - DNA, 1043 bp, Heterodera glycines
atgccaattgaaccatttgaattggtgaacgaacggaccaatgagaagctgacactgacgaaggatgaaaatggcactggtgaattcaattggctgttggagagatgcccaattattggggagacggcggcggttcagaaacagcagcagaagagggacgaaaattcggatgccaatttgaacaaagtgttcttccgtctttacgatgacattgggtgagcagaaaggaggcctttttgtataaaacacggatagtggacggtagttggggtgccaatgccaatttgaaccatatccgatttgatctgtggagtttcagtcaatccattgggtgagcagcaaaaacagcaatttttgatttgtcgaaaaataaaaaaacttaattaattttaggccattgtcaccaccagcggaagaggaagaagaagcggatcaaagcaacggagattaattgcttttaagaaatgatgagaaacgacagatctcaatttgatgcttttattccctgtcacaaatgcttttgttgattctttcgttccaattatataaaacatacttttgcctcaaaatggcattgaagaccaattttgtttggatttttgctgaaaatttctgatgtaacgtcgcgcatgaagtttttcctgtcagttagtgttttgtcgtctaagttcatttgaaaaatgatttcatgcccagtaatacgaaaacgcgaatacattaaacaattttaaaattttcacattcgaaaaaaacttgttttgagtgacaaatgcgctcactcgaaaaaagtgccattgtaaaaaccaattgtttgtcttttgccatcgggtccactgcgtttcggcgctcccgtttcggcgccagcatgtttttggctataacttttttctttgtaaaccaaatccaacattgttggtgtcgttcgaaagctaatcaatttagaagctttttctaagctattgctttgcgattagacaattatcaaaaaagttatgcatgaaaattgcgaaaagtcaaaatttttgaagttttttcttaataaa

SEQ ID NO: 83125 - DNA, 1538 bp, Heterodera glycines
atattcggatttgctcgactcggtcaatgctcgccatcaacagttggaggacgcgctcattttgtcccaggaatgggctaaacagaagcgacaattggccaactttttggacgagtcggaacgccaactgcacgcatttgaacacattccaactgatgcgcaaaagatggaggagcaaacgcaattgttggaccaactgcagcaggccacggatcagcaacgggccgactttgatcggctggtcgaattgggcaccgaattggcccaaatggtcagcctggaggagggccaagagttggacgccgacatgcaccagctgatcacccgctacgacacgctgggcacacggcttggccaaatcggccaactgatggggtgggtttatgcagaaaactgtagagcattattttatttttaatcatgggattctgtctaaaatcaatcaagatgagataatctctaaattaatatgattgaatactgtaattaagaaagggaaactgtaaattaaccagattgggtactgtaaattacgaaaagaatatggtatcgtgcgtatctcagtattttccttgtgcatcgttttgtgtttgatcatgagatgagatgtcctaaaccaacatgatctgtaataataaaaggaatctgtaaattaatcactggaatactgtaaattacgaaaataatattttatattgagcttatctcagagttttccttgacgtatcattttttgggaaatttgtttgatcaatccattctgataatgatcatggattacccgaatttgtttccattttcgatcactgattaatctatacactttgctgatctttcagaacgttggcggaagacatttcccaatttttacaaagcacggaacagctgttgaattggctgaaggaggtggaagatgaaatgcacaaatttgacgacccgtcaacagagcccgaagaattgggcagacaaagtgacgaattggcggtaagggaaaagcggacaaaaaataaatatttatggactgactgatcagcagaaatgatttgtaaaaggcgtgatttattgatcactttaatatatgattcaatcgcttttgatcaacttagtgaactgtaggaatttagatctctgatcaaaaagaattaataaatcttataaaaagtttattagtcaccaaaaaatcaattttcaatcgatcaatcaataaatgcctttgattatttttggaccaccaatccagtcaatgccattgattgctttgatcgactatcaaccaatgccatgctttccccattttccagactctggttgcctccattgctgatcaaggccagctggtcactcaagtggtcgagatcagtcaagagttgtgtgcccacacgagcggtgccgaggcgctgtcgctacaattccggacggacaatttgcgccagcgctaccacccggctggcggacgaagctgcgagccgcatcaccgtgctggagaaggcgctgccgttggccgaggacctcaaggagggcatggccgaactcgttga

SEQ ID NO: 83126 - DNA, 273 bp, Heterodera glycines
gaaatttttgttcggctctgtgagtccggcaaatgttctcccaaacattacggtatctgctgaacgacacggaatgcaagtcagaaatgcgttgggtgaaaatttaattgtgccgcacaccgcgcaaatgtaccaacgccaattggcacaaagttggggccaaaggccaagcccagcggcaacagcatcagacaatggccaagtggacagaagcggagcaacaagccaactgcagaggatggcaagttttcatttctggtaaaagtcaaatta

SEQ ID NO: 83127 - DNA, 612 bp, Heterodera glycines
atgaccaaatttaagggttataaattatgccagaggcaatttttatgggtgtttttgtctaaatccagggtttctatctcaaaattttcaaaataaaaccaaaggccaaaaaataagattttagggtcaaaaataagaacattttgcaaaattgcttcaaatatttttacattttattcgatcaaaaatgtattctattattatatttttcataaatttcagtgcattcgggatcactaaatcagatttgggctaaatggataaaaatttgtcgcttgggtattcaattcccaattgagaaaggagattgttcatattctcgttaaattattttaattgaatttaattaataagaaactttgtctatctttaaaaattatttttctttaattttaaacatccataaacccacaattaaccaatgattggtcattttttggacaaaatttgttaacaaaattcactcaaaatttcaaattttttctcggctgagcctatcggcacccacggacaaaaaaaaattaaaagattttgtcaattagttgaaaacatagaaaattctttaatttttttggcactggatcttttggattttaaaaaataggtaataaa

SEQ ID NO: 83128 - DNA, 1489 bp, Heterodera glycines; identical to SEQ ID NO: 3082

SEQ ID NO: 83129 - DNA, 818 bp, Heterodera glycines
atgcaggaagacggagctgaagttttgcaccacgaggacacttcgacaacccacaaaaaccacgagacagcgacgggcggagagaagggcggaggtcaaggccaacaacacggggacggctcttttggggacataatggtctaccaggcgattcacaccattgaatttgcgctcggctgcatctcgcacacggcttcctatctccgtctttgggccctgtccttggcacatgcgcgtaaggaggccaattggatgggggaagaaagcgcattttgaatttgaacagtgtatttttgcgttttttagctgaatttctcatttatgtctattttctaaagcccggaacgaaccctggaacctttaggggtttccgatgacttatccgaaaaagtttttgaaaacataatccttgatatggatcgggaaattttaaacgggtttgtgttctttttccattattgcttcgtatggttgtactctgaccacctttaagaattgtccgacgtcctttggtcaatggtgctccgcaatggattcgtccaaagcggttacctcggcgccgtcatcacttatctgatcttcattgtgttcggcacactcactctgtccatcctcgtgcttatggaaggactgtccgcctttttgcacgcgcttcgtctccattggtcatttcttcattttagatgttttgtttactttttatgcatttgtttagggtcgagttccaaagcaaattctacggtggaatgggccaccctttcgtgccgttttcgttcgagaaaattcttgaggagtcccgtcaaagtgaagacagttga

SEQ ID NO: 83130 - DNA, 557 bp, Heterodera glycines
ccgaatgtcgtctccacattgccttaccctgtcaaattaaccgcacggcatccgatgagatatttccgagtgcgcgaagaatggcgtgtcactgacgtgttgatgaacccgatgatgctgatgatgggcgccgcatttatcctcgttgtgttgatggtcagatttaaatccaattaatcacaaaattgtttttttaacaattcagcccaaattagccgctcaagacccgaacgtgcaaaaggtcggttttactttcttccttgattccattttttgtcgaattttctttgggcttcctcttcaataaccttatgacttttccctttctttgtatttcaggaaatgcaaaatatgcagctgccaaaggttgacatgccaggtaaaacactcactggacgtaaaataaaaacgaatttccagcaaatgttaagctattttattgccaaatttcagacatggccgacatgctggctaacatttggtcatctggtagcaacaagaaaggcagccgtaaacagatttcgtcgggccagaacacgaaacgtgtcacacgatga

SEQ ID NO: 83131 - DNA, 129 bp, Heterodera glycines
ttctgtatcaaacgaatattacagatgattgaaaaagaatcattcatttctccacggattcattttttcagaattgtcttttaatttaaaaaataattaatttatcactaaatgaaggttgttttttaa

SEQ ID NO: 83132 - DNA, 1547 bp, Heterodera glycines
ttaatgccgaattgactgttattagtgcactttctggtgaatgccaaagtaatgactcgcaacaaaaagccaggagtaaaaagcgaaatttggaacagaaagcaaagatcgacgatgatgcgacaacacaacggttaaagttttacaggggagggaaggactcgtaaagacggaaatcttctaaattcaaacaccgccgcacccttagcgcattctgttgcgactttttccagtgactcatccacctgaaactcggtcattcaattggtttctcaaaatcagaacctttcatcaggctgctggccatggtaattgtgcccgagtttcagggctcagaatttgtcccattccgctgatgctaacggattgcgcaaccgttccagaatgcttccgggcgaacgaaatgatgtggaaggagcagaaattccattgcgggcgaacgaaaacgaaggaggacccagcggaacggaacagtcagcggaactcggctcgaatccctcagcgtcgcaattgctttcttggcggaggatcctcctgctgataatggcagtgacagtgcacaattttcccgaggtggtgtttttaaaacgcacgagtttccatcatagatggacaggggatgcgccagggtgaggcccatacgacggacgattggcgcagggggggggggtgtgccaggaccaaattttcgtatgaaggccccccaattttctccagcggcgaccttcttttttttgctattcaaagcacctttttttgcggctagcctttttcaaaaattatgtggaaccggtgcggggtcctgccgataggcgccgccgggaaaagttttagaattttctataaatttcgctaaggaaattgttcaaattttaagtttttcccccttcgttactacccccccccctcctttacagccgccctccttacgacgaacgagggggggggggggggtgccggcacaccctttgttcacctatggtttttccgtcatcctcattgactgttcaggattttggctttggggggaggaggttatggtggtgaaattaatttaacaatttcaagacgagctgcgcatttaaggtttacttttcagggattggccgttggtgttggttttggcggtgttgggaaaacgccttcggcaacatttgaaaaagcgttcaacttagcctttggcataggcctgcagaatttcccagagggtttggccgtttcgttgcctttggccgggttcggctactcaaaatggcgcgcctttctctacggccaaatgagcggaatggtcgaaccaatcgccgctttgctcggcgcttcgctcgttctgatgatggaatttgtgctcccttatgccctttccttcgctggtgtgccttagaattgccctttgctttaaatgtttactcactttagccggtgctatgatttatgttgtgttcgactccattatccccgaggcgtattcacacggcaatggcaaaatgtcctcgttatttgccattctcggcttcatggtgatgatgtccatggatgtcggcctctga

SEQ ID NO: 83133 - DNA, 357 bp, Heterodera glycines
atgccaattgaaccatttgaattggtgaatgaacggacgaatgaaaagctgacactgaaacagaagatcgacgaattcggcgtaaatgtgtataattggctgttgaaacggtgcccaattggggagacggcgacggcaattaaatgggaagacagcgtaaatccgagtgccaatttgaacaatgtcacttttgatctgtggagtttcgataaatccattgggtgagcagcagcaatagcatttgaattttatcgaaaaataaaatatttaattcattttaggccattgtcgccaccaacgaaagaagaaaaagaagaagaagataaagcggataaacgcaacggaaatgtcgtctga

SEQ ID NO: 83134 - DNA, 89 bp, Heterodera glycines
cacagtttttttttgccctttgtgacacacaaattaaattgaaaaaattggtgagacctgtgctcattgaaccacaaaatgaaccgacg

SEQ ID NO: 83135 - DNA, 1479 bp, Heterodera glycines
ccaatttaggccagtttggctgtgtccgatttgcttctcattttcgtcggcatctcctttgacttgttcagcctttggcgtcgtcatttgaatggatggaccgcatttagtggattttgcgaagccacgagtattattggcacagtcacaaagcgattcccaccttttgccccccccccctcaggcacttcgatcagttggttcactttctgctccattctcaccattgtcgggtacagttgctcatttgccccctgcggctgatcccccccccccaattagtctcaccggtgagcgtttagtggccatttgctacccattcagcctcaggccgtatttttaccaccgctccatggtaattggtgctgctgtccccgttcttccttctttttgcccacttttccttaagttgtggctcatcgctgtgctgtggctcatttccttcttcccttcgctttacattggccttcaagtgagtgatttcttctcagtttctatgctttctgagttaaagttcaaaacagttgtgagagatttttgtggtgagtttttggcttttacgatttatggcggcttttccgataaaggaaaaacgcattcgaacgtttttggcaattgtgactttgttggatgggacgaaaaacagcagaacggcgacgaccatttgacctttgaggtgttcagcccattctttggccatgactttcgtttcccctttatttaaggcacagcttctgctcactttcgttttccccgtggcattcggtgtgccattgttttatttcgtttttctgtcccttccccgccgacttttgtcccttttcagttatttactgttacatcaaaattctgcaaacacttaatgaggccacttccaactcgcatcagctgaccgcggcacagccaaagcgaagtgaaaaagcggcggaaggcaatggcaaaggcaaccgccgccagcagcagcgattgctggcggtgggtgcgcctggcggcgcccctcgcgagtctttgccgccttcgcccgatgaaaattgggccgaacggcgttttttcgtgtggtcgaaacatacggcgaattcgacgccacggcggaaattgacgcgaaattcgtccgggcgagggtcagtccgaagtcagcaggcgcacaaaaccgtgctcaaaatgttgggttcgtttgtctccccccgccggcgtttgtccgttccccccccccccctttagtgaccattaccattctcttcttcatctgttacttaccgtaccatttggaacgactcgtcgttaagtacgccaggggatactgtgcccgcgtctgcgccattctctacccaatcactggcctcctccaatacattagcgcaacacttaacccgattatttacaccgtaatgtcgcgcagatttcggcgcgaattcctgcgtatttttcaaaaaatgtgcggcagagaaatgacggcagaggaggacagaaacggggata

SEQ ID NO: 83136 - DNA, 484 bp, Heterodera glycines
atgccaggttatctgttctttcatcttcgttgccatattttgctattatttgcattaataaatgaattgttgttgaatttatgaccttggtccaaccatttcttatgtagcatgtctcttttccaattcactttgtttcttcccttttcctttctttctctttctcattgaccaactcttctccatcacttccctttttcctcctttctcttttcacccaaaagtccatcagtcgacgcggcgtatcaggtcgcaccatcgtcagtgtcgtcgtcactaaaacgacgtggaataaacacaaatgagtggtggatgaatgagtgggaggatggggaggatgtgaaggacgaagcgggggaaggcggcagagggggtaatttgggagtctgcgcttttctcaatttattggcgagcagaaaattcgctatcattgtttgtatgtacatttagtgaattgaataattgtaatattcctaagaaagaa

SEQ ID NO: 83137 - DNA, 199 bp, Heterodera glycines
atggttttgcttctgaattttgccttcatattctttgcatttttggtgagttctgtgtaatttatccatattttttgttttatttgtatttagtcttcaatttatgccgaggaagaagatcccaaagttacgcataaagcatttttcgacatttcgattggtggcgtcaaaaaaggaaggattgtgattggtctctttg

SEQ ID NO: 83138 - DNA, 509 bp, Heterodera glycines
atgcctctgtcggaggtgggtccgtcaaagcctccgatgggtgccggccaatttttgcgatatgtaaaccatatgagggacctcgaaaactccttgatcgcttcaatatctgcaaataacaaaaaaggaattaaaaaattttatgtcgccacttaaaccatcaaaatttcaaatccctcagcccatgaaaaatttcatcaaaatttccatgaaaacaaagaacatagacattgcaggccttaaaatttgttaaattttagacaaattttgtctcaaaaatcgtcgaatgtcgtggtggtgatgggatcccggtaatttgcatgccttttgacgaataagtggtgcccagcagatgcacagagccgccggccaagtcgagaaatgccaaatcttcaagagtggaaaagcctggttccagcgttagacaaacatcgaccatacttaagagttttatgttgatattgtgccgaagtttcagtttcagtcagaaaagggcaaaaaaaaataaa

SEQ ID NO: 83139 - DNA, 2116 bp, Heterodera glycines
aacataaaactcttaagtatggtcgatgtttgtctaacgctggaaccaggcttttccactcttgaagatttggcatttctcgacttggccggcggctctgtgcatctgctgggcaccacttattcgtcaaaaggcatgcaaattaccgggatcccatcaccaccacgacattcgacgatttttgagacaaaatttgtctaaaatttaacaaattttaaggcctgcaatgtctatgttctttgttttcatggaaattttgatgaaatttttcatgggctgagggatttgaaattttgatggtttaagtggcgacataaaattttttaattccttttttgttatttgcagatattgaagcgatcaaggagttttcgaggtccctcatatggtttacatatcgcaaaaattggccggcacccatcggaggctttgacggacccacctccgacagaggcatcgttttttgttgaaaaattggaatttttaccaaattttattataaaataacgaagccaaccaattttggtcccgaaaattctccaaaattcgaaaaaaaaaattattttaacaaagtcttagttgagatgaaaattttttgcgctaaaatgaattttcatttttaggctggggctgcatgatccgagttggtcaaatggtgttggcacaggtaattgaaaaaaatgttggctcaaaattccaatttacgcgtccaaagtgaccatcctcagtttattagggctatgactgtttgttttttgatcagggtcatcattattggtataaattcaaagcttaaagtctatagaattgctttttcaacatttcctatttaaggcactcatcaaattccatttgggctcgaattggcgatgggccaatgaattggtggaccaacgggcggacaatgaacaggttttgacatttgctaggaccacaaattggtaccacctgattctaacacggtttttggccttcatgatttaagaaaaatgaaaagttttttaggaaatttatgggtttcatactttttaatagaggggaaaatatccggaaatttacaaaaaaaaaaaaaaattttaagtttcaagcctatctccgcctgttgaggatgttccaggacaaacgaactgcacaattctccatccaccaaattggtaaaaaatggtacaattttttgaatctcatgaccaaaaaggggaacccattagaattttaacaaattaaagcaagaaaattttggggtttttttttcattttttcgtgcctgggaggtaaaaaaaccataattttcatgttttatgataatcaatttcagcacagtttggcgtttcggaaggcaaaccaattggcgaatggttgggcccaaattcaatggcacaagtgctgaaaaagtcagtaaattttagggggaggggggaggcgcgcaaaactccaataattttgctcaaattaaggattgtcgtctacgatgaatggttttcacgcataaaaataattttctgttgtattttttgcattttttccaggtccaatttggttgtacatgttgccatggacaatgtgtgaggcattttcaaaaattcaactgacacttaccaaaaaaaccgaaattaaaaaaaagattttctaacgcattttgcaaaaattactggtttccattgttttagcctaatttcggacgacgttcacacaatggtgtcattgccgctgaaaacggttatttattcatttttatttttttttaatttattttattccgtcattaggaaaatgggcaaaccgacgaatctgccgaacgtgaacagcaaacaaattctcccaccaccggtcaatggattcgtccgttgctgctcattgtaccacttcgacttggtttgatttaaaaaaaatttttttttttgaaaaatttcattggattttccacaaaatttaggcctaaccgcgatcaatccctgctatttcaatgcgattgcggtaagtggaagcgattttcggtttgtaacacatgtcttaatgaatgcacattttaggaatatttcaaattgccgcaatgcgttggcattttgggcgggcgtacgcggcacgccgtttatttctatggcactgcggggaaaaa

SEQ ID NO: 83140 - DNA, 344 bp, Heterodera glycines
atgtgttacaaaccgaaaatcgcttccacttaccgcaatcgcattgaaatagcagggattgatcgcggttaggcctaaattttgtggaaaatccaatgaaatttttcaaaaaaaaaaattttttttaaatcaaaccaagtcgaagtggtacaatgagcagcaacggacgaatccattgaccggtggtgggagaatttgtttgctgttcacgttcggcagattcgtcggtttgcccattttcctaatgacggaataaaataaattaaaaaaaaataaaaatgaataaataaccgttttcagcggcaatgacaccattgtgtgaacgtcgtccgaaattaggctaa

SEQ ID NO: 83141 - DNA, 354 bp, Heterodera glycines
atgatgagcatagaggtaagtgcagaaattcagtggcattttgggctcggaatttggatattaaaatgaacaatttttttggtttaaatataatttaatttacccacgaaaaaagaaccaaaaaatgtctgattcaaaaattcaaattttagaacttttaggccactttcttttatgttgagcttttgttcaaaattttttctaattttatagatatttttcaccgggattagttgggatcgtgatttcatcggggatccaacgacaattcgccaattccgagggtcccgcgggattggagtcattaaatttttcgaatattttcaaattacttataaagaccctaatagataa

SEQ ID NO: 83142 - DNA, 375 bp, Heterodera glycines
atgaaggagaatagaggcccgaatattaggggtgaaaaacaaatgaatatccgaaatgtatcaaaggtggcgaacttaaaaaaccaattaagggcggggggagtgttttcctaaccttaaaacattttaaattacaattttttagcaaatcattgcaagtaatatgaatgagaattttttcttttgcttttcttgtccctttctcacttccgcagcgctccaaatctcttccggtgacgtcagtgccgtaattggggtcaattggctatacggtactggaatggtactggcgctatggtacgttatggacacattaaaataatcgtccggcacattttccatcttttcgtaacaccagtagggagactgaataaa

SEQ ID NO: 83143 - DNA, 1102 bp, Heterodera glycines
atgtcgcgcaaaaaacgatttgccctccaaattgtgtcccattgcggggctccctccggcagagacgtgctgacaaagcaattgcaggagctcatcgagttggacatggtcggcgagtgcagcggaaaagattgtgatcaaaagtgttatgagcagcaaatgggtgagtgaatgacaaccgaccgtttgattgggcggcacagttaatttgtgaaaaagttttttggatgcgcatcgaggatttggagataaaacattgatgggactgaaggaatcggagtcctgttaaaataggattttatctcctgatcatattcggatccgcttggaatacgagctctggtccgggtttgcgcaattacaaaattccgggccctattattaggcagcgctccgatcgctaaaacacacaaaaaatctgatcctatttacatatatatgaaaaaataaaatccaattttgtatttttggtttttatgagccatgtttataaattagtcgctttttactttaattgaaatatagtttgggcacacattttccctctttgacacatttttaccagccgcttaggaaacttctaaaaatattttctcctacagagtcccactttttctatttggccttcgaaaatacggtgtgctccgaatatgtaacggagaaattttggaacgctttgcgcagtttgacagtgccggttgtgctgtgcagggaagtggtgcgcgagtcgggcattccggacgatttgtacatcgcagcggacgattttgacaatgccacggcattggccgaccatctgaaggcattgcaaaaggacaaggaccgatatttggggtcagtatttaatgagcaaaagggtcaatgacacgtgcaaaattaattttaaatccaatagtatgactaatttaaaaattaaatataattttgcacgttttgagttttgccatggcaccgccgaccaaaaagcgttggattaagttttttatttaaacatacctaatgccattaatttccaacaaatcttttgccaaattaccttttaatttttaaggagggttgtacggaaccgggaaatttaaatttaaattttgttttttattta

SEQ ID NO: 83144 - DNA, 679 bp, Heterodera glycines
atggcaccgccaccgaccgcggcactcggcttttccgccgttacatcatcgtccatcatcggcggcgtcagtaacgggcaccaagcgacggcggtggcacaaatgcttttctcgccgccgaacattgtgccaattgcggccgatcagcagcagctgttcatcgccggcaacaatagctttgttggccatggccaccacaatccgtcgctggcggcgatgccaacgcacggtgccggcggcagccttgacttgaacaactacaagtcagtggtgtaaatggggtgcctaatttggctgttatatggtatgcatccttggtcgggttcggcattttccgtgagacaatgacagtgacgaaaagcctgtccaaatttttttttaaatgtcgaattttggttaccaaattttcctaaatttcaatctctattaaacaaagaaaatccaaatgctagtttgtcacaatattgtacaacacaatttgtacacagggcttgcttgggattctaaccaagattttccaaaaaaaaaatctcaattttttagggttcctgtgaaagcggctggcgacgtgtcgctcaatggtcttcagcttgcggcttttctcaccaaggcgacgctgcttttacaaccggttgggctggcacatttgaggacaattaaaattttaacggaaatttaa

SEQ ID NO: 83145 - DNA, 99 bp, Heterodera glycines
atggcacctaatcaggccaatatctgggcaacaacgtcatccggggctgcttctcttccgtattcaaatatggcgatgcacccattgatcagctcgtcg

SEQ ID NO: 83146 - DNA, 1736 bp, Heterodera glycines
atgtcccaagtgggagccggagaaatggccgagtcgaacagttgccgcttcgggggcagccaatacagccgagtgactggcggtgcctttggcgttgaggaggacgaacttggcacggccaatgacaggcaattgggccgtcgtccatctcagagggaatgccgtccttcagcaattggcgctgcgttcccttcccaattcgccacgccctcgcccaaatggtcgacttttcgcttctgtttgagcctgtcatgtgcatcatttgcgtgtccaacattctcgcgatgctcggcttttacgtgccttttgttttcctcaccgatttggccacttccaaaggcatttccaacgccgaggcaactttccttttgccgttcatcggaattgccaacacttttggtactttgtgccaatgccgtgctattcgccgtcggttcgtccgtttctgattggtccctccctccccctttaggccgcgttttcttcggttggatggccgaccgtcgctgggtgagtgccctgtccatcaccaactgttctttggtgctgtgcggcttgctcaccgccctttgtcccctgctgccctcctttttgtccttgtctctctacgcttctctgttcggtttcatcgtcggtcgatgccattcttttttctattgtccaattgcctctcattttgccacttttagctgcttatgtttgccttacttccatcgttttggctgatcttttgggtgtcgaacgtcttacaaattcttttggcctcgtggtcgtttcgcgcggtttcgcctctttgctcggcactccgatcgccggcattgtctacgacttgagtgattcgtacggcgcttccttcatttacgcgggccttctcatttttctgtccggcttggtcagctgtataattcccatggtgcacagacaccaacgaagtcagctgaagaacgaaggttcgcaaattggggatcattttggtcgatttgtcagtcatttcgaaaagggaaaatcggcggattggcaattcaaatttcaccttatccgggataatccttattctgtcaggtgattatgaggacaaagtgaagaggcccaccacgactgtcgagcagcaacaggacgcacaaagtggcaaattatccgtcctaacggagcgcagcgaggaaaatctgacggaataccaacggacaatccaatcgatcaatcagcagcgtacgaatggactgggcaattaattagtcactaattaaccactttttggttttatttatttttcaggtgcactaatgtacgaattggacgagtacagaaagaggagtcagcgattggatgaaggatacgaagaggaaacggaggaacaacagacggagggcggaggagaggcacactgccgcggggcagagacggaaacgcacgcggcacaaacggaagcgaacaaagcggggcaagaggacgcggaggcggagaagaaaaacacggaagcggaaaacaaaaacacggaagcggaaaagaaaaacacggaagcggaaaataacgacgcggaagcgaagaaaaaggacgcggaggcggagaagaaagacgcggaagcggagaaaacaacagaagcgaggaatatgcaaatgagaaacgcggaggcgacagacaacgacccacagcgggagcagcagaagggcgaaatggccgaggctaacatttcgctggcgggcgccataaacggaggaaatgccatcccattgcaa

SEQ ID NO: 83147 - DNA, 871 bp, Heterodera glycines
atgccaacaccaaaaatgggtggccaaaccaaacaaaagaaggtgaggggatggaagtgaagccgttcagaaacagaaccgtactgaggagaaaagagcaaattcaaataggagaattaatataaaaggaaattgtgaaattaattagtcattgtcatttgttaattatgctttaattgccttttgctgactaatgaatcgatgcgattggactgactaatgacagacattcgaaaggcaaaaccgaacaaaaaagcagaataaatacaacagtgggcagaactgttggctcactcactattcattaacgttttatttgccaaatcgatcggtggctttggatttgcaaaacgcagacggagcaaatggggggggggggatgacagccgaacccgcgggggcagcagcttcgtcccacgtttattattagtaactgcgcttttcgcttctccgcgggattaaaccaattttgccttaagcaaaatttcattggcaattcgttggttttgtgcctttgcgaacgatgaaaaagccaattttaaattatgtgcagatgaatgatgatgattgacgtgaaaaagaaggctcatttatcagatcgttgagatggaaaaggcttttaataatgggaggaaatgaaaaaatgggaaaagtgggaaaattgcgaaaagcgaaacgcacgacaataaataaacaattaataattgcaggaatttcccatcctatccatcgaatttggaaatgctataaaagaaaagccaatgaaataaatggggaggcaatgaaaggaaaagaacactttgggaacgaacgaatggcctttgaactcggagttaaacggagcataaatttggaaacaaacatttcaaaa

SEQ ID NO: 83148 - DNA, 1033 bp, Heterodera glycines
cctccccctccccctccccccctctctctctctctccccctcttctttctcttcccctctctctccctcttttatcttcccatgtccattcattctttcgtttgccttacaggaattcgccaacaaaatgtacggtccgttcgcctttacaatgcccctcttcgtcgcgtgttccacgctcggctcagccaacggagtgtaaggctaacagaagcattcccctcccacatttttggcttttcttcccatttagcattttcacctcatccaggtcggttttgtctttctgactttggaatggccatgccattctcatcgttgtcgtcgtctccagacttttttacgttggcgcccgggaggagcaaatgcccgtccttctcacaatgatcaaccgacgaacgcgtacccccgtgcccgccgtcgtttttctggtgcttttcttcgttgccattcagctcccttccaccgttccccttgtgtttagggccttttgtcgttggtttatctcgcctttggtgacaatgcgctcactctgatcaattacattgcgattagttattggcttgccattggcttggccattgcctcgttgttttatttccgtatgaaaatgccaaacgcaccgaggccaatcaaagtgagttcaagtgattagaggctaattaatgctccaatgggattttcatttgattttctgtaaggtcaatttgattttccccgctatctttctgctcggctgtgtcgctttggtggttattccaatcgttggcaagccaaaagacacgggtcagtccctttttacacctaaagccagaaacaatgctaatttatgtaagcaattggaattgcgattatgctcacttcggtgcccgtttacctcgttttcatttgttggaaggaaaggccttcctttttcaacaaagcgtccggtcctttgtttgaacattttttgtttaataattctcaaatttcagcgtccattaccatcttttgccagaagcttttcttagtttcgaatgaagcagaaaaatag

SEQ ID NO: 83149 - DNA, 892 bp, Heterodera glycines
atgagggcaaaaattttagcaagtgtaaaagtgtcttggatgaaagtggccaatttgacggaaagacaattgagagcagtcagaaaaactaaacggaagcatttgcaaatgaaagcggcatttgaaagtgccaacttatcagggcagccgcaattatttgagcagaaccatcaggggttttgcaatttgagaagaacgggtgcaaaatgtatttggcaaaagttaaagcgacaattgtgcaagtgcacggtctaaagatgtcataaattcgcgtttaaattcaaatggacaaaattttagcagccgtccacctgacgacgaatgcttcgacccaaagtcgtacgaatgccaaaaaaggaccaaacgcctccattatgtaggcatagtcgccacccgactttttgatgagagtgccaagttcggcatagcaataggaaccgagcccaacgaagaggccgcaaaagagccaaatgagcagggaaaggccgatacttccagcatctaaagcgttgatttccaatcgcaagttaaacaacggaatgtgcacctttttggacacccgttggtgacaaaaagatgccggagccaataatacaccttaaatgacacatgttaattacatgtttaattattggacaaatgacttattcttcccgaattctcaaattcctcttcagttgatttggaaaattcttttttgagtttgtttgagtcagcttttcccccactgtatgcatggtgctagggcacttcgcgaatcggcaaataagagggattttcgaatttgacaaaataattaacaaaaagagaccggccctcatcagtacggtgtctctttgtgtacaaagagccactcgtaaaaaagcaaagaaaagcattttattatgccaaa

SEQ ID NO: 83150 - DNA, 417 bp, Heterodera glycines
atgatatgcgtccatatttgtgaatttatatgtgatttgaaggtaattaaaaatttgtcaaaaaattttcaatttaaagcaatttccgcgcttacttttctttgactcgtggccccgtacaattccaattgcataccatttgcccccactcttgcgcagcagtggtgaaccgctgtcgccctcaaacaaaaataaatttaattctacttttttggttataattaatattttgattttttttaatatgtattttagaatattttataaacacataaaaagcatacatgagacgtcttgtggatgccactcagctggcaaaaaaatccttgtggacacacagaagccaaatgcaccaaatcctgtcgtaacatcttcgggtcgatctgctccgcgtctgccgaaatattatctaagaaa

SEQ ID NO: 83151 - DNA, 1528 bp, Heterodera glycines
atggccctttatggcgtacgtgacgatcgcctgtaccatcaacggacacaaacggacgatacagtactcgtggaggaccggtcgtacaaaagagatgggtcgtcacagcagctcatcgtgccgacgtcaatgtcacattgtttgtcgagaacaaatgcgacgaaacgaaacaacttcttatggaccttcatttgcgttacaaaccggacgaaaggtatggcagtttcactaaaatttaaaacgaattaaattattctgataaagcgaaaaacacaccccctaaggatcgagtttttggaaattaattaaatacacccttaaaaatcgaaaatttgtgatttttgtaagaaatttgttgatataaaaaatgtaattttgtttagcataaaagtaaacttttttaaaaatcgaaatatacaaattttgaaattctctaaaaaaacttttttggcatttttaatggttaaagccttttttagcagttttaaggcatattttactgcgtaattgtgtatttttcgggtttttatggcattttgaggggttttattttatattttatgcgcatatttggcattttttagtgcatataacttataacccaattatcaccttttccttcattcagaaatgacgtcatgcagaattttgttttgccagccaaggcgtccgagatgcgcgtgaccgtggggaacaaagacagaacatttgggactgtgcacgaggtggcacgcatcaaacggcacgaacattacaggctgacgtcatcggcaaatgacatagcattattagaggtacagttttaaattttaaacattaatgaatttaaatgaattttatttgtttagctaaaaaatttgttggagtttggtccacagatcaacagaatttgtcttccaaagaaggaacaacggacagggacgacggcaacaataatcggctggggaaagaccaaattaagtaaatttggattatttttcaaaatttttgtttaaaaagaatgctttaaaaagtttttcctgtctaaaatttttattttcttagataatatttcggcagacgcggagcagatcgacccgaagatgttacgacaggatttggtgcatttggcttctgtgtgtccacaaggatttttttgccagctgagtggcatccacaagacgtctcatgtatgctttttatgtgtttataaaatattctaaaatacatattaaaaaaaatcaaaatattaattataaccaaaaaagtagaattaaatttatttttgtttgagggcgacagcggttcaccactgctgcgcaagagtgggggcaaatggtatgcaattggaattgtacggggccacgagtcaaagaaaagtaagcgcggaaattgctttaaattgaaaattttttgacaaatttttaattaccttcaaatcacatataaattcacaaatatggacgcatatcataactgaaatattttagatttgttcactaaaatcagcccatattgtgattggctgaaagaaaaaagccgtggagag

SEQ ID NO: 83152 - DNA, 1158 bp, Heterodera glycines
atgaaaagatggatcaaacgttcactcgccaggttcagtgtgctcagtgtggtggcattgtttggcacaaatttgggcgtcaatttggcagaacgtccggcaacggaacacccgggtaagagcaagggccataaattaattaaattttaattaagtaatgaccaaatgtgaggaatttgttaaaccattgtccaataattgctagggaccatttccaaggaaagataaactatagaaaaaatgtaaaatatggacataaatttttctaaattatgaaaatttccgaaaaacgaccaaaaatcgaaaattcattttttgtttatttttgacataatttatcattgaggaattttaaaattaaaacagattctcgagaaaaccctaaaatgttttttttaaattttcaatgtcaaaaaaccaacttagctgatgagagtgttcaaataatgtttttcgaaaaattaaatatgcaaaataaaaatacatcctaaaattattcaaaccatctaaaaataatatttcacgttaattatttaattaattgcctctttttaaaatagttttttgtgcgttaattaattatttaattaattgtctttttttaaaataatttttcgtgcgttaattaattaattgtctctttttctgatcctttccctcaatttgcacttttgtcagaatgcatttccttcggctgcctcacttccgatgcttctcgcctcatttacgccgtcaatcgttttgcggttgcgctgcccaactttttggccggcatttcctttttggctgcgcttttcgcatttcggcgccgattaaatggaattaatgggccaatcacaattgttcaaaacaccaacaacacgagaaacagcactcagcagaatggaacggtgacaaatttgaacacgaaaatggcaacggttaacaccgactcacgaaaaatggtaaacggaaggaaattttaattgaaaaaatattttttaattttctcatttttttttgaaaaaatcgcaatgttcagagtgaccgcctcattttctattgcgttctgtttgaattgctgcttgatttgttgccaaatttcatcaaccttattttgaccgctgtaaattattcatcaatttaataattggctaattaattaattaggcaattaaa

SEQ ID NO: 83153 - DNA, 2379 bp, Heterodera glycines
atgagtcatgcattccgtgtgccaccgccccatcgcccacagtgagaatttctccccattcattagggaatcattttgaagattttgtttatctttttcagagcaaagaggcatatcttctgtactacaaactgaccaacaactcacaggccaagtgatataatattatcattattatttatacctgtgtactgttaccaaacattttcaaataaatattttttattattttaaaattaaaaagataaaatatcggactaaattggaaatactgactgtaaaattgcagtaacaaaagcgagggcgaaagaaacgacgctgacgacgacgacgacgatcaaactgagatagaacagtttaacagagaactcaatgaaatttgtcaaatgttgcgtgaacattaccgtaatgaagttccgaaaattggccgactttgcgcccaaatgagcgaaggaactcgccaagcgttggccatccaacaacaaatcccaaatcccgacgaagtgcaacaacaacacggggagaacaatgccagggacaacagaagcaatcgttcttccgacgaaaccatttcttcgaacaacagcagcaactgtgacaatgccaatgtcaagtgtgaatcggtgagcaacaccaaagcattgtgatcactaatttttcttagctcggattatcaatgccataagttaaaaagctcaaaacaaaatactgggcatgaaaaattaaaaattggagaattgccccattttttagggtttgcatcagaacgcgtggtggcaacaacaatttcatgaaattgagcaagcacttgataatgatgctgatgatgaaggcatttcgtctgtcgagtgcagcgaaaacggaaccaatgaaaatgataacaaaagtgacgacgatatcgaaagtgatgccgaaagtgacgacaaaccctatgaatgtgattgcgaaagtgctgaccacccaatggagtgtccgttgctggccgctcgtcgtgcgcttcgtcgtctcaaattgccgaccattcttgacatttgtgccgcaaccgaagcagaagtgcgacaatacggcacaaaattaagtgacaccattaaacaaatcgccaaattacgcgttcaaaacggcggagcactgacaagcgaatgggaactgcggagcagacagaaacaagcacaaaatctgctgcaacaaattggtaatttaatgccacaattggtcgttgaagagatcgaagtggcgaaaattctcaaattcgtcgaacaaagcgccgatcgcttttccattggatttcgggacagaaagcagcaaaagcaattcaaaaaagcaattcgacagccaaaaaaggtgtgcagcaatttgaaattagcgagaagtttcttccttttatctctagtcgaatatttttggtattttgttatttaaaaagttacaaaaaaaaaattgctgagaaatttccaatgagtgaatggttggtttgcttaagctgcaaatttatatcccttcgttcaaacaaataattattcggctaccaccaccaacaggctttcgaggttctgttaaagcacaatttggacagtttggtggagccattttatgaggagtgttacgaaaaactgtttcgtattagcgatgaaacacgggaacaatcagaattgttcgtgaagcttttggccaaaattgcttttgtgcacgtcgtgggattaaggatacaactggaaatggtcagtagagaaggcatggtttaacaaaataataataataatgcattttggcagtgattttcggatattttttatgggatgttagactagatcagttgacagaaattatacattacatcatagaaactaaaaatatttgaaaactcattaaacaactttcttattacttataatttgtgcacttttcaattatttataaaatttaaagatatatttaatgaatttaagtcataaaaatttgacaaaacatgctttcgtaggttttctggtccctttttcaacttgggtccgttaattattcttttatgccaaaatccaacagataattaattcctcctgtattgttcaggtggaaactgaatggacgcatattgtgcacgcgatgttgcagatgcgtaaattaataaatgcagctcagtatttggtgaaagaggcacaaccgaaacccttggcgtgcgaccgaaaattttcggatgtaataaaaagattgcaatatttataaatattattatttatttatttttacttcaatttattcaaaatttagcaaaagcaaccgagcttgtgttcattggacagattgtatgcgaaactctatggaaaaccgtctcaaataaaacgtgtaagagattttagggatttggtcatttcgctttaatta

SEQ ID NO: 83154 - DNA, 1438 bp, Heterodera glycines
atgaccatacggttgagcgatttacacagtttgacggaagaggcgaagagagaaacgccgagggaaatggaaaatgagggacgaatcgcaacggcgacaatgcgacggcgcgaactcagcggacaatccgcggcacttaaaggtaaagtgcaaataagaatattaagaaagtttcaaggatttaatgcataattgcatcatttgttcctttagccgcttttctcgaaaaacggcctgaaagcagatggaggacaagagcatcgcccgggaatgaagaggacatccgagaaatgttattgacaaagcgaaggcattcgactgaaaatcggaccgatcatcaccagcaaaagggtgccgcgacatcgacggcatcattccttttggaagaaatgaacaacaacgaagaaggaacggaggacagaaataggaggggacaaagaaaggagcaaatggacagaaatgggaagggaacggagggattaacaggcggagacagcgcaaaacaattgtttgaagaagcagaaaatggggaggaagaagaagaggaggaggaaggcaccgacggattgatgagtggggagagggaactgtacgagaatgtcatctcggagtttgacggacttcggcagactgtcaacaattacattacggtttggtggaggtcaaatgaagttattttttgttatttcagaagatgaagcagttcgcctccgagttggagcagcagtcggccccgtcgtcttcttcgtcttccgctgtccctttgctccctcactcgagccaacaacagtccccgccggtggtggcacccgaaagcaccaaagaaaagaggcgcaatttcttttacggcaaacaaaagcaaattgcgcaacgtcccgccacaacgactggcgctttctccgcctcacatttcagctattccacttcagtcactgctgcttcttctgccaactcgaaaactccaacaaattgttcaactatttctgacccgaagactcaaagaccacaaagttcgcctgccggcacaatggccgaggggtggcagaacaggctggagaaccttgaggttccgtcaaaaaaaaccgaaataaaaaacagtcatgttaagtttatcgatgacgacattatttccggcgaggagtgtccattgattaggccgaattcgtctgggaaagtgccgacggcaaatgttccgtccaattttttgtcgaacacgacaatgcctcacaaactgcagacaacttcaaccagaaaagactcaaattgttccgtcacttctctgcttcccaatgctgaaaaagaattcgacaaatctttcgctggcgttgctttgtcgtgcggtggtggcaaaaaagcacaccaattgaatgacattaaggcagttgtggaaaaggcaagtgccatgccattgttgccttcattagttgtaatgctttag

SEQ ID NO: 83155 - DNA, 390 bp, Heterodera glycines
atgatctttggtcttcgaaaaatgtctgccaaaattcgttgcgacattcaaatgaatggaccatctcgtattgacctgatcaagcagatcaatgtgcttgtggcctcatccatcagcattttgttgtacggacatgcgctggaagatgtggtttttagaacttgttgctccaagactattaattaattgattaatcaattaatattaattaattttttaggaggaaatggacggatttttggatatcaaagaaaaaatgcgatttctctttgcgatgttcccatggcatgatagaagatagtttttggtgaaaaaatttcgtttttttttctaggaaaacaacccaaattgttgcttcatcacctctttggtaagcgataaaaaaataaa

SEQ ID NO: 83156 - DNA, 91 bp, Heterodera glycines; identical to SEQ ID NO: 53030

SEQ ID NO: 83157 - DNA, 683 bp, Heterodera glycines
atgttcattggcttacttctgctcaatgtgttcgccattctgttctggaattttgtgtggaaacgccgaaaattgccgcccgggccaagcccactcccattaatgggcaacttacaccaattagccaatttcccggaccatggcggtgccggtgcgtacacccattttgccaaggagtatggcccagtatacacgttgtggatgggcgaagtaaccatcttaaatccttaattagggtgtcttttcttaaattattctctaattaacccctttaatctataatttccaatttaaatctttcgataaagtaattaaaagggttattagagtaattgattagttaatctcaaattaaccctttaaataattgtaaactaatttttgttaggatccttatgtgatcgtgaccgactatgagctgattcgttcaacatttctactcaattacaatgaacaaacgtcgggccgacacttttttggcatctccgaaattgtttcgggtttatgccgataattaattaattaatgaatttaattgtttttttaggaactcatggacttcatggtgtttcgagaactcatggtgagggttggctgtttttgagaaggtttacgctcgaaacattgcgagacctgggcatgggcagaagccgaatgagccaagaagtaaaaatttaaataaa

SEQ ID NO: 83158 - DNA, 297 bp, Heterodera glycines
atgatcagcgaacagcgaagaatgaagcgaaacattccgttgagtcaaagagaacagcaacaaaatgaaagtgagggagaagaggaggaggaagaagaggaggaaagaggaggaggaagaggaggaaggggagggcaaaagcggaagataaagcaccgggaagaggaggaagaggagacggaggaggacgaggaggagcacaacttcggcacgggcaggggacgccgaatgggcgcgaaacgacagcgaatggcacgacagaacaggcaaagggaagaaagggagggggagggatga

SEQ ID NO: 83159 - DNA, 1112 bp, Heterodera glycines
atgcgagctcatgccaaaagtcaggtgggtcaaaaagacacttttccattggatttttcggaatttgtccttccctccctttgaaggtgttcaaatatgccgactccaaccagctgttcttcacctgtcagatcagaatgtgccaaagacagatggacatgtgccgcggagtgacggtgaatttgcgggcggacgaaccaatcgaaattcattttccgcaaacattcagccgccaaaatgcgaaggaggggaaaagcgaaagggcgccaatgagaagaaaatggcacacagtgaggacgaaaagcgggcgcaagagatcacgggggaggagagagtggcggcgaatggcacaaaagcgacgagggaaacggcggcggtaaaagtgggggaggaggggagagaatctcgggatttgagggcgagttaattggccgaacttcgagaatcatttgcacaatttattaaatcggatgaccaacatttttcattttaaagtccaatggaacgacgacggcactttcaaccgaagcacagcgtaagaaaaagcagcagagaccggccgaagtggcggaggaggaggacggagaagaggagggacaatgggtgctgaagagaatgccgttggcggaggggcgacacggaaggaaaagccgcgcattggtggagggtgattagtcactgattgaccatcactaattactgcaaatgccaatttagccgaaatgccattggagagaggggacaagcgaccgttggaagtggacgtggcatccccgcagatgttggtgctggaccaggaggaccgtgcccggatgactaccgcgcggtggcattcctcgtcgacaacagccgcgccttcgccgccacattctgagggacaaaatgccggaggggttatttccgcattggatgcctttcggggagtgccatcgcttcatccgccgctttgtctctcccgcgacattttcgtctttttcgtccccttcgccgttgcactgctcgtcggcctcggctctgtgctgactttatgcattttgcacgctttttcacgagttgcgcggccaaaagtgccaatgcgttggacaccgatgcttttttaagcattttggaaa

SEQ ID NO: 83160 - DNA, 1122 bp, Heterodera glycines
atgtcatctcgacgtggcggtggtaataatgttgagggaaaggtttacgttggcggtctgccagaggacgcaacttccgaagaggtttcaaataattttttagttaaattagaatttacacagttcatatgtcacaatttcagctcgacgacgtcttccacaagttcggcagaattcgtaaaatttgggtcgctcgtcgtcctccaggttttgcctttgtcgaatttgaggacacgcgcgacgcggaagacgcagtgcgatcattggacggaacgtaaaatagttgtttttttctgggaatattcaaatggtttaagacgaatttgcggtgttaaagctcgcgttgagttatcaacgggccgttctcgccgcgatcgcgatgaccggggcggtggtggtggcggataccgaagcggcggcggtggtggcggcggcggttaccgtggcggtggagggaaccgcgactattcaaggtttttgttcgaaaagtggccgaatttggaggatcataagaacgcgaaattgcagagtagcaaagtcattcgcctttttcagcaaatcctccactcaatcgtttcttcaaagcgtcctccaccctttttcctccactgttcctcctcttcctcctctcgtctttttcttcccatccttctgaccaatgtgttactataatgtgttgctttgtccaaaatggcaaggcattagaagtgaatgattggacctacgcgttttgcccctaagttcggcttaatacgattgtttcttcgatacaaaacgccaatttgggcccattgttcgccttctcaatataacttcactccgttacttccctccctccaaactcttcactctctccgcttcactcctccataatcgttccactctccaatcagatctcgttcgcgttctcgttcgccgtaccagcgtcgcggaggaggaggaggccgttctcgctcgcgttcccgttgaaagatgggaggtgaaacttaccgaatttaccaaaaaagtgcgaacccaattttagggatctacaatttccgaagaagttgtgacgaactgatgcgatttcaaccattggcgattttaaatttgtttcacgtttttggtataattttgggttaa

SEQ ID NO: 83161 - DNA, 200 bp, Heterodera glycines
atggtgccatttgaattggtgaacgaatggacaaaggaaaagctgacattggccaaagcaaatgaattggacaaccgatggataatgaaacgatgcaaaattattggggagaccgcggcggtttattgggaagacggaaattgggacaacaattgtaacaatgtgttcatttggcttgttgctggcactaattgcattgg

SEQ ID NO: 83162 - DNA, 941 bp, Heterodera glycines
atgccaacgttttggtcaaagacagggaatgagaagggaattaattgcacaatatgtatgtatgtgagtttggaaatgtcagtattttacccaatcgatcggttgatcgatcaatggcaaacgccagttgatcaatcaataatttcgctacagcttctggaaaatttcctttattttttaaatcgactcaaaaaccgtgaatattctaagaagtataaaaatttacaaaatatattgctcaaaaagttaattatatttatttatcgaaaagggttggttggtctctagaaactagagaccggcgcgggattttgcgggatcccagtccgcaatcccgcattttttgaaaaatttccgatttcttgcatcgcaaaaaagtggttttgaaaagaaaaaaaagtcaaatttatgaaccgttaataatttgatttccgatcaactttttaccgtcggatccaatcgaaaaatcttagtcgacccatcagccccttttaatgcatcccgccagcccctaaaaatttattttcagcattttttgatttttggaaattttttgaatttaattgaaattttttcgattttccaaaatcccgcacgggatcccgcaaattttaaatgcgggatttccgggattaatcccgcgggattccgtccctcaaaaaattttgagttccaatcacgcagcgggatccgcaaatttgaaatttccggtctctactagaaactgcgtcaattgataaaatttgatatttaaccgaaattatgtgatgaaaaaaattttggaattaaaaaaaaattttgaaaaaacttcggcttcgaaaacttcgggttttgtgggcttcgagcttcggacttcggcttcgagtgctaagccgagcttcgcccagcataatataaaattacattaaattattttgaaaagcattaaaaaaaattttcaa

SEQ ID NO: 83163 - DNA, 1922 bp, Heterodera glycines
  unsure (1)..(1922): unsure at all n locations
atgcaacttctgctggccaagcgttgtccaaatgggtgcacacgccgacacccaaatggccaccgaaagcgattgttttgcgaaaatagcataagaacaaacttccnaatggatcaccagtttcaaagaggtgttgttgttgttgttgtgctcagattctcatcatatttgggtgtctcgggaccgatttttcatacaaaggtttttctccggcggcaactaactttttttgcggcgctttttccaacaaaaaaaacggtacttgtaggttttgtcacccccttgaaatttttctaggctgaattaatgtgctgatcacgaaaatggttttcgggttctgctcaataatatgccaagaaattattttaaaaaaaacaaattttgatcaaaaaaggcagatttttggcattttgaacccattgacgaccaccatttttacgttttcacatcccttttttgtggcacgcttttttctaaaaaaaaatttaaaaaaaatcggtatactaatgggaccggcggtgccgttaggcgccgtcgggaaattttttaaaaatagtttttaatgcgatttgtcaaccgatttcgtctaaaaatggctaaatttccgattttgagctatttttaaagggagtagatcgttcccccccccccccccccgaaaaattttgacgtgggggggaggggaaatgaagtgcacccattttaaaataaatacctacatatttagtttgcttttcaattttttttattttcatttgtttagaaatttatttgtgcccgcacttcttctgtcagttacaaaattcgttttggagttttctcgcctccatcatcaattgaggagccatttgaattggtgaacgaatggaccaaagaaaagttgacactaataaaggagaacgcttattattggctgttgaaacggtgcccaattagtgaaaaggcggcgattaaatggggaaacgacggaaattcggacaacaacaacaccaaatggaactttatccattttaatttagtttgctgcaaaaatagcattgggtgagcaaatccgtcctaaattgtgtataaaatttaaaaactgcgcatttaaaattattaccaaataggattttagttttcatttttactaaacatacgattttgtttttcgtacttctcttttttttcaccccccccccccctccccctgaaattctttttaaaataatttttagaattttttatgcgcggaacacgaatctaatcattttttgatgtttcaaaaaattgtgactaatttttgtttttagtcaattttagggcaatagtgaaaattttaaaaatttgaattttcaactttttattctaattcgggttctgaattaatataaatggatgtcagattcgtggtcagcgacctcgaaaaacccccaaggaaggcttttttcgggatcagcgcataaaatttccatagaaaaattattttttttaaaatttcaggggggtgacaaaaggataagtacctattttccaattccataaaatttttttacgaagagggacttgttcgtacttggatatgttttcgcgaaaataattcaattgttttgaattttttaggcctttgtctccaccataatcaccaacaaaaacgggtcaaagcagtgaaaagggcgtctgattatgtgggaatgactttttggaacttgacaaatggtcgatcatttcgaattattgcatgaaaattgttgctttgatatatatattttttgtctttggatgttcatttttaatgagataaaagtttatttccgagtttgggttagggattggtcaaaatttgtcagattcgtaatcaatcactaatcagagcgactcgaaatctctatgaactttttaccgttttgtaaataggtacctaaaatggataacaaaaaata

SEQ ID NO: 83164 - DNA, 556 bp, Heterodera glycines
cccccattttccattttcttcctattgagtggtgggaacacccaaacacacattcctcaccttttcttcatcatttgctcgtcgtttttgcattcacttttcacaaaaccttattcgcccaattcattatatgaatgtacgttgccttgatttttgcaattttttgctcaaaaatctgttacaattacaacaaaatcagcgcaaaaagcattccagcgttatttttcaaccaaatttttctaaaatttctgcataaactcagaaaggacatacctattagctattagccaatgataagcctagggctaaattaaatccgaaaaattcgcattttttaacaaaaatcttaaaaattcaattataaccttgacagattggaaaatgacaatttctgtcgagatttttgacgccaagtcgccctcacgaccgggtttcaccatcgctgaggtgctttttggctattaaaatttcctatttttttttgtaaaaaattttaaaggttgagcctgattataagaagtgcgtcaattaaaacgcaaaattcgcaaaaaagttg

SEQ ID NO: 83165 - DNA, 987 bp, Heterodera glycines
atgatcgttatcaacgtactttatgcatttgttcttgtatcatttattagtgaccaacacagaattgcagtgactggcgattcaaaccatggtaaaaatttggctttttaaaatttagatcaccaaatataattataaattatttatttccattgaaactttattatttaccaacacaataattaattaaaataattttttttttcaaatttaacaagttttaccttaccatttttacttttatgaattaacaaaatttaattaattaatgatcatttattattcctttgtcagtgccttctccgcctcgcaatgtgaatgttgtgcaaattaacagttcgtccataaaagtcacttgggaaccgccggcggacggcgacgcgcaacttttgtacggatacaatgtgtacaaattccaaattgtcaacaatcagtttgtgaacaatttgcacagatcggtggccatcgtggacaaaaatgtgagtttttttcattttcattttttaaatttaattaaaaattattttgaatctttagaaattatacgcctatctgaacgatctcgagccgaacacagaatatgccattcgaattgcggcttttaatatgaagggggacggggaactgtccgcgttgacaaaacaaagccgaattttgacgggaggcaaacgtcggatttttaaaatcatttttaaatccaagattttcaattttagccccctctcccccgaggccccaatcgatttcgctgatcaacgaatttagacctgtcagagcaaaagtcgaatggcttccaccgaggttaaatgataagcttcattaaaaatctaataatcttattttattttcaaatttccaggcactcgtacaatttgccgttgaaaaagtacgttttgtggtggaggccaactgcgctggacaattaccaaagggccgaagtcggcccgatggagcaaagctttgtgttggacaatctctgtaattaaa

SEQ ID NO: 83166 - DNA, 460 bp, Heterodera glycines
atgggctcgtccacggtgcgctctattatgttcaactcgcgcatcgtcgactccgccatccccggcctccacttgcattggctgcacgccaacgcagcgctgttgctcggcaagtacagcttgctgggccatctcccgtccgcgctgctcttcagcctcgtcattgtcagtgtgttgttctggtggcatgccgccaagttggccgtgtacttggccatgctttacggggatttggccggctgggccctccttctcattgcggctgcccttttcattggctttggtattttcttaatttgatcatcttctgattttcggaagtagcggcagtagaaaaccttttaaagcagcctcagttttataatgatcgatcattaattattttatattttaatttctaaattaggtaaactcttcaaacatttgcatttattttgtatagggatgttgtgaaagaaaa

SEQ ID NO: 83167 - DNA, 907 bp, Heterodera glycines
atggtattgattgacctaagcttacttctaattctaagccaagtttttgcagcaattgctgctgaatatgaggttaaagatatttaaaaatattatttttaccactgatttccttattttttaaattttaagcaaatcacaaaactgcgtgcatttctatgcaaagatttggcaaaagcatccacttatcgtaacagagaagcatggcgaaaacttggcacttttacggaaaaagtgccaaagaatttattggactccttagcggaatggcaatttcaatacttgtctattgaacggcttttcattttttgtatcgcattagagaatggaaagcatagaaatatcggtagggattttctgaaaaaaagacggtgacttaataattaattttttatcgatgttttttaaatttatttttagatgagcgtttgttggggaaaatttcgctcaaaccaaaatttatcgatgaaaaaagtggtaaagagttaacaattgaggaagcgatgcgacaaattgtgacggcacataaaataatttttggtggcaaatccaaaaagattattcaaaaatgcatcgaatattgtaaaatcaaaaagcaattgccacaaatgcgctttgagaacaaagtgaattgttttgaggttggtaacgactatttatttgcaaaaaataagtaaaattactgtaaaaaccaatcgaaattgtttaggtgatcggttgggcatttgttctcgagaccactaatgagtgtcaaatgaaagaaagtgcattaatcgaattggaatcggttaagcaatatttgttgttactatccgatggcaaatatccacagttacaaatcacaaagccaccaaaaaagccaatgcgaaaaggaaatggtaaaagaagagctagtcacagatactaa

SEQ ID NO: 83168 - DNA, 1220 bp, Heterodera glycines
  unsure (1)..(1220): unsure at all n locations
atgccgtggcttgaggaagagcacaaaaagcgaattattatgcacaatgaacagcaaattagtggtggtgacgattttgatgatgatgagagagtcgaagccattcacaaaagtttggaaagtgcggaagagccggacgaagaacggtgccaaaaattggtgcatttgctcggcacggcgaacattaaccaagtcaattagcaaaacaaaatatttaattaaaaaaaatatgaaatttatatagcgacagaatttgaaacaaaaatatgcggcgaaatttgggggactgaatttgaaggatgagttgatgaagcgattgcctgcgagtgaactgatcaccaaagaattgttgcaagtcaattctataaaattattaatttttgaatgaattaataattttttttagaatttcatagcattaaaaattaatttttgggaaaaagaattattcagactttaacggacacaccagcggaacacgacgccaagtacttgcagaaagccatgcaggcaaattagttgctaaaaagcattttttaattctattttatatgctttctagggacttggcactaatgaggacatgctaattgaagtaatacataattaatttaaatgtttaagaattaaaaatatatcgatttttgaagattcttgtgacccgaagcaacaaacaattattggccattaaaagtgcttataaagcaatgtttaatcgtgaattggaaaaggaagtcagagcagagacaagcggcactttcaaagcacttttgctcgatttgcttgaggcaaaccgtgacgaaagtcatacggcggacgaaggaaaagccaaaaaagtagccaaaaaaataaataaataacgaaaataatttttaatttcaaaaattcattacgaataaaactattaactttctaaaaattatttatttttcatgacgcggaggctttgtacaaagcgggagaagctcgtttgggaacggatgagaaagtgttcatcaaaatgttggccaaccaaaaccttcgccaattgcgtcttgtctttgatgaggcaatgcaattaaaattaaataattaaaaataattgattaattaacaatttgcagtatgaaattgtcgccaaacatccgattgagaaaggcatccaagcggaattcagcggcgattcattgcgcgcatttttggcactcgtcgaatttgtacgcaatggccccgntgtacag

SEQ ID NO: 83169 - DNA, 63 bp, Heterodera glycines
atggcgggggttgagcattgcatgtcgagtttgacggagaatgaattggagggcagcaaaaag

SEQ ID NO: 83170 - DNA, 517 bp, Heterodera glycines
gtaaacaagcagttctttttaatctcatcgacctttcatctgactgttgcagctcacgtcgctctggcattttgatgggcgatgacgacgacgttttggtgttgaacgacggcggagcgggcggcgatgtcgaagttgtcggcgaacgacggcgacgcttagctcggccaagtgtacatgaaaggggagaacgcgttgaacacgggcatggacgggaacagcacaatacacaggacagacattcgaggttttatgttgacccgaccctgcaaatatccgctatatcctgttggctgtttgttataatgtgcaccgataaattacgggattggttttgggaggtgcgaattaccccccccccccttctcagagactaaactacccaattttttagctattttattttatgcgtgttttagcatgttacaacgtctctacacttatttctacacgcccatctttcctgtgtcgcgggatgagcagcaaaggaatcagttggacttgccttcttgggtaa

SEQ ID NO: 83171 - DNA, 143 bp, Heterodera glycines
accggtgatgtgccatctcggtgacccagcccatcagcccgaaactgcttattacactgacatcaatgccttaatttcatattgtgccgaatttgtgtgctatgcgctgatttggctgatcatttggagaagaacagcacaaa

SEQ ID NO: 83172 - DNA, 46 bp, Heterodera glycines
ggagtacgaggaaggggttgcccaactcgagcaggaacatgtcaag

SEQ ID NO: 83173 - DNA, 455 bp, Heterodera glycines
atggaactgacagatgcagcaggcacagcgaagaggcgttctcagacgaagaaaagcggctcccctttcggattccttggcttcggcagaaccgaaggcgctgtcggtggttttgctggtgccatcggtggagggccgaccatcggaggaacgtccacttcttcgctgatgctcccttatcttttgtcggaatcggccatttcggaggacgtccattcgttgggcagcgactcggccaaccattgccatttggcggaacgttcgtcagcaggatgcggcggactgagtcaagacggagcgattggggatggagtggcactgtcgggcattgcatgccattccaccgcaggcgaaatggccgaggaagaggggggcgagaaagcagcgggcgccagcggaagacaccaccggcgagtgcttttggagcagaacaaactcattttggatgggaaaac

SEQ ID NO: 83174 - DNA, 266 bp, Heterodera glycines
cgatgggcagtaaacgccgtttcttacttcattttagtcaggctcaccagacttttagacgtgcggagttcgatgccatttgtcagattaagggaatttctgtggtgcccaactctccttcggatggggttttatttatttcttttttgggtcaatatgttcgttctgtccgcagatacacattcaatcgtttgagtttcaaaacgacgaatttgacgtctttcggctgttggaaagggctgtgttagtgaaagcggcgtacgaac

SEQ ID NO: 83175 - DNA, 1075 bp, Heterodera glycines
atgccttccccgtcctggctgggactgacccggttaggtggtcgattggcacatgagttacagcaaagacaaatcgatatttcgggttttcgtaaacgttccgctttgattttctaaaaaaatgagtgtagtgaagtaagactattctaaattacccatccccgatgcatatgtaagaggggaggagggaataccgtagtaaaatgcggtcgggtcacttcggcgtggactgctcagcgtcgccaagtttgaaatgcctaactttttcgttgttcgttaagttattaaatcttgcaaatttgaagctctttttgtgtccacaacaccgaaaaagtccgaattgaggttatgacgaaattttttaaaattttgtagattaatatagaaaccaaaagaactaatcgaatgttaccaaaaatatggttgataatgagaacagttgttagcaacgacaaaacgatcgggacggaccacgagtcgggatcccgactgaatccagatcaatcccgaacattttggaaaaacgatcgggacggaccacgagtcgggatcccgactgaatccagatcaatcccgaacattttggaaaaacgatcgggacggaccacgagtcgggatcccgactgaatcccgatcaatcccgaacattttggaaaaacgatcgggacggaccacgagtcgggatcccgactgaatccagatcaatcccgaacattttggaaaaacgatcgggacggatcccgagtcgggattccgaccgaatcccgattccgaaaaaaggatgggaaacagggttgcacgaaaactctaaaaaaaactttcgtatacgaaaacgaaacgaaaaaattttggcggacgaaaacgaaacccgaaaaaataaccgttttcgtacgaaacgaacgaaaaaaccgaaaatttttttaacttatttcattcagaattaagaaacgtaaatctttaaaattatatcctcaaactgagtgtatgcagatcatagtaggtggataagcggatatggctctagtacaggggtgtgtgattgaaaatttttcgaaaaaataacaccaaggaaaaa

SEQ ID NO: 83176 - DNA, 995 bp, Heterodera glycines
atgttgaaaattatttttgagattattttcttcttattcattatcgtactaattgatggaattgatgaagatttatttgatgatttgttgaaaaatctaaagccatcaaattcaaaaaacatcaaaaaaccgatatttggagaaattaatacgataaaggaagaaatagttgttaaaaatgaaaatgatgaacaaggaaatgccaatcaaattgaaatggaagacataaatccaaaattattacaaaagattaaaaaggaaaaaacattggaagaacaaaataataatttaaaaataaaaatgccaaaaattgaaatggaacaattggaagaagaatcatatgaaaatgagtttgatgagcaagctgatcagaatgtttcgtctactgatcacaacgattctgttgatcaagcgtattataatattatggtaattcaacaatcctgtaaaaaattatttaaaaattcattggttctaagttttgcattaaaatttgcacaaggtagtggcaacgaggtccggtcaggtatggtcgggctcggtcgatgggtcgggggcaattggtcgaacacacaattcacacaacaaaataatgctttattgttccctctcaaacttgggtacagtgccaaagagcgaaaccggggaatgccaatgagggaccgggatgggtaatgtatcacaattggacagagaaagggactaggaaaagaaatggttaaggcatgggtaaagggaaagagaaaggaagagagagagtgtgagagcgggcaaagggataggcattgattgcccgtaaaagcgaagtgaatgtgaattgggagtgatttgggggccatttaaatatggaatagggaaagagataaaaaattggggcaaaaagtgaatattgttaatttacaattaatatgggctgatcactacaaattgggggagcaacgtactttggagggaaaatttggcgaacaaacgtgttcggtctttgaaccgactca

SEQ ID NO: 83177 - DNA, 645 bp, Heterodera glycines
atgcaactgatcagaaaatttgatcaaatgagaaaagaaaaaatttgtggacttaaatatgacgagaagaaaagatcagtaattgaacgtgaaattgctaatgaattgggaattaatagaaagaaaatttataaatggaagaaggaattggaattaggtaagagaccaatggtctaatcgaattttgacaaattaaaaaaatcaatttgaaacaaaattggaaaattgataaaaaaaatagcgtaaaaattggggttgtgtggaaaacaatttatagatggaagataaaatcgatcaaaatttataaattgaatataaaattaagaaaatttccaaagaaaaaagaggaaaatgaagaaataaaaacggaactggtcagaaaatttgatcagaccagaaaagaaatgatcaattttaggaaaaagcatcggtcacaaataattttatcctatgacaacttcactattcagagaaaagcctagtgtactatctctttgtttcttttttctttgtaatgcctttttggctaggattaaaaaaagctctaggctaaatattttgttgaaaaccaaaacaaaagtactgatgaaattctttttttttcggtaagacaatgcacgaccaaaaaattgagagttcaattca

SEQ ID NO: 83178 - DNA, 1100 bp, Heterodera glycines
atggccggctctgaaggagtcggccaacaaaaacggcaaaatcatcatcttcagcatcatcggctaactccagtgaaaaggcacgtgtttcatttgctttttctttctggtcattaaaaatttgttcccttttttgaagttgggcgtcggcgggttcagttttttatttaaagacgaggattaacccgtatttttgtttaaatgtagaggatttaaaaatttcattgtttttttaaaggatgttgacggattttgtgcgccgttgcggcagtcagtcgatcatcgaggacaaacagatcagcaagacaattttggaggtttgccaaagaggaaaccaaaatgaccttttgaaaaattttaaatgaacaccagagcagctgatatccgaacagcgcaaattcctcctgcatatcagtgcccccccagaatttttttttgaatttttaaaagctaaatttttcaagaaaaaaactgttctcggcggtgtctcttccgttggtggggcatccattaacattttaattttgccggtgaattgtcctatttggaatttcatattgttatattgaaaatttattccgaaaattgcagtttttacaaaagaagggagcagggaaaaatctgaaaatttttttttttttttttttttgcgtcggttatgtccaggcgacgttttggaatgtatccacaaaagaaattcccaaaaatctcttggaaaattctgtgcattaattttttgaactgctttctctgccaaattatttaatttttcacttcagctttgccttccacaacctctgccggtggtggcgctgcttcgtcttccgcctccgtgttgcgttctagcatcaaagacagcagcggcggtgcggccaacaaaaaggacccgtccgactcgacgcaggcgctgtttctgctggctgaggtcagtagttagccggccggctaatcaaattaacggctacttaaatctgatacctaatactcttccagaatctggctgaacttatcgactcggtctgcaaaagtgaggacaaagaaaaactgttgcccgcactgcaagcagtttggaacaacacattgccctattcggtcgaagg

SEQ ID NO: 83179 - DNA, 214 bp, Heterodera glycines
atggcggcgcaaaatgttgacaatgtaaaaaataatagtaaaattaagcttagtgtcagaatgcccgattcaggcacgacccctccacagcaatccaaacctttttcctaaatttgttaaacttaaaaattgaaaatatgcgcaaaatgcaaaaaaaaaacatttgtagtctcaacctctgaagattccaacacttgaggactccgatatctga

SEQ ID NO: 83180 - DNA, 131 bp, Heterodera glycines
gagttgcacccgttcttccatgcgttgaccatgcaaaatggcactggacaaaagcagcgacacatttgcaatggacaaaggcagtaattctcggagatggacaaattaatgagaaacaaattgattggtga

SEQ ID NO: 83181 - DNA, 1126 bp, Heterodera glycines
atgatgaccggactgaacaacagcgacgttggcaaggagttcagggtaagaatcataacgaaagcaacatattaattttaaattccaacgccaaattacaaagaaacattttctctgtcttcaatttcttcatttcctttcgccaggggcggagcaaaagcagtcaaaatagctaaatttcaaaatccattgtgtaaacgaaggaaaaaatgctaatttatcgtttcaaatacacccctattttcccagcgtcgctggtatgagcaaaaaaaaaggtcgttcgggcgaaagtttttcaaaaatacacccctaagaatcgggcgaagaattttcaaaaatacacccctaagaattgacttttcggatcggtacccccccccccccaagcccaaatcctggatacgtccctgtcccgaaccatgcggggccgaactgaggtaaaccgccctcccgcccggtaccccagcccccaccctgggaccaccgttcctgcccaaaacccataagtgccgccgcgaaccctcccttttgttttacatttgcattttcccattgttcagacatttcttcgtgccaccacttcttctgctgctgcccgctacacaattcaatttgacgtgaacaaatcgttgccaattgtgccatttgagttggtgaacgaacggacccaagaacggctgacactgtggaaaggacgcgattatgaacacgttcgtcagtgggtgatgaagcgatgtccaattggggagacggcgatcattcagtgggaagcgcccccaaactcatcggcaaccaatttgaacaatgtcaacatttatttgtgttgtgtcagctgcactggttgagcaccagctcatatgtactttgtcaaaatttgatgattttttttttctagaaaatacactattttattctgtaaacgtgaaaagatcatgctcattttcggtagttcaaattaggttctcgacgatttgccgtccgggccgagtgtggtgatcagaaacagcagaagaaatgaattgattggttgatttatgcgattatttgatctaaatgttgagcgttgttatttaggtaggtaaatgttgatcgttgttgtagttgatttttgctcattcacaaatca

SEQ ID NO: 83182 - DNA, 1385 bp, Heterodera glycines
atggaagaagcaaaggggctggaaattgttggcttcggactgttccacaaatgcacgcccaatcaggtggggatgaccaaatggacaaatgctgatgatcagaaaaagctgatcagttgcgccgatggcaaaatgccaatttaataccgccgtttttcagttttactgctctttgttgtccgtatcgaagcacattgaaccgttgttcgtcaacgtggaaagagtggccgaactgaaaaagtcagaaacggaaaaggaggaaaatgccaacaaagggacgggacggcacattttgttgagggtgagacgaaaatggcacatttgggcgataattatgcttattggccttcatcaaccgcactttaagctcaccgatgtgcaccaatcgttgcccaatctctcctccctcccccaatatttttcggcatttgctgaacccattggccgtccgttgctccaatgtttgttaagcattttctaatttccccgagggcattttgtcatttttaaaatttccttaggcattttggacgaatttgtgagggttcacgttggcattcacgaggttgacgagttatttttcaatttttggcattttcatgcgttttattcttcatcagatggaaacgcgacgtaatttcacggtggatctttacgacgccgactcggggtaatttggccagtttttcataaatcggctcctttcacagaatcgacgaacaccccgacacccaatggcgcgactttgctggttttgttgtcgccgaccgtttccgctactgcgaaattgagttggacaggtgggcaaatgcggtcgaatcagatctgctgatgattcgagagtcggtctcgagtttctttaattaattcgttaatcctccctaattaattcgttaatttctcccccccccctttcagtggcgcctttctgtcctcatttgacgacaattccctctcggtcaatgctcctgttgttctccattccctttcgccttcaaatagggcacttttccatgactacgatcagtccgtttcggtgatgggccgtgaagaatatttggactttttgttgaatttggcgggggtaaaaaggaaagaattgaaagtaaaagcaaaacactcccaattaacagatggaaggagtaattgcaattgacgagcagaagaaacagccgatcggatacattttggcatatggggggagagtgttgcaatgctacgcggacgaggagaaagtggccgggtgagaagcacaaatttggggggaaggagggaccaattagcgttgggtaattggggcgcggaacagaagaaattggcgtaattgggcgagggtcaaaatgagggacaaaatcattctatttacctcccctccaccacacata

SEQ ID NO: 83183 - DNA, 108 bp, Heterodera glycines
aaaaaaatcgattttttcaagtgtccgtttggggtactcaaacaattatggggaagaaaaatcccaacgcagaattaaaagtaccaggctataagggaaggtattccc

SEQ ID NO: 83184 - DNA, 1088 bp, Heterodera glycines
atgacagacataattgaatttaatgttggtggacaaatttttgcaagcacttatcaaacaattagtttcgacaaagaatcacttctttacactgtaagtgtaatttttacggtaatttactgtaattaaattttttttttttttttttgcaattttcagtggtattttgagcgcaaaggttcggcacatacaatgcttgacaaaaaaggtatagcttggctttagaattaataaaaaaataaataatttaaataaaaatttgccaatcaaaaatttatttttgtccgaaaattaatttttaaaaatatttttagaaaatttttaatttttactgccaatttcaggccgttttttcatcgacagggacccgacaagtttcggcataattttgaactatttacgtcttcataatgccaaacagttgtgggaagtctgcttgcccaaggaaccggacaggtacgtttttaaatgaaaaactacttattttaataattctttaaattaaattaaattaaaaaattttggatatttaaaaatttcactttaaagataataaatatccggaaaattaaaaaattcgaatttaaaattggctttcatttaatttgtaatgttttatttcgcttcgcatttttttttgttgaaattttggtaaattttccaaattttgtaaatttatgcccatattttgaaaatttttctaggtattttatatcattaattgtccatattcatccatatttggagaacttttctttgatattattttttatggcctataaatccaatcaataaatgtaattttttttaaaaagaaaatcgaaattttatttttaattaaatttaaaaggcatttaattgcattttgctatctctttagactggctttgttgactcaggaggccgaatttttccgcctcccatccctacgggaccaagcggtggcactgttgcgcaaatgcaccgcggaagagccgtcaccagcagaaattcggggacgaatgatgagtttgaagacgaatggtgggatgaaaaatggacggagatggcgaacggatgaagatgatcatgataatgaggatgattaa

SEQ ID NO: 83185 - DNA, 1402 bp, Heterodera glycines
atggaggcaataaagcccatcgaatttagccactgggccgctccaattttggtagtcaaaaagaggaatggcaaaacacgagtgtgtatcgatttttccacgggattaaacgacgcacttgagctacaccgccatccgctgccacgtccagaggacatttacaatgcaatcgcaggctctaaatatttctcacgcctcgatttgcgcgacgcttatctgcaattggaattgtctgatgagtctaaaaagctgtgtacaatcaacacacaccgcggactcttccaatgccagcgtttaccgttcggcgtaaaatcagcgcccgcaatttttcaaagtttgatggacaaaatcattacacccatcaatggcgcattcgtctatctcgatgatgtgattatcgccaacacgactctcgaccaacacgtcaaaacgattaccaaagttttcgacaaaatcaaacaattcggtctccgaattcaactggaaaagtgcagttttcttcaaaaagaaaccgttttccttggccacataatttctgaaaatggcatccgcccggacccatcaagagccgaggctattcgaaaaatgccagcgccgcacgacaagtcaactctacggtctttccttggagcgctcacatactacggcaaattcatcaaacaaatgcgcgaaataagaagcccattagatgaattgcttaaaaaggatgtaccgtggaattgggaagatgaacaacaaaaatccttcgagaaagccaaagaaattatgctttcggatttattgttaacgcatttcgaccccaaattgccaatcattgtggccgctgatgcttcaaaaggaggaattggtgcaacaatcagccatcaatttcccgacaaaagtgaacgtgtcattgaacacgcatcatgcactttcacggctgcgcaacaaaattacagccaaatcgaaaaagaggctttaggattggtttttgcggtacaaaaatttcaccgcatgctctacggcagaaaattcactctgttgaccgatcacaagcccctactggccatcttcggatcaaaaaaaggcattccaatatattcagccagccgacttcagcgctgggcgttaattttgtcaaattacgaatttgatattaaatacgtcaacacaaaggcattcggaaatgccgacgtactttcgaggctcatcgcaaattatccgaggccatcggaagacattctcatcgcaaacatctgcaatgacactgattgctgtgttaattttgtttttgaggccaaaattgagcaacttccgatcaccgcaaaaataatagcggaggaatcagcaaaagacgaaattctacaacaaatcagtgccttcaccaaacaaggatggccgcaaaaattggacgacattaaaa

SEQ ID NO: 83186 - DNA, 752 bp, Heterodera glycines
atgttccgagtgcgcgaaagaccacgtggatttgtcggaggaggcgttcaattggttggagccgggcggcggatcggtgggagtggcgaaaagtgaaaaagcaaaaacaaaattggcattaattttcatcttaatcattttagatgctacaataacctatgtgaagtgttaaccatggggatatgattggtctatggatgctcttaagtgatattcttctattttatttcacattttttgttaaaataattattaaatattattattcaacaattcttttgtttttattataattgcttaatttaattatgaatggttggttagttttgctgactatttaattattttaatacattttaaaaagttttgttttttcattgatcaaaaaagttatgtggccaaaaatatccaaaaaaacaaggggttttttgtgttccttagtcataaccttttttaaacaacaaaattttttgaaattttgcaaactgatagagaacactttgggctatcagatgatatcaacaattaaaaattggttgattttgagcaaaattataaataatttttcatcaaaaattttcatattgatggttttttaattaacgccctttatttatgatgttttttgttatattattttttaaccaatttaatgtatatggtgaaggaaaaaaatcttgagttaataatttcgagacggagagcatataattacaaattagcatatgatataatatggattaaatttatta

SEQ ID NO: 83187 - DNA, 563 bp, Heterodera glycines
atggtcctgctttttctccaattggcactgattttgctctgttcggtgtttgcttttattgtgtaagttttaaaatttgaataaaattttcatcactttttggctttgctatgttattaaagcattttccaattcctaattctttatttaattggggccaatagcagttcgtacaataacaatttataaaacaaagcctaagatcaggcttaggcctaagtccaagcaagtagaagcttagggcgctaaggctaggctcaagcctaagcttaatccgaaggcttatgctgattctaagcctttataaaaatgcctattgtacgaacggtctttgtacgactgccatgaccccatttaattgtatcaaattggccatagaatgatgcgcaaacatcgcaagtactggtccaaccgtggcattccgtccccaaccccgcagctgatcagtggcaatttcggctcgctgtacggcgattatccgagcatgttccagctgcgggattggaccagacagtacggcaagcagtacggtatccaatacggttggcgcaacgcgttggtga

SEQ ID NO: 83188 - DNA, 864 bp, Heterodera glycines
atggcttcaacaaatttttcgataaacgatttaaatgacagcgaccgttttgacattgtgtcgagtaagtttcaatgctttcggaagatactctcttgtaattatttggaaaaaaatagatgggtcccaatcccccgaaatggaaaataaaaatttccaagggaacaatctggcacattataagtttacagaattttttcttaaaaattttcgggtacttttcacttgtttctgctaaacaacgtgcctatctcgacagaacatattttttttaacaaaacataagtatttttttattcaaaattggagtttgaaaatgctcttattttgtggcttaaccattttatgactattttcaccataaaaaagtaattaaagccgcatttgtcgctacaaatagccataatatgcgcaaggtaccaattaaagaacagttaaatgctttgaatcttgctattaataaggaataatgattatttaaactacaaaaaatctgttgaggaaaacaaaaacaaaatttttttattgaaggaattttccgacagttatttaaagatctggaaaattgttaaagaactttgttttggtaagcaattgaaatttaatttataaaaaattagtttattttattaaataaaatgccaccaacaaaatttgttcatagatttgtcacgaatttgtgcttttgcacgggaatataagaaaaaatatgttgacggattgccaattttgaagagtttatggtttatgaaaaaggaagcaaagactcaattggatttgcaaatagccaaaacaaatggaaaaggaaactgccatgtttgggaggagaaacttggcaaaatgtattgggatcacattttattg

SEQ ID NO: 83189 - DNA, 429 bp, Heterodera glycines
atgaatggaattgtcaatgttgcgaatggaatggactacaaatatgaaaagttaaaagaaccgttactttcaaacgaagacactgatcagcagtcccaatttgaagtgatcgaagatgacacaacggaggaggaagacatggaaaaagcaattaaaatcctcaaaagattcttttggcgagttataatggcaatgaattgcaaaaataataccattaaaaagccagaagaaattggattcaaaaaatcttaccaagaattggttgaaatttgcgaatattggaaaatgttatcaatagcagctgaagcatatgtgaaaagttggaagaggtgcaaaaaaggaccaaaacaggagaacgaagctgaagttggcacaagttcaacaagggcacaagacacacttaagacggaagaaaatggcactaaataa

SEQ ID NO: 83190 - DNA, 1381 bp, Heterodera glycines
atgttgaggtggcggtggaggctgcggatgttgtggttgttgcggttgtggcggtggcggtggcaacaacaacgacgccgcactgttagcagcaatcaccgcagcaaccgcttctaccacgggtcgacgtcgtcgacgacagcccggcacattttgggacagtatcatgcaacgtttggcacgtgcaacagcgataacaacggcaccaagccaggtacacgtagaataagctgataatgacaatcttatagttcgttttgatcagtggaaaatcaaaatgatcatatttgcgaaatgaaaaccacaaatagaaaaattatacctatcaaattctcgacattttttagaattctcaagtttttgaataaaaaagtatttataaatttgatcaaattaactaaatttttatttcttcctttcattaggtagccctaattattattctctattaatctgctagttttcaaaaatttttttgtttcaaaaaaagttatgactagaaaaattttagtgttttaaaaacgatgatattaaaatagtttaacaaggtttttataatatcggaaaattcttgtgcataaatgaaaaaattggaaaacaaaaggtacaaaattcatctgccctcggcggaggagtccaatgcaattgttgttgtgagaatggacaatgtgtgaaatgtgcccagggacagtgttgtgtgaatggaaaatgtggccaatgccaacagggaacacaacaaaaacagaagcaacaacaagttcaagcagtacagcaacaagcgcagcagcagcagcagaaacatcgattttggcacagaatgttgagaaagaagcgcggagcggacgacgaaataaacatttgaaaataaaattaaaaaagtggcaaattgcctgtttttcgtgtataaatttgctttcgtaatgagttttatatgtatgtatgttatcaatttgctctattgattaaaccaataaattcggttcggaaaataggcactaaaaactttcgtaaaaaataattaataataaaaataataattaacaatattaccaataaagatttcctcccttcctcaattcttatcatttctgaacatataaaagcaaaaaaaaaaaaatagaatttacaaattattaaaaagacaaattataattaatttttaataaaaaatttttaaattaaaaaattgacattttcttcatttatttctctttctgaagtgaagcaatgcgccaaatgttcgcagaaaatttcccatttatatacatattcagggaaccagtattttttctatggacaaatttggtgaaaaatgatcacacgatcactattgtatggccaatggtgtcaatggtcaatgaccggaaatttttatgagaca

SEQ ID NO: 83191 - DNA, 581 bp, Heterodera glycines
atgtcttccggcggtgttccgggaattcgtgtcgtgcaaatgccgggccgacgccgtcgtcgacgacaaattgcctccgttcagacactgattgcccgtgcaacacgttcaactccaagcaaaccagtggtaccaagcatggtaaaagtttgacttgtgtaattttgcataaacaaaataaaaaatgctaattttaaatatgaaaaaacttttaataataacaattaattggtgaattttattaggtatatgcatataaactcatgaaattttaaaaaggtgattttcttattcagttaatggttgtcagaatgacttaaaatcatgcagaaaaaaaccttggcaaattaggactgccagtagcaaaatttccaaattaattcagtcattctgataaataattaaataactgaaaaagaaaatcattttttcaaaatttctaagttttatttacatataatttccagcctagaataataatctgtttaaataccccaaaaagcacaaccgaacacatgcccaaattcttgtttaagatgttgagaaaggcgcgaaggatggacgttggaaaaaaacattaa

SEQ ID NO: 83192 - DNA, 396 bp, Heterodera glycines
atgacaaatcattctgacaaagtgccgaaagactctggcaaaatgacaaatcattctgacaaagtgccgaaagactctggcaaaatgacaaatcattctgacaaagtgccgaaagactctggcaaaatgacaaatcattctgacaaagtgccgaaagactctggcaaaatgcctgccgaaatcggcggcgagagagaatatttgttgctcgaaaaatatggacaaaagattctaggcaaaacaatcaaacacagtgaacaattgagaaaggtcattgaatggatttacaaaaaacagtgtctattggagccagttttcgataaaatttcaaaggtcaatttcaaaaatttcgtattttgggacaggcggtgccgaaagaagccggggaatttatga

SEQ ID NO: 83193 - DNA, 640 bp, Heterodera glycines
atgaatttttctgaggtaaaagctttgaatttatttaacaactatttattttggtgtaaaaccagtgttcccaactctgcttatttgtaagcattttgctgatttctaggggtcaaagatgatttttttttgttagattctgatttgctgctttttgagaaaatttgctgatttttggaaaaaaatcagcaaaaatatctgtttttatgtaaaattgctaccaaattaccaaattttcaaatttagggcgatatgttgatttttttgtgtgtgactttttattccctagaaattttatggcttcattgttattaactaattagtttctcgattttaagtacatttatgactgtaatgcgcaaaattttcaaaatttgctgatttatgctgatttttggaacaaatctcaaaatggctatttttaggctatcggtccaccggtccctaaaattccactgaaattttcaaaatttgactaataaattcccaattttcagtgaaaatctgtttaaaaaggttcaacatttccaattttttccacggcggcgcctatcggcaccgccggaaccacgccccatgtttccaaaaggtttttttggataaatcgcgccgcaaaaacctttttattaagttttatgga

SEQ ID NO: 83194 - DNA, 55 bp, Heterodera glycines
atgcccattccggcgactgatgaggcaggcacctgctgcagtctgcggatgcaca

SEQ ID NO: 83195 - DNA, 307 bp, Heterodera glycines
tcggagtaggacaaaacgtcgtcagccgaaacgtcgtcgaacgaatttttcgaccataacttttttctttctcaaccaaattaaacattcttggtattattcgaaagcattcgaaaaatgctattagcctgcaaattttcaaaaatttttatttatgcacaaaaaaatctgagcaaaaaaagttcgaattactgggtttttgagttccttctggccataacttttttaaagcttaacgaaaaattttgaaattttacaaattaataataaacacatagagctatcgaaaaacacccacaatgcttaa

SEQ ID NO: 83196 - DNA, 429 bp, Heterodera glycines
atggccagttttttaattccaaatccccaacatcaacaggtgtctggtgcgcaacagttggtcagtttggtggtcggtggcactgtgtgcgagtcgcatcgccttcgtgttgggcgctgctcccgtgttgtggtcgatttcagcgacaacagcagtggcggctcattttgtgccgccaacgcgggcggccgtgccaaaatgaagaaaatgtttgtcaccggcggcgacggcacggagcagcagcaggacgacaccatcaccgatgaactgcagcagcaggaagacgaggatgacgacgatgatgatgatgaagacgaattccgcatactatccgcacaccgtaagcaaagaaaggaaaaacagaattctcatttatacaatgttgatactacttactgtatccagttagttcagggaggtggtgtactg

SEQ ID NO: 83197 - DNA, 317 bp, Heterodera glycines
atggcacaccgaaattgttgttgggccctgctcattctgctcacggtgttgtgttgcttgaccgttttggtgccgtcaattttggcctgctgttgcgactgttgctgctgttgcggcggtggtggcggtggcggcaatagtgccaataatattgcaactgccacagcgcttgccactgctctcaacggctcgttgctggtgttgccgggttcaagttctggtaatgtttattgtctcgattttatgacaaaaaaggcctaattttgatagggaatgaatttgcttttccaatttttgctttttaacgctaaaattga

SEQ ID NO: 83198 - DNA, 448 bp, Heterodera glycines
atgccgcgcaattttctgctttgggtcaatgtcattgaatatttcgtctgtttggctttacaattgcctgctttgcttctgcttatggccattaccatttcagtgcaatttcgaaaaaagttttttatttttattttctttatttttttataaatttttctccgtcagaaatcactcccaaaatgagaaaccgctgtgtcccactctgatctattatttgctctttctgctgatcagtctcatctccgcagttgcttatcactgttatatggtttccaatttcgtgcaaaatggtgccgaaaaagccgacccctattggatgttctggttggcactgtgctacgaatgtgccaacgttgcagttccagtggctatcctcggcctcacaattgaccggtatggcatcggcaacagagttgccgccgagtcactcaaccggaagcattag

SEQ ID NO: 83199 - DNA, 2104 bp, Heterodera glycines; identical to SEQ ID NO: 18569
  unsure (1)..(2104): unsure at all n locations

SEQ ID NO: 83200 - DNA, 538 bp, Heterodera glycines
atgaagaaaaatacactttcattctctaatgttcaattgtacgaataggctttttgagttcaaagcacaaaagacagaactcaaaaattattaaaagaaagtcggtgtaaagcaaaggatgctaaaactgcaaaagaataaaaatgcaaaaaattacggggtagtctgggaattgaacccaggacctctcgcaccctaagcgagaatcataccactagaccaactaccctataaaatgccactatttataatttcttataagcaccttcctttcgttgattcatcgcaatttcattcctcattaattaattgcttccagcgcaacttattttcttaaccccttgcaacttcatatcattaattaattaaaatgaaaaaatgtggtgttttaaaaaaaattgacttttctcgttttttcgagagaatttacataaaaaacgcaaaataagttaagaaaaacagttaagacaattagtcgtccatttcctgtccataaactgtttaaggaaaaatggtaaattctgcactagaaataaga

SEQ ID NO: 83201 - DNA, 1368 bp, Heterodera glycines
atgactccgattggagccgagcagaaaaacagcgaattacttgaggttattgaaaaatcaaaattgaattaatctaccgaattttcccaacagaaattccaatcggttcgcgaaattggagaggcaaaagtgcgagtggccgaatacctgcaattgattttagagaagtaccaggaaagggtggcgaaggacttggccgaattcaaagccgacttggaggcggagaaccccggggagacggagttgatagaaaagagtgagttgttaataaacgagggcagggttttagaatttttgtggcattttttaacggtaatattaattgtgagcaatataatataaagtacccagattttatgcaaacaatgttggcaatgtcttcttcatctgctggacaattcgccgatttgttggacaatttgaatattggaagtgacaacctcgagcagcaaatcatccacccgttaaggccttttgtttcggtgtcggcggaaaacttaaacggtgacgaagaaaggtaattaattggcaaaataaagagaaaaggaaccagcgattcagcagaacatcaacagaaatggacttgactccgaagggccatcgaacacaacaatttgacgaattccgaattcccgccactcttttgaatgttggcgtggcaaatgggctaacaaagaaacagatgtttagtttcaattttggtcatttttagcggcgtccatcacttgccgatggtccaacgaccagcagcagcagtgccacattgatgccttatgatgaggatattttcgatgccgaagtggcaccccctttgaaggtggtgattttgtccgtgcaaattaaggcatttctgaacagaagcagaagcctatcgcaactcaacatttttttccacatattggagcagttcaacaacaggaaataattgcagtcgaacaacaaagtaaaaacaatgggaacggtgtaaaatttatcatttctttaggagaggtaatgaaatgatggactgtttggttcagacagatgggtaacagaccgaataaaattggttaaattaggttaaattctttttaacggtagtgatttggaatggtatttcggttaattttcaattaaaaatggtcgtattttcagggttcggcgtcatctgtttcgacaatatcgacttcatacccaagcacttcgttcgcaaaaattgatttcgatggcaccgaattgggctcaattggtggcccccttttgagtcctttccacgcacgacaaccatcacttgcccgaatgccgttgttggccggcgtacatgcaagcagacatggaaggccaagaaagtggcattcgataaatacgcatggcgaaaaggcaaataaa

SEQ ID NO: 83202 - DNA, 1428 bp, Heterodera glycines
atggaaacttggtgagcaaccatgacgaggcagcacgctttgaattctttgacaacaaccacagtgcggacaggtgaatttttggtttgggaggtgtaaatttgcgctttttgtgggtctgtcaatgctttaccctctaaaattttgttttttcagtgcccgtgacattctgcagaaggctttgcgcaaatttcccaccgcccctcgcctttggctcacttattttgagattgaaattcgcttcgttgaattgtgagtttattacgggaaaaatatcgatgaatttaaccattttttgctgtaccattaaaaaattttcaagttttaccctcttattccaatttaaaacccccaaaaattgttaaatttccatgaattttgttaaaaattgtttcattttcagtcttcaccagcgtcgaatgttccttttgcaacaacacaaaagcaatgagatgaaaaacaaatggcaaaagaaaaacaacagcagcaaaaggaaaagcaatggacaacaaaaaaatgaagagacggcacaaataactgatgaagaagccgagaagttcaagcagttcaacagcagcagtaacaacaatgatgacgaagacgaagtgcttggacttaaattggccaccattgtgtacgaaatggccatgaaaagtgtggaggagcacccggcggagaagacgagtgagtgaaagtgaaaaatatgccataaaacggaattctaaaaattcttacgaattttcccataaaatttacgataatcacacggatccaatgtctaaaattttgttgttttaatagttagtcttaatttaagaattgcttcgtgattttctccgtgttgcgcgtgattgtgcccattttgcggacgttttggtgcagaaactgacggaccatttgcatgcgttgggtgaacacgctgaagaggaggaagagaatgccgttgagggacaggtgaggagctaagttcaagaaatttgattttgaagaaatccaaacttgaaaaaatttgccaaaacctggcatgactgctattgtcagagatgccattcttacacccgagacttgcgtttttatgtgccatttcagttgatccctgacgagcaactgtttgctgttgacacggagggcgatgatgatcagcaacagaagcacaatgccgaggacgatgacatggaggagaacgaggcggaggaagggacgaaacagggcatcagtggtggcaacaaaacggacaacaatggcattggcatcgccacaaaaagcactggcgatggtggtggtggcggcaacaacagtgtgctggacggattcaacccggacgatcccgagcttaaactggttggtcttctgttctcacaatactagcagaactattctcttggagggagtctaatcgttcatgaccatgcctgtgaattagaaaaa

SEQ ID NO: 83203 - DNA, 1885 bp, Heterodera glycines
tcaattggggttcgattttgaaaaccattattttaagtctcaaagaatgtgcattttgaatataattataccatttttctatattttactattttttacagggagtggacgaagtgttcgaaaaatggttgcccgaactggtcgaaattgtcaaaaaacagccggtaattcaacaatttgcaattttacgcccatttttctcatcagattaggcctcgaatcgggatgaaaatgttcgaattttggaaatgcaaaaatttttggtggaatttgcgccctcaaatttggccaactcaagccaataccatccaatttcggtggttgccaatgaccgactcactgaccaagcgcatttccaagacacgcgtctcatcactttggcaacacgtccatttgagtccgagctaaggttcatttttcacatttttgagtagggaggggttcggtatattgtttttaagaaatactgtttttttttgaaaatttcaagcgaactgaaaaatcctttttaataaaaaaatgggtggtttttttgaagacagtgtcgattttgataacaaattcgttaaaatgtgcaaatttttctcctcggcgctttttgccaacgcctaatgccaaaagccgttaattttcaaaatttggctcaaaatacaaaaaaaaacggtctttttttggcaaaaattgcttaaaaatgccattttcaatgtatttcctcttacaatttcggctattctcccggcgatgttctgatggtgctgccagaaaaccttccccaatccgtccgaattgccaccgatgcgttggaccaatgccggcaccgtttggatgagccctttcacatttgtcgtacgagcccaaatgtgccattgcgtccccaattttcacgctttttctgtaagtttttttttgagggtttctgcctcaaaaattttctcatagacttttttttttcaaaacccactcgtgtgcagataattgcgccccggacattattttttttaacaaataatctctgggggcacttggagtatattttgaatttttctaaatctttttcctttttcgctttgtttaagggtaccaatcccaacccaaaattgttcaaacccgttgaatttgcttaaaaattcccattttttagcttcggatgttccgctgactctccgcgactgtctctgcttttattttgacctccaatcggtgccaaaacgttcctttttgcgcgcgttggccaaatgttcgccctcagaaatggagagggaccgtctcatggagctgtgctcggcggagggaattgtaagggacagaaaaaacgggagcagctcgtccccccgtataatttctcccgaaatcgttttaaatttctaacaatattagaattttaaaaaaaattcggatcggccaacgcagttcattgtcagctagaaaaataaataaaaattttttccctaacaaattgctattattgtaaaaccgtatgaataatttggactaagctttgggtcatcacaaaaaaattcactttttacgcttcaattcaacgcgaatcaaatcgtattgttggctaaagaatccgtgaaatttctattttttgaaattcgtagctaaagaacccataaaaattgctacaacttttctcaaaattttttgtttcaaaaagattgtttcggtccatttttaggacgatttccttgactattgccagcatccgcggcggacattggccgaacttttgcgcgactttccgaacactgcttctcgcctgggcccgtccgaactgttcgactttttccccgtcattcggccccgtgcctttagcattgcctcgtcgccgacggcacatccgggccaaattcaaattttggtcgcacgagttgaatatgct

SEQ ID NO: 83204 - DNA, 880 bp, Heterodera glycines
atgcaaaatatggacaaaaaatacgaaaatatggaccaaaattttctgaaaattggttggaatttttttgaaaaaattcataaacccataaatttttttgtcaagaaagaaaaaaatcattttaacatgaattatagaatttgataattgaggcattctatttattctatactaaaaaaattgaatttacttagaaaaaaagcaaaaattagtaaatttcaaaaatgcatttttacacgaattttgctgatgaaaatttttttacataatttttgatatttttccaattcgattttagaagcgtattttccaaaaattttccatctagggttgtatttttggaatttttagtgaaaatgccaaaatatggaagtaaatatggaaatatggacaaaaacctgaaaatggaaaaatatggaaataaaaatgcattctagaagcatcaaaccaagctaaaaatactatttacgtggtttttattccgaaataagtgtgctaaaaaaatatggaaatccctacaaatccgtccctactaattagtgtctttcttaatgtttttgaagaaaaacacaaataagcaaattttaaatttttttattaccttgtctatgaaaaatccagaaagttttttcagttttactaaggctaatttaaatcttcaaaaactgtccttaataatttactctcaacaaaatgtcagacaaccgaaaagaagccgaggaaaagatggcaaaagcaatgtttatttatttattttttttcgataaagaaaaaattgccatcagaagggcgggaaccacttactctgatgactgatcacagtaaaatagtcacagagtaagtgaaaaaatatcaagtgagatcacaggttaaaaataaa

SEQ ID NO: 83205 - DNA, 1117 bp, Heterodera glycines
atgattattttgtacggctctgaatcgggcactgcccaagattttgccgaacaaacttggcaaaccttccacaggaatggcacaaaaattgtggccaaatgcatgccatttgacgattttcaaattgcggtgggtttaatttatacaaattcctaatttaatgccattttacagcaattatccgatgaaaaaatgaccatttttatcgtttctacgagtggacaaggcgaagtgccgacgaatatgcgcaaaaattggcgctatttgctgtcacgcaaattaagcgctcaatggctttcaaatgtaattgatgtcacctttttgataattggattaaggggattttcacatatatttgtgaataagaagggccgaaacgaagggcgggattggggttactttttgggttcgaaatccggggttttttaatgaaaattccggcaaaatactgaaaagtttggtgtaaatccgctatgaaatcgggtgcaaatttcgaagttttcccggcgtccgcctatagttcacctccgcaaaaactcaccactatagaaatttgaagatgtgttgaatttcgtccgatttcttatacatgaaattattaaaaacaaaaaattcgttatttataacattttatgctcttcccctcctgaaacaaaacaaaaaatatttttgatttaatttgccataaaattaaaatgccgttttttagttgcattttgccgtgctcgcgctgggcgacagttcctatcagaagtacaattttgctggcaaaaaattgtacaggcgtttgttacaacttggcgcaaaaccggtcatggagttggtattggcagatgaacagcacacacttgttagttttgccttgattttgagaaattgttcgaaaatttattttttcgggatttttcaattgggttcgattttgaaaaccattattttaagtctcaaagaatgtgcattttgaatataattataccatttttctatattttactattttttacagggagtggacgaagtgttcgaaaaatggttgcccgaactggtcgaaattgtcaaaaaacagccggtaattcaacaatttgcaattttacgcccatttttctcatcagattag

SEQ ID NO: 83206 - DNA, 775 bp, Heterodera glycines
atggggtgggggcaaatggacgacaaccgaaaaatggtcgccaaccgacaaatggccgacaacggacaaatggtcgacaaaatcggggccaaaaggttaaggccatttgacaaagcgaaaaaggaaaaagatttagaaaaattcaaaatatactccaagtgcccccagagattatttgttaaaaaaaataatgtccggggcgcaattatctgcacacgagtgggttttgaaaaaaaaaagtctatgagaaaatttttgaggcagaaaccctcaaaaaaaaacttacagaaaaagcgtgaaaattggggacgcaatggcacatttgggctcgtacgacaaatgtgaaagggctcatccaaacggtgccggcattggtccaacgcatcggtggcaattcggacggattggggaaggttttctggcagcaccatcagaacatcgccgggagaatagccgaaattgtaagaggaaatacattgaaaatggcatttttaagcaatttttgccaaaaaaagaccgtttttttttgcattttgagccaaattttgaaaattaacggcttttggcattaggcgttggcaaaaagcgccgaggagaaaaatttgcacattttaacgaatttgttatcaaaatcgacactgtcttcaaaaaaaccacccatttttttattaaaaaggatttttcagttcgcttgaaattttcaaaaaacccagtatttcttaaaaacaatataccgagcccctccctactcaaaaatgtgaaaaatgaaccttag

SEQ ID NO: 83207 - DNA, 444 bp, Heterodera glycines
cattcgctcattcatccacggaaacttgaagaaaggtgctttggttgtcaaaccctattagagcaaaaatagattttttcattacatagtaaaggaatatgcaaaatcaaatcattcgttatggttgggctaattgtaaggatatcaaataatcggcatcctcccattacatattttaaatacaatagaaaatgcatttaatccgttttgttctttcagctcctatttggcttcgtttcatttgcaaagatgggactgagtcggacacttactatttccgaggcggtggttatgaatcgcttgtgaattgtttgcaaaggtataatcgtaaaacattacgttcaatgtttttatccttcattattttgtagatacgtttttcttactcgttcggccaagtcagacaatctcattttgatttcggacagtcgcaccgatgccttg

SEQ ID NO: 83208 - DNA, 993 bp, Heterodera glycines
atgactttggcctccaaagtcacctcttcccttgcaccactacttgatcctgaggcggttatcagtgaaaatcagctccgagttctaagccaacagcaacctgctgcagacgaagacgaaagttccaaattgaggtgaaggctctgtttttttgaagcagttcgcgctcccctctcaattataatgaatattggtccgaggggtgggggaaacgtagtacattcctgttttttaatttactaatcttagacaattttgtgactctgggtttgaacacatcttccaattggatttgccacatcgtccacaaattttacaccgtgatccgcctgttgataagactattttcgacaaattccgatcactttctgggaatgatggacgaattttggactcgcatggattgaaaagtctgatttttcgcggtgggatttctccagaaatgcgaccgattttgtggaagtatatgctgggtttctttaaatgggatcgttccgacgccgaaaatgaacacgtattaatttcatattttttaaatattccaattcactgtttagcatcgaaaaaaattagaggaggactattacagaatgaagttgcaatggatgagcatcggcgaagaccaggaaagtcgatttggcgcatttcgagacagaaaagcccttgtcggtgagatgcattcgcttttgtcaattactttttgacttcactcatgccatcgcatttcagaaaaggatgttgcccgcaccgatcgatctcatccgttttttagcagaacaaaccctgaaaatttgcatttgctccgagacttgctcatgacttattgcatgtacgactttgaccttggtcagtttggttatccttcgttaccgtatttaattgttgtttttaggatacgttcaaggaatgagcgactttctcagtgttttgtgcgttgttttggagagggaagtcgacattttctggtgttttgtcggtctcatggaatttgtg

SEQ ID NO: 83209 - DNA, 213 bp, Heterodera glycines
ttgaacggcagcaactctgccaccagcggcagtgacggcgaagtgccgtcctcgtccgcgtccaaagttatgcctccgaacactcacagtcaaccgcctcagcagcaccaccacgtcactccgtcacagcccatgccggtgccgatctcttacgcggcgagtgccgcagacttttccacgatggtcggtacgcccgagttcatccaggtttga

SEQ ID NO: 83210 - DNA, 918 bp, Heterodera glycines
atgtttttgaacaacaacgacaatgaaacgaagtaaattcttgaaaccatgaaccaaacgacgaaaacaacgaccgcgacgacgattttgaagaatacgataatcagaagagaggcatttgtctttggtccgaaggtagggaatttttaatcgccaatggaaattttttttaattgcaaggatttcgttttcgcactaacaaatgagctgtgatttaaattttctttttttagactggacattttgagcaaaaatagtggaacttggcatttggacggcaagttcaaggcatcgccagccatgaggatgttcattcgcagcacacaaactttctatgtatgtttaaacaattacatctgtaattttttcagttatttgtgttttaagcgttttgtcggagacaaaaacgatgccgaaatttattgccctcttcgtcatcatatcgaaggacacccacgaaaaataaaggaccatgaaaaattagcttcaaccgtgcatgtcctttaaaatttgtacatttctgttttttgttatcctttcaattaattggaaatattctttgtctttaccacgttttattgttttttttaatatgattttgataaattttctaatgtatttcgtatttttgaaccttaaaattatgtaattttcgattttttctccaattttaattggtagggctgctaattttaggtaaatacctaaaatttttgcacacttaatacacgtagataggcgcgaaaaacgagtttttagcttggtttggagcttctacacccacttttataatacttatttttacctatttcgggatttttctacctattacctaggtacctatttttatacctatttcggcatttttgttacctattttaaggattttcaaaaaattcttaacaaaaatgcaataaa

SEQ ID NO: 83211 - DNA, 285 bp, Heterodera glycines
atgccaaatcaaccaaagccgttttgggcttctagtgcagaagcaagacgaaagcggaaggaatggcgccaggagcacggttgcagggttggttcaacaccaaaaagtgagaaaattgattaaattaattttattaaaacactgcatttttcagtgccaaagcagaccgaagccgcgccaacagcagatggagaggggacatcgacccaagccgccgaaagtaagccgtcaacgtcagctcaggaccttcgtaagtcaacaaatggatgtcatattcgtgattag

SEQ ID NO: 83212 - DNA, 1285 bp, Heterodera glycines
tggtatttggggtcgctgatcatgaatccagcatctatttcgatcaattcggaattccggacccgaactcgaacaaaaagtcgaaaattcaaacgttcgaattttatatttttggttcaaattttgtttgaatacacggaaacgaagtggaaagtcatcattagggctgggatttttatgttttaacatattttttttttgcagcttagttatggcgagagaagcccaaaaatagcattttctccgaacaatttttgatttagagcgagttataaaaacataaaaacacatattttggcgttttggcacataaaaacatatggcacatatttcggggttttggcacatattttggcatttttgagaaaaatcgtaaaaaaaatacaagaaaatctgaaaatgcaccctaaaaattgactactttacgtttcttaagcatttagaaaatttctttatatatttaaatgcctaaagcagccaaatcaaacgctgtgttaaatcgtcactggatttcaaagttcccggaaggaacttattcaactgatggaaaaattaatccgggactttacaaattgattgatatcgccaaaattttgattggaggtcgggcgaaaattgataaagactgatattaaatatgattttttttttgcgtaaatacacttggtttttccaatttttagcacatatttttgcattttttaacacatatttaggcctttttttggtttttagcacatattttgggtttttttagcacatattttattacatatttcaggatttttagcacataaaaatcccagccctagtcatcattgattcaataaaagatcaaactattttcagaacaaaaatatgaaatttgaaaaatttaaatttcgacttttttttgattttgggtccgggtttcggaattgatcgaaatggatgtcatattcgtgattagcaaccccgaatatccttggaaacacgtttttcctttaaaaatataaaaaaatttctatggggtgtaaactgtacaagtgcccaaagtcatagacaaaatcatatattttgcaaaatctaagctcagattcgtaatcagcgcattttttagcctagaaaatctggggttatgaatattcttgattttgccactagccttccaatatatattaatgaatacattttagggtgctcgggtactcaaagtttgagaaggtcaatccggagatgaaagactatatcgacgaagtcagtgctgaggatgaaagtgaagaggaggagagagatgatgctgaga

SEQ ID NO: 83213 - DNA, 733 bp, Heterodera glycines
atgagaacaaataagggaacagaaaagagaatggcctcaaagcgaaggaaacggaaggaatcgtcgccaacagcggaaaaaggggccatttcaggttcaccatttaccactcatttaatatttatttgaccaattctgacattttaatcaattcatcaaaacaaaaccatccgattccgagccttaaaatcatgtgaaatatgagaaaaataaacaaaaaaatcagagttcccaagtttttgtctttcaaaataaggacaaacgaggctaaaactaagattttgaccccaaaaataagatttttttctacaactaatagtagcgcgaaggaaacgcaataaaatacatgaaaaccgacataaaacaacattttttagcgtgaaacaattgaatttttttttccgcagaccatttttctcattttgccgcatatgcacttttttgcgtcgcttttttccaaaattgttaacagattttgcccaaaaattatacaaattttgtgacttagcaaaaaaatttcagataattgtaaaattgtgactgttctttaaggcattttgggcaattacattatttgttaacagattttcaccaaaaattaccaattcttatgattttgagccaattttttaaaaagaagtttttggggctcggcggtgctcgataggcgccgcccgcgggaaaaaattttgaaaattgggagttttggtagcatttatatcagcgaaataaa

SEQ ID NO: 83214 - DNA, 1114 bp, Heterodera glycines
ttggatttgtagcgacgtgtggatggatattctcccatcttttgaccatgctcaacttggactcaaaatggcattgctttccgaccgtttcgatgttttggtggacaaacattttgatggaaaagcaacggaattgacattttggagaattatcagaattggaaaggaaaatggaccaaatgcaaacgataatggaccaaaaccgaaactgtctgtactgatcgatgacaaatgggtggcatttccattgccggaccattcgctggctttatatagagtaatttgaactttggatatattaaagcattttaataatttgtgatgatggaccaaatgcaactgctgaccaagtgttgtcaaaatggttgcacacaccgggaaaagatggccaaccgaagcgattgtttcgcaataattattttggtccactgaatctcgaatgggtcaacgacttcaaagaggtggtccgttccgccatattttgttttatcaattttttgtttagacatttctccgttccatcacttctgtcagttacacaattcgatttcatttattttcgaacacaatgccaattgagccatttgaattggtgaacaaacggactaatgagaagctgacattgatgaaggatgaaaatgacgatggaaaattcaaggattggctgttgaagcggtgcccaattattggggagacgatggcggttcagcatgaccaaaatttggaccattcaaacagattcttcagtctttgtggtgccattgggtaagcagaaaggaggccttatttttgtataaagcacagacggacaaggacagtatcccctgtacagtactttctcagaatcttcatggcaggccggcaggggttccaattaaaacgggacttaagtccttgtcttgtccctcccgttctggtccatctcggaaaccctggtcctctctggttcgagtttttttcttcaaatttcgagctctactttcacaaaaagtgttctcatccaattcaaattttggcttaatttaggccgatgtctctaccaccaacagatcaaagcgatgaaaaagtgttctcgactcccgggccaagtgatcagcagaagaaggaaaagtga

SEQ ID NO: 83215 - DNA, 1173 bp, Heterodera glycines
atgatcaatcattaccagcagtttgtgaagaatatgcgatttcttcgacaaccgttggatgaactgctgaaacaggatgtttcgtgggtctggtcaacggactgtcaaaatgccttcaacaaaatgatcgaagtgctgaagtcggaccaactcttgacccattacgacccggaaaaggacatcattgtatctgccgatgcctctaattatggaatcggagcagtgatctcccatcgttttccggatggcagcttgaaagcaattgcacatgcttcttgctctttgtcgcctgccgaaatgaactactcccaaatcgaaaaagagggattagctcttgtctttgcagttcagaagttccacaaatatcttttcggaagacacttcgtcctgcaaaccgaccataagccattgttgaccatttttggtaacaaaaagggcattaaagcgtgtacagcaaatcgcttacagcgctgggcactcatacttttggcgtatgattttgagatcgaataccaaaacactgccgattttggtcaagccgatgctctttcgcgcttaattgcaaaagcgccagtgcccgaagatgaatttattgtggcaacaataacggaaagccctaatttggcaactgtgaatgcctttacggcacaatttccaattgtccacgaggacattgtcaatgccactaaagccgataatttgcttcaggaagtgaagggattcatcatgaaccaatggccaaacaaaatggatatgtcagatgacattttacaattccatcgaaggcgagaagcgctgtcattcgaaaacggatgcatcatgtacgccgaccggattgtcgtccctgcatcgctgcagacggaagtgcttaaaatgctacatcgtggacacccgggcatgaagcgcatgaaaagcctcgcccgccagcatgtttactggccaggaattgaccaacaaatcgaagaagtgttgagaaaatgtgagccgtgtgtcaccgaagcgaaggcgccaaagaaaacggagctacattcttggccaaaagccgaagggccatggaaacgtgtcctcatggactacgccggtcccttctttggaaagatgtatctgatcatcgtcgacgcacactccaaatggccggaagtgttcgaaatgcgttgttgttgttgttattag

SEQ ID NO: 83216 - DNA, 1605 bp, Heterodera glycines
atggccacgcgaaaacggccctcacgcgaaaacggccacgcgaaaacgaccccgaccgtggaatgggtcgaagcgggtcagttccgtcttcaaaagtcatgaaaacatgttttagggtgattttcggttttcgggccctagaagccctacaaagcgctttgaaatcaattaaaaattgcaatgatcagtgatcactgactgatcaggtttttttgaattatcgccccaaaatatcgctatttggcattatgagtcattgtctaacactgacactgggtttgacgttttactcagttataccaacctaaccttttaaaaagtacgaattagaaaatgaaataggaaaatttatcatacctaatactaacaccaaaatttcttattaatttttaaaaattctcaatagtgtcgaatttactcactgtcgaaatggtccagtgtcgaaaatgcaggaaaacagtgaaagtttttgaaatagttcagtgtcgaaatttctctatgtcgaaaacgtagtgtcgaaattacttagtgtcgaaaatactcagtgtcgaatttacccagtgtcgaaattaccagccaccgttgaaaattcctcacttagttgtaattgataatatttattaacgcggactaaatttttttatcgttatttatttaatgaaaattatgtaaatagcacatatttgttttgaattggttaaattttttagaattttagattgttatttatataaaatatatttgtatcttttaactaacttgataatttaaggattagtgtaaaattagcaaaacgaaggcaagtgattgcacatgttcatgcataatatgagtttcattatgtattttgtatttatttcggctattttcttaattagtttctaatttataaacattttttaaagttataagggatttagttatttatatttcatatgtttgtacaattaattttttagattattttgttcagttcgacagggaaaatcttttttgtataaaagaattgtttttaatttcaataatattttacaaacatttttaaaaataaaaatcagcacaagtttttcaatttttttactgtttcttgaaatttaactttttaaatctttttttttaaattttttatagtttctcttaaccagctgtaatttaaaccaatttttattatatattagattctttagtgtatttagagaaattacttataaaataggtttcttagttatctttaaaatgcaattcttttattgcagagctttttataattttttttaaacataaacgattaaaaaaattgtgcgtaagattaaattgattgatattattccttcgaaattaattcagagcttgacattctattagtccgatatcaaaatttcgtttttattttaagaaaatatcaatttcatgtttttcgatttaattttcttattgaattttagaaatacttcttcacttttaacacctctttttgcagtattgatggcttataatttgtttccgtgtaaccacagtcacaactgtttgattgttgtgggcacggatgatttctaatattggcctatttaagagaattataaaaattaacattcaaacaataaa

SEQ ID NO: 83217 - DNA, 1148 bp, Heterodera glycines
atgggctcccggacaatccgtccagtggacaatccgtcagtggtcaatccgtcagtaatggacaatccgtcagtggataatccgtcagtggtcaatccgttggacaatccgtcagtggataatccgtcagtggataattccataagcaaatttatttttaaaacacccggattaattaaaatcgtgtgaaaaataatttattttgctaaaaatatgaattaatagttctgttattttataaaattataaaataatcatttttaaaagaattaaatgataatttctcgaaaaagtaaattaattaaagtataaaacaactagaaatgttaggaatttcataaaaaattatatttattaaatttaacaataatttttgcaaatttttgatctttgctcaaaaaaaatttgctgatgaattgcccaactgacggattgtccattactgacggaaaaaatttaattaaatttcaaaaatattatggacaaaaaacttaaaaaaaaatcggttttccgaatgcgcccaactgttggcgcccaatcgacccccaccgcggaattggccgaaatggatgccggattcatgatcaacgaccccaaaacccctgtaaacttgtttttatgacaaaaaaaaattagtattcagtgacccagcaaaccttaaaatactcatttttcaagttttgataagatttaaattttcgatatttcgtggttttttactcttatggacttttcgtggcttggacattttgttggtaatttattcctcattattatttcttataaataacaatagttgatccgagttgtaattttagccttagacaaagggccacagtggcaaaaaaccttgacccaaaatgattgggctaaaacggtaaggtttaaacaataattaaagttgccattggcccattaatggcggtccgttagtgtcttttgaattttgcttatgcatttgaagttccattgcaatgcaattcaattttttaatttctcagttgttttaaaatggtcttttattctatttataaattcagattattttgcctgcagcaaaatggggtattgcgctccatgccgtcgtgtttctggcgttgatggttcaccagcgacctttcgctgttgaagtgctcagtacattgcac

SEQ ID NO: 83218 - DNA, 753 bp, Heterodera glycines
atgtctttgaataccttcattttcgccgaatgcgtcaattggccccgtattctcaacgagtgtccatctctccgttttttcaatattattagcgacattttccccgaatttccgcctgatgacaatgccaatgcgacggatggtcaagcggtggttaaaaacagtggaaccaaatttacatttccattggaaataacggaaccgacgatatttttgattcctaatcattcaaatttgaacaaatttcgatttatttttcttttccaatcttatagaagtaaaaacatatgctccgttgcaaaattataaggcacctcaatttttcgttagtttgacgattttcagtaaactgatcgagcttaaattttaactacgcatacctttccaataatttttcgtaaccataaaaagcaagtagaatatgtaaaaaaaatgtttgttttttttactattttcgaaaatggcaacaaattggcgttgcaaaattgtaaggcactatctacaacttttatgtgaaaccacctaatttttttttctgtaattaataatatttaaggggaatgatattggtaaaatttcagctcaattattttatgaaacgtactcaaactcacgaaaaattgaggtgccttatacataattttacaacggagtatatgtatatgaaaatgacttatccataagaaaaattctaatggattttttgattccgttttaagggaattcaagggcagtgattttctcaaaaataaa

SEQ ID NO: 83219 - DNA, 688 bp, Heterodera glycines
atggctgagaaaagtgatgacattgcggtcgaagtaactaaaataggaaaaagtgatcaaaaaaaaatttcaatgtgtctccattcttacgtgatcaaaatttctttgaatccgatgactttgttgggcacacggattttgtgggattggcaaacgcttccaattgacattgacaatttccatttcattggtgccattccatcgttgcgattccaaggccaagctgagaaggcggaagtaaggcgaacacttcgagccaacaataggcggagatgaagctgaaaaggaatttccgattttattaattttattatttatttattttttacatttcttttttgtttaggcgtcgtcgttttttgacgtggtcccaaaagaaccaaagaatggtgccacagccgaccaacagaagagacacaacgtaccaactgaaaatgaatttggggaaatgaatgaataataaaaaggcaaagaaaaggccaaagtcaggaaagtccaaatgagaaaattttttaaatttcattttgaggttttagtggggctgacctatggggtaatttttctcaaatgattttttgaacttttttaaaagattttatagagtagtgatacgatgtaaaaaggaaaacgtacggaattctcgaagacattacggcaacaaaatgaacggagggaaaattataagcga

SEQ ID NO: 83220 - DNA, 146 bp, Heterodera glycines; identical to SEQ ID NO: 56264

SEQ ID NO: 83221 - DNA, 146 bp, Heterodera glycines; identical to SEQ ID NO: 56264

SEQ ID NO: 83222 - DNA, 146 bp, Heterodera glycines; identical to SEQ ID NO: 56264

SEQ ID NO: 83223 - DNA, 146 bp, Heterodera glycines; identical to SEQ ID NO: 56264

SEQ ID NO: 83224 - DNA, 561 bp, Heterodera glycines
ggccaattgtggactgatttggtgagagcgaagcgccaacttgttccttcggcggcaggaagcattgtcaattacggcataaatgggcaaagaaagcggcgtcaggcggagccgcgctgcgattgcattagcaccggtaattgggcgtatttttttacgtgatcacttgttttacaaccaacacgccaatttagcactttgccccgcgggaccgcccggccccccgggcattccgggcgcggatggcgagcctgggagagcgggcgaagcaggcaccgtcggactgcccggaccattaccgcaaattcaaaaaactgttgacgcggagtcttgccgagtgtgcccgccagggcctcccgggcagcctggatatacgggaccacctgggccaccgggagcagttgtaaggacaagctatgattggttattggagaaattatctttttagggcccatctggagagaggggcgttttcggaatgccaggaaatcccggagccatgggacagcccggcgattcgggcaatccgggagaagccgggcaagaggtacaagcgacaac

SEQ ID NO: 83225 - DNA, 793 bp, Heterodera glycines
atgttagtaagctttctctcctcagttttgtacattggtttttctttcagttcactgttcgtgccgagtatcatttttatttcgtggatgagcagggcattgccaaattcagcaacgtgaacactggtgatttcaaagtgaagccatccaaaggctcacactcttggggactgcgcaacattccgcgcacaaaggtgaagagttgcattcgtcccgacttgtcgctgcacatcgtctgccaaatcgaactggtccccgacttcagcaaagtgcaatctcagtgctttcgcaaccgccgttacgatcagtcgcaggtttttaaaatttcattaaattaattcatactttcctttatgtacagttgaccaaggaatatttggaccgcatccaccaaatgtttctgtcgggagagggctcggattgtgtcatcgaatgcggaaatgagcagttccatgtgcacaaatttgtgttgatgacacattccgaagtgtttcgcgctatgttcagtcataaggagacgatggaaagtgtcgagtcgcgcgttcggatcaccgattgtacgcctattgccgtgcatcagatgcttacttacatgtgagtgattggtgatcaatgacgaacttgcagatcagcttattcaatgacgtttattgaaggtattctggtggattgcccgacaaatttgacaacgatcacgcccaggggctcattgaaatctcagagaaatacggacttgagccactcaagattatttgtcaggacaaacttatttctcggtaagtattaaaaacaa

SEQ ID NO: 83226 - DNA, 589 bp, Heterodera glycines
atggtgatgtgccttctctcctacggtgccggcctcgacggcaggcggacacataaaatgacggcactacattttgcggtgtccaagcgaaacttgcagttcacacgcttgctgctctgcatgggcgccgacccgaacttggccaatgcgcacggggacacgccacggcatttggccgccaaattgaacgagtaaatttttttgggtggtggttaaatttacattattcttcgcccaaaaataggaccccaaattccaactctcgtttttatccgcttaaatatgtcaaaattttcagggttgatttgctgaaaagtctgatcaaatgcggtgctcggcgttgtccactcaccaaggtacaaacacaaaaatgttgcactattagtaaaaaaaaaaatttctgccttccaaaattcttttcatgatttaaaattggataaacacatccatatctaacgttttacgaatccacaaatacgcttttttgtattacaaaaatccgtttttccccccgtattttaggttggctgtgtatccggttgtgtcaacgagaaatagacaatactcaaagaatgagaagaagaagaaa

SEQ ID NO: 83227 - DNA, 879 bp, Heterodera glycines
atggctaatgctgattcgccgatactaatttctgatgaggaactaagcgacgacgaaatacatttgagaaaattactattgtcggaacaacagcaacaacaactacgtgagcaacaattcaatcccgatcggccctactcgtcgacagtgcattccctgcccatcaaccaggtccaaattgtgaccccagcacaaggacaacagctaaagcgtgaccaacagctagccctgattaatcagaaaataaaagagatggaagccgcaaaaagacaaattgaagaagaagaaactgccgaagaagaagcacgaattttaagagaaaaggcatggaaagcggaagaacagaagaaaaggacaaagagggaattggatgaaaaggtgaagaaaagggaagaagaaaagaaagcggaagaaaaggcaaaaaaagacaaggaggaggtcaaagcggcatttaagaaaattggaatgagtaccgaagtggggggaaaagaagatgaaaacaaaccaaaaaagaaaaaatcgaagaacaacaaaggaaaggacacggaaaatggaaatttgaaggccgaaaaactcaatgatggacatagggaagctaagaaagatgcagaagaaaaggcgacgagagaagcagaagcgaagaaagatgcagaagaaaaggcaagagagaagcagaagcgaagaaagatgcagaagaaaaggcgagagaagcagaagcgaagaaggatgcagaagaaaaggcgagagaagcagaagcgaagaaggatgcagaagaaaaggcgaggagagaagcagaagcaaagaaagatgcagaagaaaaggcgagagaagcagaagcgaagaaagatgcagaagaaaaggcgagagaagcagaagtga

SEQ ID NO: 83228 - DNA, 525 bp, Heterodera glycines
atggagacaattagcgaaaaatggacacccaaaattgtgggaagcatttttgacccgcgaggtgaagaattgggggacgattggacgatcaaaaagtgccaagaaaaccgggaaaaagaggaccgactgagagagggaaaaagcgaagagcgaatgaaggcgtggaaggaatggacgcagccaaaaaatcaatgggaaagtggtggcacggcacaaggagggaaaagattttttgagaacacgctgaaatccgcagtgatctcggcgaatgagacacgagccatcccaccggaaggaatgggctggaaacggcatgtaccatgcttccaagcagcgccgcctggccccggcttcaagcgccgacaccacgacgtgagcccaatcagaagaatggacagcacgggacaagggacatcggcggcgagcggaacggaagaaaggatcgtgaaaattcgaaaactgttgctgcaggccgccgacttattgggagaaatggcggacgaattgttcccgtataagaaatag

SEQ ID NO: 83229 - DNA, 574 bp, Heterodera glycines
  unsure (1)..(574): unsure at all n locations
atgtctacagttacgagtgaagatcaaccagcaccagtccagaaacaacagagtcggccggtgccaagcaatcgacagcagcccncaaattcggttgaatatgaccaaccactactagtgaataaacaacagggccgcccggtcccgagcaatcgacagcctcaaaatgggacggcagaagaccacccatcaccagtgaagctgggcaatcgacagaatcaaaatgggacggcagaagatcaaccagaccaaccatcacccgtgaagaaacaacagggtcggtcggtgccaagcaatcgacccccccaaaatgggacggcaaaagacaaaccagaccattcaccaccaatgaagaagcaacagggccggccggtgccgagcattcgacaagcccattatgaggcgactgaagaccaaacacgaccaatgacgaagcaacagagtcgaccgatgccgagcaatcgacaagcccaaaatggcgttgaagaggaccaactactaccagtgaagaagcaacaaggccggtcttttcgcatggcagaagatcaaccagcattcgtcaagaagcaacagg

SEQ ID NO: 83230 - DNA, 94 bp, Heterodera glycines
atgagcttccaacgagcacaactacaaaaggttgctgtgcattgtgaagggacaattagaagttgtagcaacagcagcagcagttcatctgatg

SEQ ID NO: 83231 - DNA, 1158 bp, Heterodera glycines
  unsure (1)..(1158): unsure at all n locations
agaaaccaccttgccaattggcccgcccncatggattccttatcaataaggcaatgatttgccggtcacgtgaattgacgaattcctttgtatcgatgatggcatatgcatggctctatttaatgaaaaagcaaaattatttttcattttaataatttttgtaattaacttttaatttttattgccactattttggtatttataggaatttgctgacaatagaaaaacgcacactttttcaatttatctttttattttatcgttttccccatagattttactaatttttcttcgttttttgtcattattctttttttcttttaaaatgttatgtatgtaaaaagaaaagtttgcaaatgtaaaaaaattttaaaaaatatttcaccccttttccattttggaaaaagttcctgaatttatcataaaaatttagtaaattttaaaaacagtatgatgttatccccattttacaacacataaatatgcgaaagtttccaggaacaacttattttatttttaatcactacatatatacatctttttttgacattttgcaaaaaaaaaatattttgtcagtaaaagcaaatattgcccttcttgagggcaaaaaaaaacaaaaaaaatgtgtctggaaatataaataaaacaaaataaattatataataagttattttttaagattaaaataataaaaagggagaaaaagcttgaaattcaatgatatatttaccaaagatttagaaatggatttttgagctacaaaatattagaagatttttttataatgggcaaagaaattttgtctatttttgttcctgattttcaggcattttccattttcatttctggcactatggaaggtggacggaagtgataatcgatgaccggcttccgtgccgaactgatggccgcttactttatagtcgtccaccggatgagtgattaaattaaattaaattaatttaattatttaatttattttttagtgacgtattttggtctgtgttattagaaaaggcgtatgccaaagtctacggagggtatcaagaacttgtgggtggcaaaatccgggagtgcttgtccgacttgacgggcggaataacggaagaatgggacctaaaagccatgagcataaaccaaaaaagaactctggaattg

SEQ ID NO: 83232 - DNA, 78 bp, Heterodera glycines
atgaatggggatgcaataatgtatgatggaaaatggacaaaagacacagccaggagggggtccacaaaaccccagcat

SEQ ID NO: 83233 - DNA, 798 bp, Heterodera glycines
atgtcatatattatttattcccaatgttatagacaagacctcaacgacagagaagagccattttctgggtgggtatataaaaaataaaattgtgtataaatttatatttcaactttatagcggatttgccctagagtcttggttagtcagtataagtatataattataaaatataaatatatataatataatattataatatatcttctatatatatgtcatataataattaattctaatattataggacaatcgacgacaaatttgacggtggctggtaagtcacatgtttaaaaaaaattatttaaagcactcctaatatttaaggcccaaagaaacttttggcgatttttggaagtgagtttagaatttttttcttaagaaattgagaaattttaaataatttttagtttttatgaagagtttttttatttttaaattttcaaaaaagtttttcgtgttattttggcaaacattttaatgtggtcaaatttttttaaattttaatttttaaaacagattaaatgttaacaaaagatcaaatgtttttgatttgatttgttaaaaaaattaaggcgtgcacatgttcaaaagaaaggaaatgaggaagagaaaaaggaagaaggagaagaggaagagaaaaaggaagaaatagaagaggaagagaataaggaagaaagagaagaggaagagaaaaaggaaagtggttgattaattagagacaaagggtgaggattattttttcaaaaagacaattttaataattttgcataagaaacataatgcttattaaataaa

SEQ ID NO: 83234 - DNA, 795 bp, Heterodera glycines
atgtatattactgacaggcaagggtttgtgccaaatccgctataaagtttgaatataatttatatacattttaattttttttatatacccacccattatcaaattgctcgggttcgctttaaatataaatcattaattattgcttaaatttatttaaagtaaatttactcaattcttgggtttttcacggtgggtgtttcagcgtctgaaaaagagcaagctcttttttttgaagcaatgtttgcctaaaatttgccaaaggtcacttttacaaaataaaatgacagaaaattgaccatttattatttaaagcactcctaatatttaaggcccaaagaaacttttggcgatttttggaagtgagtttagaatttttttcttaagaaattgagaaattttaaataatttttagtttttatgaagagtttttttatttttaaattttcaaaaaagtttttcgtgttattttggcaaacattttaatgtggtcaaatttttttaaattttaatttttaaaacagattaaatgttaacaaaagatcaaatgtttttgatttgatttgttaaaaaaattaaggcgtgcacatgttcaaaagaaaggaaatgaggaagagaaaaaggaagaaggagaagaggaagagaaaaaggaagaaatagaagaggaagagaataaggaagaaagagaagaggaagagaaaaaggaaagtggttgattaattagtgacaaagggtgaggattattttttcaaaaagacaattttaataattttgcataagaaacataatgcttattaa

SEQ ID NO: 83235 - DNA, 1387 bp, Heterodera glycines
atggaagcacttcaccgtatcctacgtgaacatcacaagcttgctgtcgtttacgagtctgccgctgaaacataccgccaactgccgattgaagaacgtgttcatttgcgcatgcttttggtggatacgaataaaataggtgttgagcgaacagttgaagatgacgcagcgcaagcacctgctaatttgcatgctgacgaccgtgcgaatgtcaaacagatacatcctgggcgacttggcacggagactgtggctggtagccgtcttgtggcacaagtacttacattgcgtatacaactattttctgttttaatagtggtgttgtcgatattgacgttcaaataatttcagttttaccttgacgatggctccaatgttataccgccaagcgagtacgacgtcattttcatgggccgggacgcgaccaaagtgaagcacatgaaatggtggaacaggaatatcgatcccgcactctacccgcttctgtttccctacggccaatatggatatggtgaaataatctaagtaaacacctgtattcgtgtttgtatagaatacggaatccaactgaaactggaaaaagacgaacgcttcgacacgacatacaggcagatcagagacaaagacaacaaccttctgagcacagccgatgaccttggcgaagaggaagaatttcttggcgcagaacaagagcagcagttccaccgccgcgatcatgtctcgagatcccaatggtatcgatacatggcgcacatcagggggctcaactacaattggcgcgatggacactggctttgggattggcggactcttgctcaacattacacaattagcttcaacaatagaatggaagctcaaaaatttcagttcatgaagcagcatcaaggacgcagacgcctcattttgccgagcgccatcatcaattggcttaaggcgctccgtgataataaaggcaaaaatgacttcgtcgcaaatgaaatgttttattatttaggatataagggtgatattggccgtgtgtacatgaccgatgagcattttcggggctcgcggcaatagagtatgccaattgcatgacaatatgcagagaagttagcaagccggaccttctggtgacattcacaatggaccctgagagccctgagctcgatctttttagcatcctttaatttttcgccttttagcatctcttcaaaaaattctttatttctcctccttttcggtgccaaataattctggaaaaatggtcaattttctgtcattttattttgtaaaagtgacctttggcaaattttaggcaaacattgcttcaaaaaaaagagcttgctctttttcagacgctgaaacacccaccgtgaaaaacccaagaaagaggaatttactttaa

SEQ ID NO: 83236 - DNA, 1473 bp, Heterodera glycines
atgacgcagcgcaagcacctgctaatttgcatgctgacgaccgtgcgaatgtcaaacagatacatcctgggcgacttggcacggagactgtggctggtagccgtcttgtggcacaagtacttacattgcgtatacaactattttctgttttaatagtggtgttgtcgatattgacgttcaaataatttcagttttaccttgacgatggctccaatgttataccgccaagcgagtacgacgtcattttcatgggccgggacgcgaccaaagtgaagcacatgaaatggtggaacaggaatatcgatcccgcactctacccgcttctgtttccctacggccaatatggatatggtgaaataatctaagtaaacacctgtattcgtgtttttaagaatacggaatccaactgaaactggaaaaagacgaacgcttcgacacgacatacaggcagatcagagacaaagacaacaaccttctgagcacagccgatgaccttggcgaagaggaagaatttcttggcgcagaacaagagcagcagttccaccgccgcgatcatgtctcgagatcccaatggtatcgatacatggcgcacatcagggggctcaactacaattggcgcgatggacactggctttgggattggcggactcttgctcaacattacacaattagcttcaacaatagaatggaagctcaaaaagttcagttcatgaagcagcatcaaggacgcagacgcctcattttgccgagcgccatcatcaattggcttaaggcgctccgtgataataaaggcaaaaatgacttcgtcgcaaatgaaatgttttattatttaggatataagggtgatattggccgtgtgtacatgaccgatgagcattttcggggctcgcggcaatattaccagaaagagtatgccaattgcatgacaatatgcagagaagttggcaagccggaccttctggtgacattcacaatggaccctgagagccctgagctcgatgaatgctgccagtggtgtcaaaggacaaaaggcaacagtggtttgatcggccagatgtggtttgcagacttttcctcgacaaactacgtgaattgcacaacgacctcacgtataaagaagtcatgggacctgttcgtgggtggttctactcattagaacaccaaaaaaggtgtaaacattttctataaatatttgcttaaagtgttaattcaagaggcctcccccatgttcattttgcgctcatcctcgactgggacaggatccgttgcagtggtgtaattacaacgcctgaggattacattgaccaatatatctccgctgaaatacctgagaacccctctgggcggtcgccagaagtggttttaagacgaaaattgtacaacattataacaacaaagaacatccatacctgttccgttcgtcgctgtttagtcgacgggaagtgttcaaagcatttcccagtaagcaattga

SEQ ID NO: 83237 - DNA, 736 bp, Heterodera glycines
atgggactgaaagatgatgaagaagatttgaatgcaatttgtgaagcggcccaagccgaagaagagcgaagagcaagaggcgaagagcgagttacgcagcttacagcgtatttcaccttcaacaaggacaatgctccactcggtctgacttatgccaaatgctacaaaaagttgtggtacgatattgcaaagaagcagtggaagccgtatgtgaacagagttgttccaaaattttgccgactcaagaccgtttcgccaaacaaccgcgaacttctggtgaatattatttaaccaattaacacattatggattataataggctattcggatgctcctattggttgtttgtgacccaactggatgggaagccctgaggacgcacaacaacattgtccacggctctttcattgaggctgctcaggcccggggtctgctcagtgacaataacctgtggatgaacaccgttatggaggcctttcaaacaaaaaagtccatccgccagagaatcagatggctcgctgtgttcttcgcgactacaaacctctcaagtccgacaacaatcttggacagcattttgaaggacgccgacaattggcttgtgaacaccagtgttgcaaaggcttcggctgaagatcagaagcaatatgtcctgcgtgctttggagtggttccttctggcaaatggaatcacgcctgactctgagcccagggaagatggcactttcgagtctgcctga

SEQ ID NO: 83238 - DNA, 1145 bp, Heterodera glycines
atgcactttcttgccatggcttctacgggcattgctgccgaactgttgtacgagggacaaacagtgcacaaacgcatctgcaggatgaagcacgtcgactcttccacgtcacccaacgttgactacgaaagcaacttcgcgcacatgctccgcaacattcatggcatgcttatcgatgagataagcatgcaaaacaaggatgttctggagtttgtggaccgtcttctccgctctgttgcccctgatgaactcaaggaaattccatttgccggaaaggtagtacagtatacagttgcatttattttttgtacctaaaatttaaaggtcgtagtcattggaggcgagtggaaacagttgacgcctgttattcccgggggcgccgaaacttgaggcttctgtcaagaattcgccattgttcgtccactttacaactgtgcgactccgtgcaaaccatagattgttataaaattggagaatccccagcagttgctcggttttcatcgaatttgtcgcgcacatcgctcttttgtgagacaatccgaaaggttgccgaacaaaggcagcccaaaattggagtcataacccaattaattaactaaggcaggcattcgagactgaaggcaaaaggaatatgcaattcgaaaattccctcaaatttcattaacattccattttttctacaatcgacactcgagttacgaaattttttttgtatgattttttaaaatattgatgaaaatgtaaatatgaagcttaaaaataccaggaatatgttagttatgaaagcagagtttgctagttttgcttatttaaaagatttgtgcttatttcagcattatgtgcctattgtgaattgaatatttaaaaaatggccacttttcagtgaaaatctctaaaaattgttaaaattcccaatttttcctacggcggcacttatcggcaccgatgggccacgaaacttattttttcataaaaaattagctcaaaatctcaaaaaatggtcatttttggtgaaaatctgttaacaaattgcattcaatttttcaaaatttttccggcggcgcctatctgtgcaccgctggaccccccccccccccccttccaaaaattttttggaaaaagcgcgccgcaaaaaatggttttga

SEQ ID NO: 83239 - DNA, 1264 bp, Heterodera glycines
atgggccgaaaatttgggcacgaaatgaaaaacgggggacaaaatgaacagatgaacaaaatgggcggaaaacgggaaatttgggggttcatcgttctttggagtcgattcgccaaattggggacggcggcgaaaagttgcggtttgacaaattggtcattaatttgtgcgcggagtgggggaggaacacacaaaaacaattgacaatttgaaggaaaagggggggcagggggatggaacggcgaaaacatgtcgcgcggcgggcgggggattggtgaagggcctcctccctcttaattcgccgatcattgattggcgatcggaattgaaattccgacacttatcattttatattctctgtagaatatattttgtattcgttgtaaatttatagctgcatacatttacctgcaaaatataaaaaagcatgaatgcttgatttttgtcgaataaaaaatgaatatatacttaacattttatattctctgtagaatatattttgtattcgttgtaaatttatagctgcatacatttacatgcaaaatataaaaaagcatgaatgcttgatttttgtcgaataaaaaattactatatacttatcattttatattctctgtagaatatattttgtattcgttgtaaatttatagctgcatacatttacctgcaaaatataaaaaagcatgaatgcttgatttttgtcgaataaaaaattaatatatacttaacattttatattctctgtagaatatattttgtattcgttgtaaatttatagctgcataaatttacctgcaaaatataaaaaaacatgaatgcttgatttttgtcgaataaaaaattaatatatacttatcattttatattctctgtagaatatattttgtattcgttgtaaatttatagctgcatacatttacatgcaaaatataaaaaagcatgaatgcttgatttttgtcgaataaaaaattactatatacttatcattttatattatctgtagaatatattttgtattcgttgtaaatttatagctgcatacattttaccggccagtaccggtaccggtaccgctcaactctacttcttgcgatcggattatccatttttgacgagatggccaccacttgggaggagtcatcagtgaattacttgcattctggcgtttgaccaaatgcacaggtaaaaaagaattatttgatattttaattcattttggtcatttattttatttatgggttttaaacaatagggtaaaattaaa

SEQ ID NO: 83240 - DNA, 1791 bp, Heterodera glycines
atgtctggaccaatacaaaaagggatcatcaatgcactcaaaactctggacaatgccaaaagcgccacctcactccttctacaccccgacccggacctgtcaaactgggaaaatgccatcaacttggaggctcaatttgatcgcgtcgtcaaggaaatccgtacaacggaaatgcagatggacagtctacgagacttatccaacgcttggattgaacttctcgcccgcctgaccggagacgacaaagacaacggcgaaaaagaatacatcaaattcgacaaaaatgagaaaatcgccgaacgatacgacgcagcatcaaccaaacttcgggatttgcgagatctcgaagcaacactcagtgccgcagccaaactgcacagaggcagagccgacagagaagcaaaggcggatcaattggccaatccgcagcaacaaccgcccatgccaccagcaatggcagcaccaatgacaatgccaacattcacagcaccgctctaccaattccagccaattcaactggataaatttttcggccaaaagcgaaaatggcctgaactctacgaatccttcaaatcggcaatcggcagtcaatcaatcagtaaagcgcagaagctgaacttactccgcaatctactgggcggagaagcgcgagaactcatagcgggcttccggctggaagacgcaaactacgagacggtccttcagctgttaaaggacacgtacggagctccggaggaacacatcagaagtcttcacttcgaactggccaatctcaagccgtgccgaagcctccgtgagaccaaagactttctgcttcaacttgagcggcttacaagggagctgaacaatgccggagaggacatcgaaggtcctcaagtgttcctcatgctggaaaagaagctgacgccagcattcctgcgaaacatcctcaacaagaaaggagaagatccgacaaattggacgacaaccaaatttcgggacgtgctaaacgaagccgtccgaaaagaagtccaaatccaagaagtgttgggcgagtacggacaccaccatcaatcactcgatcggccagcaaggccagcgactcaagcacaatcatcgcgaacacgcaatttcgcagcaaatttccggaaccgcaacgcaactcccgccaatcgggaacgcacttttatgtcctcaacaattgaggaggttcataagcgagtgaaccacaacaagccgcaacagcggaagtcccaaccgaagggactaaggccaactcaagcgccttcaactgtgccaatccggaatggcaccgcaaatcaagccgggtcgaggaagccaccctcaccgtgccttttctgtaatggaaatcactggaacgaagattgccagcgatacaacaccgtacagcaacggtcagcctttgttcgagacaaaggcttgtgcttcaagtgcttgaagtcaaaccatcgggccagcgagtgcccaaggccaatcaaatgctacaaatgcaaacagctgcacccggccgtactctgccaagaaggcaccaatgccgcaacgcaaacacaacaagcagcagccgtaatggaacggcacccaaagcaggatgaacagaaatacacaagtcaaacggcacaattaatgagcaatgccgttaaaagcagtgacacccgagctctgctgatgacaacaatggccacaattttcaacccgtcgaggccatgtcatagcatgatgcaaccatcttcattgacccgggaagccaccggtcattcatttcaaacacggcagccaagtaacttgaactga

SEQ ID NO: 83241 - DNA, 288 bp, Heterodera glycines
atggccacaattttcaacccgtcgaggccatgccatagcatgatggcaaccatcttcattgatccgggaagccaccggtcattcaattcaaacacggcagccaaacaacttgaactgaccgtgctcagaacggaagaatgcttccttacgagctttggagaacgcgaaccaaagcgttacgtcagcgaccgagtcgcaatcggcttttcatgtcccaacggggaccgactcattttcaacttgaacgcactcaagtttctgctcaacaatttgcctgtcctacaatga

SEQ ID NO: 83242 - DNA, 906 bp, Heterodera glycines
atggacgactcttcaacgctaatcgaccgtgatgaagtgatgaaaaatttcaaggaaaacttgtcgttcgtcaacaacaaatatcaaatcgcattaccatggaacgacagagtggcacaattgccaacgaattaccatcaagcaaaggcaaggctcataagcctcatcagaaagcttcggacaataaacttggtcgacgaataccaagcaattctggatgaacaacagcagaattccatcatcgaactggtcaattctgatcattcttgtggtccagtccactacctgccacacagggcagtcatccgaaccgataaatccacaaccaaaatccgcatcgtgatggatgcctctgcaaaacccaaatccactccgtcagcaccatcactcaacgaatgcctgcacacaggcccgctacttttgaaggacctgaccggcattctccttcggttcagacgcatggaaaaagtcatccttgccgacattgaaaaggcatttctgcaattgggcgtcagagaacaagatcgcgatgccactcgattcctttggcttgctaacccaaaggaagcaaatctcgaacagctgagacaagaagacttccgcatcttccgattttgccgagtcagtttcggattaaccgtgtcgccatttctgctcaatgccacgatcagggaacacctggcacttcacgacacggatgttgcacaacgcatcagtgacaatctttatgtggacaacatcatgatggaagtcaaaccaagtgaaagcatcaatcaactggtcacggaagcaaaaatcatttttaaatccgccggaatgcggatccgcgaatttttcggaagtcaaatcgacgaactcaaagagcttgactcatccgaattggccaaagacctcgaaaacacaagg

SEQ ID NO: 83243 - DNA, 1912 bp, Heterodera glycines
atgcattcatcagggaccaatgggttggcacttacaattgagcaaccgttcgatgtacacgagagtaatgatggcacactccgcggtcagttgggcggcgtggaaaagtgtgcggatgaagcggtaaatttgtcggtgttcagctaagttgaagataatcagcagaacaatgatgcgcttgattatgttaaaataacttacgatcccgtgtgaaattttcagccgccacgggttcattctgaaaaatgccctccttattaaaatgtttattacccacaatgattatgagaaacggaagcaaatataacttttaggatcaaattcaacaactttcgactcaatttctatcagttaatgatagaaacccaaagagtcaaaattttaattttattaaaagaaaaattttctgagatgtaattttaagataatcacttctcattgtcagttaattttgttgcaaatgcccaccgttatcggatgcaaccgttcctcaaaaatttccatgagccgttctttcccgcgattctttctgttgattatgtgataaaacactgccaacgacacacaaatgattgtgttcttcagatggggctgtgaaatggtcgaatcgtccaaataaatggtcgaacaactgttcgatttcttcaacgtcaccggcgcatgcaaattgttaaggtccaaaacgtaaaatgaacggcgattgtcgcgcactgaatgaaacaaattaaaatcaaataacaaaatttttagaccaaaaacccattatttttagaaatgcttctaaatttcttagcaaaatgaaatgcatttcaaaaaaagtgacaaccaaagctcactcaacagaatcgaaagaaagtataaaacgcacatttcaattcgcttctgcttcgctcaacaaaagtcggacgcaccgacggatgggtggacggatcctgctcagtgtctgaagaaaacaaatatatgaaaagagagaaaaggccaaccgtcggggatttcgcgttcactaatgtgcggcaaaaaattgacggaagaatcgcggccattgaaaaagtgattggactaaaccggaaaaaggaagttttcctgaataagggctttaaatcatcaaaattaacgatacaataatcgaatttgaattgatttgatttttggagtgtttgttcacttgccgtgtgattttcctgcgatttctttttggaaatgctcggcgtatgccttacacagcaattgttgttgcccattcgcctcacatacaaattaaatgaattaatttatgtacatcaacagaaacagacaaaaataaatatatgaaataaaatttttctttgctaaaattaaaatcatttgcagaaaaataaaccgaaaatgaaaattttttcaaatccgtccaactcaaacgatggaaacgaatgggaaaatcatttcattatgcgatttccacccgaaattgctacaaaagtacgccaatttgtggagagagacggccatcagaccagcaatgaccgactcggcataaactttgacaacaatttgaggacgggaacgattcagtttgagcacgacacaatgcgttttacactgtacgatttgccctgcgtaattgaggtggacaaaatcataaaaatttgttcatttctaattaatcttgttttttattattttcagataatgaagacattggacaacaaaactgtctacaaaattgccgatctctgtcaaatgattgttgccaatgcgccaaaatatgagtcgaaaaaggaaggcgtcgaagaaggcgcagaatcaaagtccgatcgcttccaatggccggatgggatttgtccgccgttgaaaaatgtgcggaggaaaaggtttcggaagatcaagaagaaaaagtacatggatgttgcggacgtggagcgggagttgaagc

SEQ ID NO: 83244 - DNA, 2719 bp, Heterodera glycines
atgggcaacaacaattgctgtgtaaggcatacgccgagcatttccaaaaagaaatcgcaggaaaatcacacggcaagtgaacaaacactccaaaaatcaaatcaattcaaattcgattattgtatcgttaattttgatgatttaaagcccttattcaggaaaacttcctttttccggtttagtccaatcactttttcaatggccgcgattcttccgtcaattttttgccgcacattagtgaacgcgaaatccccgacggttggccttttctctcttttcatatatttgttttcttcagacactgagcaggatccgtccacccatccgtcggtgcgtccgacttttgttgagcgaagcagaagcgaattgaaatgtgcgttttatactttctttcgattctgttgagtgagctttggttgtcactttttttgaaatgcatttcattttgctaagaaatttagaagcatttctaaaaataatgggtttttggtctaaaaattttgttatttgattttaatttgtttcattcagtgcgcgacaatcgccgttcattttacgttttggaccttaacaatttgcatgcgccggtgacgttgaagaaatcgaacagttgttcgaccatttatttggacgattcgaccatttcacagccccatctgaagaacacaatcatttgtgtgtcgttggcagtgttttatcacataatcaacagaaagaatcgcgggaaagaacggctcatggaaatttttgaggaacggttgcatccgataacggtgggcatttgcaacaaaattaactgacaatgagaagtgattatcttaaaattacatctcagaaaatttttcttttaataaaattaaaattttgactctttgggtttctatcattaactgatagaaattgagtcgaaagttgttgaatttgatcctaaaagttatatttgcttccgtttctcataatcattgtgggtaataaacattttaataaggagggcatttttcagaatgaacccgtggcggctgaaaatttcacacgggatcgtaagttattttaacataatcaagcgcatcattgttctgctgattatcttcaacttagctgaacaccgacaaatttaccgcttcatccgcacacttttccacgccgcccaactgaccgcggagtgtgccatcattactctcgtgtacatcgaacggttgctcaattgtaagtgccaacccattggtccctgatgaatgcatttctgaattggagatgccgaaattgacttgtgcccgtccaattggcgtcgcattgtgctcggtgccattatgttagcctcgaaagtgtgggacgaccaggcggtgtggaacgtggactactgccaaattctgcaagacacaaatgtggacgacatgtgattcttcttgcagtttcattgtaatttttcccaccattacttttcaggaacgaactcgaacggcagtttttggagtcgttggagttcaacataaacgtgccaagttccatctacgccaaatattactacgaccttcggaccctcgccatcgccaatgacattcagttgcctttacagcctttgtacaaagaaagagccgcgcggttggaggcactaagccgaaactacgaggacaaagtggcggtgaactcgcagaaaatgaccaaaagtgtttctgcggaacgattgagagaacatcggtcaccggcgataatcccatgaaaaggggacaaagcttttgtaaatgaatgaatggaacgacttaagaaaggggaagcgaacctcacttcggaagtgctctctctctctgctgatcttgcgacaattcccaaaatgtcttatttgtattaatttgccacttaatttgcaattccttttaattaccatagtaatagcgaagtcatcaaacgctttttccaagagattttcataccaatttggacagtcatttcgccttaaatttctaaaataacatttgatttgatttctttgttattattgcacctcctttcttttatattgctttcataaccattaaattttgctttactttgaatcactcttcagtcctatccgatgttttttctcggtttttcttttttagttcggttttcattttctttgctttaacagccattcttttcgcgcaaaatgtgttcgcatgggcacggcggagcagggggagggccctgttcagcagcggtcgaatcatttgagcagcaccaggagggcatgcagtacaccatggagagggtgagcacaaaatgagggcatggaagggaaaacccaagcaaaatcggcattttgagtttatcaacaaagaacgcattgttgtgctgaacgaatcgatcgacggatcgggcaaaaaagtgttcaaaagatgggacgagcgaatggaaaagtgcgtttggccaacagacaaaaataataattcattttccagagaaaattttgtcgagtcggacgttgacgaggaactgctcttttctgtgccattcacaggtgggaaggtgcgttttcacggtcccacaattccctcccctttaggcaatgtcaaattgagcggcctttgcttcagcggtcgaatggatggtccgtcatccctacgattttttccgttttatttcccaccccaggaagttttccggcccgagtacgaattttcaaggatcgcgttaacgtatcattttcaaaccccccctcgctcgcagagggccagcg

SEQ ID NO: 83245 - DNA, 4514 bp, Heterodera glycines
taaaaaactaattttagttctttcaaagaaaatgcagacaaatttatgtttactaaaactggaagatatgtgcgtttaggacttcttgctgcaactgtttgtggtgaacgcattacaatttaatctcaaaatattgccattccaatttgaaaaaatttcaattttaaaattaattagttttttaatttctctgtctttcatcggtctcttactttttcagcttatcccgtcattaaagtgtgcagctcgggcccgttgctcagcacgtcgttcaaatggcgggttaaaattgacacggagtgaatttttttccaatttttgcgttggattattcttaacaaattgtcgacgttatgaatgtctttagattgcctgaacatttggagaaaacgataaacgaagtgagtgaattttcaaataaacgccaaaaaatttaatttttcgtttttcagcaaacgttcctttggctggaaaaagttggaaagattcagagcgacactcactgcacattctcttgtctaaaagatgcttcgggtgattattttttactttgttcatttttccgttatttccgtgaaacttttttggaaatagcggaaaacggaaggattttaattaaataatgaacgtttctttctccgttctttatttctatcccttcgcctcccctttttttacattttatccctcagaaaactaaaaaccgtgttttttttatttggaacaacacaatacttttcatggtccctttaatttatatctattttaaaatgttctcaatttcgttttcccctcccttccctaagcttcgcttgactccataagccttggcacttcgagcttttcgaccggcgcacaaatcgctcttccattttacgtaaaattcagaacggcagacgaagcaaaggcttacgcaaaggaacactttgaggtatcgccgccacactcaaaaattggcaaaaagtgtccactcccccaaaagaatacaaaagccgaagctgtcttcaatttgtttttaaataatattgagtcccttttaaccgtccgttgcattaatggcttgcaattagcccatttagcccttcaaagtgttgggcaaagtcgcatgcgtcgtttgggagtcgcgtgtcggtcgtcagcttttgtccacctttgtgctgtctgacgaagtgtgtggttggcattccaaatgcttttattccttttcatttttggcattttttcctttaggccctcgcctttttggtggcccgcgaccttttcagtgtcaaagagacttatatgctgacccgggacgcgctcacttggttttgctatgtgattccttccttccctttcaagggcgtagccacaagacccttggctttgggggggggctgaagtcaaaaattcgattttttaggagtgtatttttcctttttcattcgatttttaggagtgtgttttttttgtttgggaaatcccgaattaggagggtgtattttacaaaaaatttagccgtttttcattactattttttgccgtttggtctccatttttcagaaatatgggtccggggtgccgttagacgttgccggaaaatttattgagaatttaatgcaatttgttaagaaaattcttgaaatttttaattttttgaattttcaagggagggaagggctttagccccctcagccccccctggctacgccctttttccctttgcttttccttcgcttattttcctccctcagactctctgttacatgagttgcttttacgttctgcacgccaccgtcttcaaaggctctttcctctcatttgtgctcgtttatccgctcctcgccgcgctttccgtgctcaccgccaaacaatggaatgaccttgcgacgtttgtccgtcccccaataaacgcatccattttttgttatattttcagttatgccaatgaaagacaagcggatatggaggcggcgaaaatgtcgcaattgcacacgcgagggggacgcgagttttacagcaaatttctgctgaggaataggtcaaacaatgttttatttcttcaatgtttgttgcttttctccgtaggttactgcgtgaattggtcgacggaggtgacaaattgttcactgaggtgggcgactaccgaaaagcaattgcggaatatgtgctacggtacgacgacattggtacggtgcggagtgaaaatgaacaattgtcgattagcatggagggggacgacattcccgagggactctgaccaatgttttagtttttgtatttctttcaatgtcttattcaaactcttttcttttttgttttgctaaacatagtggttttttatttgtttttctttgttcactgattgcttttttgcattggtatacttttttttattagttttccatttatttattttgccttttttgtaattttttttccattttatcactttttcgttccctcttccatttttaaacatccttctcttttgcttatgtgatgggtgttgccctcggtctttcttcgtgtgtcgtttcgtccttttgttttggctcaatgtacgtggtacgttttgtctgtttatcatcgacggcactttcattttcacggcttttaggctgtacgcaaaagcggcgatccacgggatggaatgttcgtccaatgggtggtcagtttcaatttaaaatgtaaaattcgaaacacggggcgccacttgatttggcattccgttttgttttcccttttctgttaggtttgttccgccatctttttggttggacttcgtacgtttccgttttgtctttttcattttgcttcttttccttcagtgactttccttttcaccggatgtccgccttttcagcactttgcgatgtttggcggtgcgctttgggcactcggtgatttttgtcgtttttctttaatttgtttattgggatcaagtcttatttttacctcattgtaaggcaatttgactgccgtccccattataaatgccattggactcggaatgggcattctgatttggggggtgtgcggctgtgtggtcgggtgggccattggtcgcttcggactattcggggtcactgtttcaagtcacttaccatgcacaacaaatgtacggtccatctttccaacaggtgaatccgaatgtgccgaattcgccgattcttaactatgccggactggttttcgtcattatcgggtgcgtcgacacgacaaattacttaaaaaattgtttgtattttcaacatttaaggggcattctttttgcgctcgttcgcccaaaagacaacaaaaataatgccaaaaatgacgacgaaatgcccaacgaattaatggggcagcaaacgacgacggagagcggggcaatgaccgaagaacggattgggttggtggagacggacaaagacggggacggaacacagagaatggcggcggatgggacggacgaaggcaatggacaacgaaaatcggcagaaaaagttgcaacggaaaatggggcaaaatgtatggacagcaatcttcaaaagcgaattttgtgcgtttgaattaggccccaattggccatgggagattaattgtcagtaataaatgcaaaattttgtaatttttttgattgccatttaacttttgctatttttcagtgctatttgctctgctgtctttgccggcatttgttatggagcaatgtgatttttttgtaacggtaaattgtaaattttattctttttacaatttaaggttcactcccgtcatttacatgcaggacaagtgaatattcgcataaaacatttttggataattattttgtttccaaatgcgacaatttctcgtttcaagttcagaactgtttgataacccaccaaaggatgccattctctacgtgttctcccatttctccggcgtttacctcacttccaccaccgtcttgctcatttacatttgtttcacaaagaacagaccgtacatggacaatagacttattttcccggcacttttggccggtgttttctgggccattgccatgttggcttggtgagtcggaggacaagtgcaaatggtcaagggaacgcagaagttttactgtttttaggttcgttgcgaatgaccaactctctcaagccattgtgagtttttggcttaactgggactgatttgtctaccctttttgagacttttcccatcaattcgatggcgcccggagtgatcgcgtccgtttggagtgttctttacttcaaggaagtggacaagagggacttgaaactgctggcatcagctatgctcatcactgtattcggtaaaacatttactgaacacgaatgaaaacagtaaatattgaaaattcctttaagtcgaaattcaaacataaatttttttttattttttaaatttttctcttctgggaacataatggttttcaatacttgaatgtgtaaacatgctagtttccaatagtttttcattgaatttttatttgattgggcgcataaaacttaattataggggcagttttggttgggctttcgaag

SEQ ID NO: 83246 - DNA, 417 bp, Heterodera glycines
atgcctttctggcgcaaagtaagtttaattatttttgctatttttgagtggcaacaaaaacactcccttaagagaatatctccagtccagcattgaactcggcaaattgctttatcggttaaccgacggaaaagcgccttttgatgcgaatggaaattgcaaaagacacaaaatgaaatacaccgaccgaatgaaagcgatcgaaagcattgagaaaaagatggccaaagaagggaagcctaagaaaatgcaatacaacagtaccttttgagcatctttaggtattattcgttccgttttcccaaattttattcactctttttgtttgtcattattttgtttttgagtgataattttaattttctgtgtccatttttaaaatccgtagttctccgaattatttaacataataataaa

SEQ ID NO: 83247 - DNA, 1139 bp, Heterodera glycines
atgattcttgaatatcgtcattttttaagtttttacggtgtgtaaaaatatgtgcgaagcagacagatccaaaaggaaattaattcttccaattttatcctttttaaattataaacaaaaatcattttgggtcctgaaactgatcaattcggctgcgcaacatcgagttccgattggccaatttctcttcgaatttcgtcagttcttgggacaactgcttctcattgaacactttgtagaatgaaatgccaaaacatgagaagttgattttgaacagctcaaggcccgccccggcgatgaatccaaaagccaaagtggccgagtcgcttttttgtaccaacacggtaaaattacgaagaatcacctttagcattatcctcctaaaacaagcaaaaagaattttattttttattcacgggaggtctcgcctgttgtttaatttcggaaaaaaagtttctagggttatttatgacgctgatcacgaatatacatttgttttgcaaaatcatggagatgtgcgagaaaacttttcatttcatttcttaagcgtgtatttctgaaattttagggtcgaattcttagagtatttttcctttataaaatttttgttaaatttcaggcataacgccaaaataggcaaaaataacttttttcaaaactttttaggctttttggctctaaaataaagaaaaaaaaattaaattttaaataattttcaatatttttaaaattttcctgttaattattattgatttttttagatttacatattttcccttttattttccatcataagaaaatgaacagtaagatgcacagatctttctttcattggacatcactactcatgcaaggcggtattttgtgtgcgccaataattgtcaatttacagagaagtgggtccggcaattattaataacttttattgattatagtagccttgctaataaacactaaaaacgcaaaataatataaaaaggctaatcaaaaatgaattttttaaagataaattgaaccatgacttcaaacttcgcaaaatgatgtccgctgaccttcccaatatgcctgatgaaaatctgctcgatttggttgaagctgaaatgttagccaaatctaatgatcggctttatcccatttga

SEQ ID NO: 83248 - DNA, 212 bp, Heterodera glycines
atgctaaaggtgattcttcgtaattttaccgtgttggtacaaaaaagcgactcggccactttggcttttggattcatcgccggggcgggccttgagctgttcaaaatcaacttctcatgttttggcatttcattctacaaagtgttcaatgagaagcagttgtcccaagaactgacgaaattcgaagagaaattggccaatcggaactcgat

SEQ ID NO: 83249 - DNA, 237 bp, Heterodera glycines
ggaagagtccaccgtaaatcaccagtcgccaaagaaaaaggcgccaccaaataacgctcgggtggccaggagaccgcgcgatttgcgtggactgttccctcgggcacaccgaccaatttcctcggcaagcgaacagccgaccacccaactgaagtcgaaccgattgttcgcgcgcattgacgagtcctttcggagccgttggcttaaactacgctcaaaatcgacttcgatggtcaa

SEQ ID NO: 83250 - DNA, 1948 bp, Heterodera glycines
atgtatgttgatgatgatgatgatgatgatacaattacacatggtaataatccaacggcaaatgacgcagcaatggcacaacggatgcaaaaacagctgcaggagcaacaggaagaagcggatgccgaattagctaggcgtttggctgatcaactttagggtaataatttgggctggcaatttttaattactaacaataacaagttattcaaattaataattaattaataaatagtgaagaattaaaaaaaagccaaaatacgaatttaaattctgtgccttcaacaaatcatattaattgtgagtcgatgtgtaaaaagtaaaaagatggggagagagtctggcaaagcaagacaaagcaaaaggatggaatattggtggatggatattattttttttggattgggggggggggggacgagacgaaggaagggagggctgtgcagttgccattggctaatgttgaagagagaaggaaaggaaggcttaaatggaataaattaagcgatggctaatcaaagccaagcacaacattgacaaaacgccgtcatttaaattattggatgctgaaagtggccatcccaacaaaaatttaaattttacaatttttagcatattttttattttctaaaaaacatcgtccccatatggccggtggaacaactttgcaactctcttcacaacaagcctggtcacagcgcgcactgaatttgttgttttgtgccagtggaataataatttgttatggcgcatttagtgtttttcaggaaaaaatgtgggacctttcaaaaacgtaaaataataaagacttttcattcattcagcacccaaaggctttttggtgaaaagaaggagcgttttgtgtacatgcaagccttagtgttcttccaatgtgccaccaatttggttggcttttgtttaacaattacttgctgattcgcttctccttgtttagcttgttgcttggtatgttttgagaagaaataaacagaaatcgctggacaatgtgccgattcacttgtactcaatgtgctcaaccagctacttcctggccatgctcttcagcagttacgccttggaatgggtcaattacccgacccaagtcagtcactcccctcccattgaactgttccattttcgaatctctgcaggtccttggcaagtcgtgcaaacccatccccatcatgctgttcggtgtcctttttgctcacaaacggtacggacttcgcaaatacttttacgtgcttctcatcgtcaccggaatggccatctttttgtacaaaccccagaagggcagtgtcggctttcagtttggcagtggcgaattgtttctgtgtctgtcgttggcaatggacggattcactggcgccgtccaaggtgccctcctttccttccccacaaatgcatttctcacccccctttttcagacagaattcgccattaccacaccaccgacaaatggaccatgatgttctcgatgaacgccttctcttccgccttcctcgccttaattcttctcgccagcggcgaactctttcagtttttccgattcgtcgccgcttaccctttcattcttcagcaaatgcttctcttctcgctgtccggtgcggttggccaggtcctctcgtcccatcccttttttccattctcctttaattaatttgctcgttttcagtgttttatcttcaaaacggtcaccgatttcggccctctcacctgttccatcatcacaactcttcgaaaactcttcagtctcgttttttcgatcatcatcttttcccacccttacacaaatcgacacgtgctcggcattatttttgtgtttgccgcgttgattttggatgccattgacagtcggaaaagccatggaaaagcaaaaggggacgaaaagccaccagcaaaggacgggcttctccaagaagcgactgcgcaggagaaagaaaactga

SEQ ID NO: 83251 - DNA, 189 bp, Heterodera glycines
tatattatgctggtcagttcatatttttgaagaacgttttaaagaaggataaaaataattattttattttaccgtcactagatatgcatatgtattttaaattttttattgttatgtaaacttctaatatatatatatatatatatatatttatatacataatcatatgagttggcggttttaagaaac

SEQ ID NO: 83252 - DNA, 258 bp, Heterodera glycines
atgaacacgtcccttattcttctgctgttcacggtttgcttcgtttttttggcccattttccccaaaatgcgcaggcagcagacacaaagagagtttattttgtatatggtaatccggttgaagttgaagctagatgtcccgggttaagcattgaacttggagcaaccacgaaaggtgctgaatcgaaacaatatttggacattgcaactagtaaatggccaagttgggtgggcgacaatgaagagattactttccat

SEQ ID NO: 83253 - DNA, 706 bp, Heterodera glycines
attttggtcgatccatggcaattggttcaactgctccaacttggccaagccgaatttgaacgggtcgtggtcggattgtacgtagtcattagggtgcgttttgaaaacacagtcatttgggagcattaattagtttaaaaatttttttttaaaagttttcaattttctaagatttttttcttggaaatttctaaatttaaatattttttaaaatttcggcggcgagattttatcccatcacctttatgctttatctttgactgctgtcccaccctatattttccttcaagaagccatggtcactcgaacgaattgaaggcgtcgcatggaatgccgtgccgacgtacaaaatttgtggccaagggcccctgaacgttttgctgtgcttcaacggtttcagctacaaactgtgcaaagtggattattcaaggccgaactctaaccacgaaatattgaagaatgagacgatggtcagtcagccatcgtctaccattttgtttttaggaaaaattaatttgttattcaatgcaaaaatggggagcaggacaaaacgtctccgccgaaatgtcgccggacataatgtcaaacgcaaaacaaaaaacatttagtaaaatatttctataaattttcttgaaaaagattgtgtttcttttgtgcttccgtttttgagttctgagttgtttggagcggatttttattatttcaa

SEQ ID NO: 83254 - DNA, 472 bp, Heterodera glycines
atggcgggacgaggacaccaaaagattgaatccgctcgtgggactcgcgaaacaactgaaacaagagcttagattttatcataatttgatcttgatccgaaattggaacttttggagttcctctgccacaattactttgggtgaaaagcaaaaaaaaataataatttaatttttatttttaacatgtttttttttcaggtgtcaccccgaccaaaatcaattctgtccgggccgaacagggtttcagtcataaaataaatccagcatttgcgaatgcacaaattttccatgtccacatgctgctgtgagttatgcgacaaatttgacaagagtataaatcaattaaaattggtaattaactaattgtaaaaaatgatttgaaaaatgcgggaactttttgcgcacacgtcgtttaaatttaatattcccaatttttaccattgcatttaaatactgcgtgaaagtcaataaa

SEQ ID NO: 83255 - DNA, 375 bp, Heterodera glycines
atgccggacgcagaccaaattttgcagcaactggagcaccattttgtcaacaattggctcctcgactctggcaaaattgatgaactgaagcaggtatgtatgtttggagggggtaattgcgttaatcttgttttatttaaaaatttatatataataattcagagacaaagtgatcagagggaagagcatgatgagttcgatcaaacggaagaagaaactgacgaaatttcgcttatcaatgtcattgattggtgatttagcaagaagaaattggtggtcgacgggagacggacgaagaaaacaatggagaaaacaattcgattttgaatagacacagttcgataaaggtttttattcgtttttacaggaaataaa

SEQ ID NO: 83256 - DNA, 1268 bp, Heterodera glycines
acgataattgtgcgcttgccgtgcggaacaaaggcgcggcatctaaagacatcaagtggcttattgctacttataagatcaaagccacagaagaagacgacataatcgatgttgttgattgtcctggcaatgtcttcatggggtaccagacattctcttgtttggatggttgtttcatttttcaatttaaatatttattaatttgatatattttttcaattcatgccaacttcagaacaaaataatgatatatttgtcttgaatggatgcgccgaaacaaatagttgttcatctaaattggagaaaatctggaaaaatatgatggatttgcgtcatgtgttagttgcaaagaaccattgccagtgtgcaacaaagaaaaaattgagttaaaggagccctttcctcccttcaatgatggccatccccatcgatggtttgtgtagtaaaaaagttttataaaattaaaacacatcaaaaaacaatttattctaaataggtgtttttagcttcttttcgatggtcggcatgctctacacctttttgttctattttggaatgtaaggcgttgaaagtgatggagcacgcgtaacacgaagcttcttttcgatggtcggcatgctctacacctttttgttctattttggaatgtaaggcgttgaaagtgatggagcacgcgtaacacgacctgacactgtcgcatggcaactttggcttgaaaaagagaagaataataaatatttaaaatgattttcatttaatttttgttcatcggtttattttgaaatttgtcatcctcaacccaattacacgttgagaccacgaaaatataccccctaatcggcaccgcatcgaaaatttcaaattttcgccgatttttcatattctttaaaaaggcatattttttcagaacgtttcccattttaggtttaaaaaatttttcattgggaggaaggaaaaaattttcctccctccaataatgcgcgcaatcaccgatggtttgtgaagattttttataaaaataaaacaccaaaaaacaatttattctaaatagctgttttacattgttttaaacgattttgcacaaataaaaacttttttagacgataattgtgcgcttgccgtgcggaacaaaggcgcggcatctaaagacatcaagtggcttattgctacttataagatcaaagccacagaagaagacgacataatcgatgttgttgattgtcctggcaatgtcttcatggggtaccagacattctcttgtttggatg

SEQ ID NO: 83257 - DNA, 1691 bp, Heterodera glycines
  unsure (1)..(1691): unsure at all n locations
ttggccctctccactcgcatttcatcaattattaaggaggaatcgttgagttattagtcgcgggacggacaatggcaatgggcaacaaacactccgtgggaaaagcaaaaaggggccaaggaaatgagagacaggaaaagccaaaaacagccctaattggtgggcaactgatcactcactcactgatcatcgtgtggcaataatttcggggtttgaaatggcggtcaaatcggggcgggggggggggagcgaacccaaccgaattatctaagataaatgtcatcagtcgctaatggcgaacattgttaaaacaaattttaaattgagaattcgcattgttgaatatgtttcatttatgtaaattgttataataaaaaaattaaaggttttagaaaagttttagtaggcgaaacgtccgactttgccttagtaggcgaaatattgagtaggcgaaatgtcagtaggcgaaatgtcagtagacgaaacgtctgcacactcccctccccccccccccgcttttttttttggttttttacggcttttctggtctcggcaagtttcggtccatttcttactcgaaattccttttcacatgtaacgctaattaaatgtcaaagaattttttttatttaaaaaattgcactgttttcaaattcaaatttaaatttttatttctgaatagaaacttaaatttcaaaaacgttcgggacgtggtcccgcggaattaatcccacaaatcccccgatcgctccggttctctactgctgaacaaattaatttataaaatttatcaaggacaagtgctcaaattattctaatttataggtatatttgctatttacattatttttcaccaatagacaaatgctgagacattgcaaaaagagaggggagaaggaaagaggtggaaaaaggcccaagttggacttggaaatggtttcggcactgcaaacgccgctttcgtctcccttccgcgtgccctttctgaacggtgccattggccatcccttcgttcactgtttcatcgttccgttcttcagacagtccttccacctcgcgtactccccgcactgttctgccgctttgtcggcgttcggtcagtgtcgtgccaatgccaacagtcacagactgtgcccacgaaaatgtaatcaaaaagcttttggctcgtcccttccgcgtcccaatccccggctacacaggtccgtgtggtgggcctttcattttcgcgccctcccacttttgttcaggcggttgcagcaaccgtttgctcggccttcgcatgtccggggtgcgtctttcgctgcacgacccttacgcggagaatgcgctggtcgttttcgcaccaccggaattatctgcacacgaacagttgaaagtgtggtgttatactatttaaaaaggcatcttttgaaaagcgggacatttgctgcttctctctttttttattttaatttaaaaaattccctttgccattttcctcatttgtcagatcgacgataccaaacgtgaagtccatgtcgtcgtggacccccttttgtgcgctgtgctgcggccccaccagcgcgagggcgtcaagtttatgtacgattgtgtgngtgngaagcgtgtcgaagggcacaacgggtgcataatggcagatgaaatgggacttggcaaacattgcaatgcatcgcactgatgtggacactgct

SEQ ID NO: 83258 - DNA, 2100 bp, Heterodera glycines
actaccgtagctgcagaagcagaaactaccgtaacatcagaagctgaaactacagtaacaccagaagctgaaactacagtaacaccagaagctgaaactacagtaacaccagaagctgaaactaccgcgaaaaatgaagatgaaacaacagcaacaaaagaagcggaagagactaccgtaaccaaagaagctgaagcgactaccgaaacaagagaagcggaagagactaccgtaacaaaagaacaggaagagactaccgtaaccaaagaagctgaagcggctacagaaacaaaagaagcggaagagactaccgtaacaaaagaagcggaagagactaccgtaacaaaagaaactgaagaaagtaccgtaacaccaacagccgttcagtcgagtgaaaatgcaacatcggaagagtcaaaagcagccgaaaattccaatgccccgtcgtctggcggtgaaattggagcagtgcccgcagaggaagaacaacaaacaacggtaaaacaaagagaaagcatcaaaaaataattatttaattaagtattttttgatttttaggagggatcaacaatctctgcagttttaactgaacaaacgaatactgccgatgcaagaaatattaataaatttaatttattgtaattatttttcccaattttaaaattttgtagggtgccacaaacggacaattgacaaatggaacaacagcagaagcagaaactgcaaccactgcttcaactgctgctccaccgactgagcaaacgacacttataaatgcaccaccggaaacgaatgagcaatcgaacggcacaaacacagcaaatgcgatgaattcggcaccactgacagaccaagcaaatgctgaacagacaaaaggcgatgccaatcagacaatgacggacaaagcaccagacggcacaaatgcaacttctgctggtcaacaaatggcgggagagaaaacagaaaatgcgacaaattcaacgagtgcagcggtccaacgcaattctgatcagacaaaaggcaatgctgatcagttgactcagcccagcaaagaagacagtgccaattcaaccgctactgatcagcaagcgatgctaacgaattcgtcggatggcattgcagcgaacacgacaaatccggcgcaaaacactgatcagaaaacagcaccgggaacaatgcaaaacagcgaaaatccaacaaaccaatcagcatcacctgaagcagagaagaccaatgttaaccaaataaatccgcaaaagtcggatggaaacgcaacattcacaactgcaaaccagacaaccatgactgatcaaggcaatgctaatttttcaatttccgcacaaaatgccgaactaagcaatgttggaccaacgccggaaaaatcaggcaacaacagcaacgcaaattcaacacaaaatgctgcagatatgggaaatgccactcagaaaacaacgagtacggagaagtctaatgggaatacgaacttgacaaatgccgacccccaaaaaagcaatgctcaacaaaaacaaaatactgaccaaaaatcaaatgctgatcaaatggcaccaacagcgaaggctgagaccagcgtcgccaatgcgacaactgttgatcagaagacagcgccgacaaaggcagaaaacagcagcgccgcaacagcgaactcggcacagaataatgcgtcgaacaatggcacttccgtcagcggagcaccggcggagatgcaaaatgtggacgatgagacgaagctgaagatgatgatcatgtcgtcgcttgcttcccagacggcgcctcattctgcgccgaatccgtccaattcttccgctgccgaacagcgacagggtgcgcccaaaggcgccggcgtcacaaacaattcgacagcgccagaaagtgctgagaaaaagccgtcactgcccgcggctaaattggcaaatgaaaggccccaaaaggcgtaattaggacgtagcctaatgatgtgcaatttaacagttttcaatcaatcgatcaattgtagagtaatgagatatgacattgtgtaaaataatacattttatagcgcatttgtgtatttgtttttttttcttcttcgatgatagtgaa

SEQ ID NO: 83259 - DNA, 1834 bp, Heterodera glycines
gagcctgttccggctgaggatgcttacggtggagaagatgaacaaggccttgacgtggaagagatttgggagtgtcagatcagagaacagctcaaaagagatgatgaaatgcgagattttttcgacgacttggggaccgatcgggggcccatcgacccacgtcaaacattctacggaggcagaactgggccgcttcagctgattgctgagccaaaggaggatgagaagatttcggtcttcgatatcgtcagcctctacccgtgggtcaactatgccaccgactacccgaccggaatacccacagtcatccaccccactgttgaagagatgatcgtcgactggactcggcccgaacatttgcaataccaagggatatatcgtgtgcgggttattcctccaaaagggctccgaattccggttcttccactaaaaatcgacgaacgcctcctgttctgctgctgccatcgatgtgctgcaaaatttcggaagttgaacacacgacgagtgcacaaatgcccacacacggatgagcagcgggcttttacaggaaacttcacacatattgagctagaaagagccttggaaactggctatcgagtggacagattctggagagcttggcactacgatgaatggtatgagttagttaaagaatcttattattttattgcaatttaggagtgacggaatattcaaggactatgtacgtctgttgattaaattaaaggtctgaatatttttttttaaagttaaataatgtccaaattgcaggtggaggccagcggttttcctgatggtgccaacactgtggaacaacagcagcagttcgctgatgagtacagaagaatctacagtgtaaatttggacctggaaaatgtgcggagaaatcctgggctgcgcttcatctctaagctgatgctgaacagtctttggttggtatcaaaaattttagtcaaaataaataacaaatttaggggaaaattcggcatgcgaaatgaattaggcgcgaacaaagtgctaacaaggccgcaggaatttttcagcctcatcatggatcataaaattgtaaaccaaaatgtgtaaatgaattttcaattttgtacactgtttaggaagtgtcggctgtcatccctttgtcagacaccgccgtccgtgtcatgtacaagagcaaaaagaatttcgtcagcgaacacacgtcaagcaacattgtgataagtctgtggacgaccagccgtgctcgcctcaagctactcgattttatgacacaaatcgatcgaacagagggagccaaactgctatatacggtaaaaaaagctctaatattgtcaagtaaatataccccaacctttaggacaccgacagcgttgctgtgctccataaacgtgacatcgtgcccatccagacaggagaatacttggggcaaatgagcgaggagtatcttgactacgagatcaaaacttttgtctgcggaggtaaaaaatatttaatctttttaattttttattctaaaatttcaggcgcaaaacaatacggctttcgaatgttgaacaaaaggacaggagaagttgaatacgtacaaaagattcgtggcattacattcgacgtgaacaacagtaaggcgctgcagtttgatcacttcctgcaaaaggtgaaaaattacggacggaacactggtgacgacaacgatgatgctcctgccgtgttttcctacgacaaaataatgccaacacgagacagccgaatcatcacacgtgagctacgtaaaaaatacatgccaatatgtcaaaaaggaatcatcaacgagcaatacgaagtctacccatttggaaattaa

SEQ ID NO: 83260 - DNA, 684 bp, Heterodera glycines
atgttatccgaagaagaagtacgagggaatagtgtggtaagttttctaaataaaaaaatattaatattttcattttgcattttttaaggagcgaacctctatatgtggagttgaaggacttgaagatttgccagggagactcgccgctgtgtctttcacgccattgcgaacaaccgaacagcagcagcaacagcatgaacctgatcgtggacgagttggatctgatcaactattggagcgacaacgaacgcgaaaacgagactacaacctggtgagagtgctgtgccggttcaacaactgtggcccataccgattgacgaagcaactacagaaacaacggactgagaaccttgcctatctgagccaattggacattgaaactgtccatcttagaaaaaatgttaagattatccctgatgctttgtgccccatcggtgcaaatcaggtgtttgcataccgtggattcctaggaatcacggttcagcaacacctttacactcgccatcgtgttatgttaaagtatccaacccttccgtgtgttgttcaatttggtggtggtcaccaccgcgatattttccccattgaattgttacgtgtctccaaaactgaaacccattaaaacggaagcattttcatttttcactgaaacaattgttgtattgctacattttgaagacgaataaa

SEQ ID NO: 83261 - DNA, 352 bp, Heterodera glycines
atgagacagccaaagggaatttttaaaaagctttgtttaagaattctcagttggatttaatttaaaaaaagagtggacttatttattgccaagatttgatagtaattttttttcattaaatcgttcacaatttctatcaattccgtgaagcggtggcgaagatggttatatgccccctgtttatatttttcccataaaagtgcaattccaacattttttagtcgttttaaacttttttcattgaactattttcataaataatttaaaaaattaaattcttccaaaaaaattctaaaattgttttaggatcacattcattcaaaggataaagttttaagtaaattaaaataaa

SEQ ID NO: 83262 - DNA, 105 bp, Heterodera glycines
atggctctgcttaaaatgggactgtccgcggcagagtgcgttttcatcgacgacctcgaagaaaattgcaaaggtgccgaagcggtcggaatacgaagcatttgg

SEQ ID NO: 83263 - DNA, 596 bp, Heterodera glycines
  unsure (1)..(596): unsure at all n locations
atgaaaatattttttattagttttatttttcccttaattttacttgattatttggaaggccataaatccggatttgaaggattcgtaaaaaatcctcaagcaatatcacttgtcaaaagctatgaaaaaaaggaaataaagacacttgatgaactacatggacaacttatgcataaaggcatacagatttctgtatgcactttgaaacgctacctgcataagataaaaattgtttttgcgcccacaaaagataatgttgattcatcacctaagcttgaagtggaaaaatgcttctccaaaaagctgactaacactatttatataattggaaatggatcaaattggagaaaatacattcagattaatgataagaaaaatgatatctacattccgtgctccagctgtttgtatttaggtgaaaaggaaaacaatactagatctattatctcaacagcagtgcttcgccaaggagttaatcgtgttatgttgcgctcggaacataattctgagtgtaagccagaaattttgnaaaaattgaatcattttggtggtttttgaatttggtgggtaattgcaagcttttctcgggtattaaa

SEQ ID NO: 83264 - DNA, 308 bp, Heterodera glycines
atggccaaaagaaccaatagaaaaaatcaaaagaaaaaatctattgacaagggacgaaaatcgagaaatcgccgccaaaaagtgagttttgattttattgtagaaatgaactgtttaaaaattttaaaactcagcaggaaacggagagcagtgactctgatgactccggaaacgaaagggatttttgcgacggagttgcagcggaactcttgcaaaaaatatgcagagccgtacgggtcaagggaatgaagcggcgaaatgatcgaacaccaacccctatcagagattacaggaaaaaaccggatagt

SEQ ID NO: 83265 - DNA, 910 bp, Heterodera glycines
ggacctgcgttattaatcaataacattcgctttggtggcaatgaataccggcacggggcaaatgtggacactactggaatgctcgaattactggaacaattgggttacaatccggttcacatgtttgaggatttgagttcccaagtaaatttaaaaaataaataaataaaattaaaaaatccaaaataaaaaattaagcaaatggttgccaaatttgagtggttctcgcgtttgacggcattgaattttgcggacaggtgtatttttataaatttttaataataataaattattaattctgacgataatttttggggtgaaaatatctttttttaaaatttaaaggtatcaatgttatggctaaccttttaggagttttttaaaagttttagaaaggtaaaattaaaactcaaatgaaaaatcgagattttacaaaaacctttttgttatttaggaaattttttttcaaatttgaaatgtgccaacaaagaatggttttatttaaataggacaaaaactttaaaagcaaatttgaattttttaaatttaaaatgtggttttggctgattgtggcttatttttgtgattttaccggtgcaacaacatgtctaaacgctcctaaatttttttagtactgtcacggtggtaatgtcccacggtcatttgcgatcagtgcaagggatcgatggcaattctgtaccaatcgctacgttgaagagcaaaatgaacgggaaaaattgtccacaaatggttgacaaaccaattgttgtaagaaaatgatttggcttattatggatataatacttgggattcagatgcttttcaattcctgtcaaggagccctgcgagattatggggttgaaagcagtgaaagcccatcattgccaactacaaaacggcacgcaaaacg

SEQ ID NO: 83266 - DNA, 720 bp, Heterodera glycines
atgattgttggctattcgacgactcctaacttcgtgtcatttcgaaacaaagaattcggatgttggtatatacaagccatcttacgtgtctttggccagttcgcgaaaagcgaggaaatcacacagctcttcgagagagtgcacaatattgttgccaagcaagaaacgaagggacagaaacaaatgccttttttcgaaagcaaattaactaaacgtttttactttttcccaaacgagtgaaaaaatttcagtccaaacattcaatttttaaaatatttatttctttattacatttattggtattgttgaacaaaataaatgttgaatccatcttaatacttttattaaaaaaatattatagtgtttcgtattttcctatacattttggcgatgattatggaggcactttaatatttgatttattatggtttgaaaacttattgggtgagttttcaattgtttctacttttgactgcaaaataaactacagttaaatgcttttttttgaaaattttgattttaatttaaattttattggatttggcttacatgcatggaaaattttaagtaaaaaatgtccattttatgaacaatattcgaaaattaaagtgattcaaatttcgaaacatatttctattcactgtaacaatatgagcatttttgctgataattggaatctctagaggaaattaaaaatctacagaaaattcatctgagaaa

SEQ ID NO: 83267 - DNA, 695 bp, Heterodera glycines
atgaacatcaacgggaagatcgggatggttttgtacaaattcggtgggagaatgtgatcgatggtaagaaattttatataaataaaataaatttttttaatatttaaattatatattattattattattattttttggagggggatcgtgtgccgttcaattaaacgattttatttaacacaattttttaaaaatcactaattcttttttgcataaaatattaaattattgtaaaaagttgaaaaataaataaatacaaaattttaaacatgttaaatgccgcttcatttaaaaaaaatattttattttaaggtgcaagtgccgattttgaaaagctaagtgccattggattaagcaactatgacgagccatacgattatttctcaattatgcactgtaataattttagaaaatataaaatttcttttaatttcgtaatttttattccaaaattgaattaaaaaataaaataaataaataaaattaaaaataaaccatagatgaaagtacggaaggcagcaaaaatggaaatccaacaattacagcaaatgcaccagcatatacaaatttaatgggcaaatcaacggattttactgaaggttggaaaagcattgaaaatatattttatttttattatttaattaatttaatgtctattaaattttcagcaatgtaaattttaaaatattaataaa

SEQ ID NO: 83268 - DNA, 66 bp, Heterodera glycines; identical to SEQ ID NO: 53774

SEQ ID NO: 83269 - DNA, 636 bp, Heterodera glycines
atggcagggaattaccgtaaccatactttttccattttaccatctacacttgatcatacttaccgttttatgtttaacgatattacagtaattcgcttaccataattcaaaattttttatttatccatgtccaactttttattttttgctaagttttcttcgctccggaaatgccagcgccggtgccggtgccgtcggttggcttgccgacttgcgcgagccgagcacatcgcacacgctgctccatctggccgcattacatggccacagggagctgacccgtgtgctgatgcagcgggatgtacagcttgcaaccgcgcgtgatcgcaagggatgtttgccgctgcatttggccgcatggaatgggcacgaagaagtgatcgcggtgagaaatatttatttttaaaagtttgaaaaaatcagagattgattttttagacacttttggcagctgaaccagcctcagtggtagatcaattttaattttatcaactgaatttttaaaattgtaaatgatcataataattttaattgttattttttttattaattgttaaaacatttaatataaattttaattaatttaaattattaaaagaattttttaaattttgctaaaatataaaatatgtaata

SEQ ID NO: 83270 - DNA, 1440 bp, Heterodera glycines
atggcacccgaaattctgctcaccgcacttggcagaaaggacggctattcgtttgaagtcgactggtgggcattgggtccgtctgtttcctttgccattttcccaacactttcggcacattttggtcctttttaggcacttgtttctacgaaatgttgcgcggtcgaattcctcacgaatatccgtcggctttttcatcgcttcaggcacttaattccattgtttaaatgtatttttatgctttttccaggtcttggacatcgtcttcactcgtcccgtggtgatgcccgcccgttggccctccgatttgatctcttttctccgttcaatgatcaatccggacccggcccggaggatcgcctccttcgccgctttccgtgcccatccgtacatgtcgcgcattgactggaccgccgtttttgaacggtctgtcccgaacaatacgaaatagtcaatcattcggcaaagggcaaaatattggtcctttttccgatcatttttcactaatttacttattttgaatagtttacgtgcgatcattcattgaattgaatctgatcagtgactgtcccaacgattttgggtttgagaaaattaatgggactttcttgcattgaattcgttgtaaattacaaatgtttagcgccttgaatgaatgttcaaaatccccttttgatgctgccttttcaaccactattcattttagcaaaatggtgcccatttttgcgccttctcgcgaccaccaacacttccaccggggcgagcgcggcttccgtgccacggtgtcggcgccaatcagcagaacgaaaggcgttgatgcgagcagacactttttacaccacccgcaaatcaaagagcgcaattcatccgacacggggagcggaagtaatggaaaaagagggaatgattggaaacagaatgtacaaattaagcgaagggagaaagtaaatacgaagaacagatggaacggttgagcgcgaagttcaagcagttcaatcggttccgttgcgaagtccaaccggcggatgctcggcctttgctggacgaaacgcggagaaacggcggagagaaagaagtgagggaattgcaaatgataagaaccaattaaaaacaaagaaatcacagacactggaaagggggaacagcagaagcaaagtggccatgtcagcaacggcggaaacaccgcggggaggggggacaaaggaattgagggcaaagacacaggcggaccgaatgagggcgatgtaccggacaaacaatcgcgaagtgaattattcaatgtgatatattctcccaaatttcagctttgtatgtacattaatgtaagatgctcatatccgaacctttaagtacccatgtttctgtgttttctcactattattatttgccaagtctcacaatttgtgttacatttattctaaattaaattaaacaaataaa

SEQ ID NO: 83271 - DNA, 444 bp, Heterodera glycines
atgatcggcggttgggccaagaagcgaaagcaggcgatcggctcacacccagcagaaaattggcaatttgatggccaaattaggagccaagaactgatcggggtcgacacttggccattggagaagcgatcactgatcagcagctgcaaaacggcggagacccatgcaacagtcagggaactggagttgaaccaagcgaaatacgacacgttttacgcccgcggggagcgcgactctcgagtggaaattgtgatgcgatttggcactccgcgggaattgctcggatggcacagatccattttcagtgatcagcacaaatacacagccccaccatgtggtgaaagggagcaaatcctgctcaacatcatccacatggacctgtttgcattgctgcacattttccaatcggtgccggcatttatgttgctcgaattggatgatcaa

SEQ ID NO: 83272 - DNA, 358 bp, Heterodera glycines
ttcaagtgtccgtttggggtactcaaacatttatggggcagcaaaaatccaacgcagaattaaagtacaggctatagggaagctattcccgaaggattcggtctccccataaatctgggcgcatcggttcggggggactgccccgaaaacaaaaaaatcgattttttcaagtgtccgtttggggtactcaaacaattatggggagcaaaaatccaacgcagaattaaagtacaggctatagggaagctattcccgaaggattcggtctccccataaatctgggcgcatcggttcggggggactgccccgaaaacaaaaaaatcgattttttcaagtgtccgtttggggtactcaaaca

SEQ ID NO: 83273 - DNA, 2292 bp, Heterodera glycines
atgtcagtgcccgagcgaagccaagtctccatacagctccaacagctcggactggaagacgcagatgtgccaatcattcttgaacaacttcaaaaagcttcgccgacgcctgaggcaacactaaaagctttgcagacggtgcaagagcatttggcgaccaaacattttgcggaaaaggaagccaaaatgtggacagaactgggcattgaccagcaacaacagcagtcacaggcaatgctcacgttgagttcggcattggaggaagtggccaaacttgaagcgaaagcagcacgagaagagataatggagctaattgcttcattggaggggccggaaaagcgggcggagatcagagagatgaagccgactcaggaggaagtgcagagggaggaaagactgctccgaattgagcgacaggagcacgttcttgcgttggtaaagcacgtgcttagcgaatctgcacaacgacgcgccgttacgctgagcgactcgcagttggcccaagtctcggagcagttcagacagttcggcatgacggagatgggcacgaatgttgcactggaccgtctccaacagacaagcgacattacgggcattgcgcaaacaattttggctgattggaatcggctggaagagcggttgttgaccaaaagtgccatcgaagatgaagccatggtacaagcaacaatgtaccggattgatttggttaagccggaagcgaaaataaagctgaaaagtgaactgaacgaagcggcgaaaagggatttaaaagaggccaaagaggagttgaagacgttcatcagctcactgatgggcaccgaacaatgggagacagtgctaacccttcagagggctcagcgaattggagaagcaactgccatcacggcaagggccccgatcgagctgaacaccgagacagtcgctgaactgcttcaacttgatgaacaagcattggctggcgtcattcgaccaattgaattggcaagaaaggctgaagaaattcggttacaaattgaaaaggaagaatatgcagaagagatgaccagaaaattgatgagagatgaattcagagaggtcaaactgggcgagaaggaattcgaaaaggtggccgagaagttcaagcagttcgggctgaaagagacgaccgcaacagcagtcattgaacaactccaacgaatctccaaaacggaaaaggcattgaaactgaaacaggaggaaagggcggaactgttcatcaaaaagttggagaaggaggtgaaggagttcatcagaattcggaaagggtacggaaatgtgcagaaggaaaaggaacggaagcacgatgaacaacaaaaagtcatggaaattgtggcaaaactgatcaatgaggagttcaaggaggtcaaactggacgagaaggagcttttgcaaatagccgagaagttcaagcagttaggcttcgaggaaatgaccatcaccgccgttcttgaacgtcttcaacaacttgctgcacccgctctgctcaaagttgctaccggagaacaacagaaactggaggttgagctgttcttacaaaaactgatggaagagatccgagagtttgcacgcctgcgtataagctacgctaatgcacagcgcgctaaataccaagcacagcggttgagaggtgcagtcgtgcaagtgactgtgccgttgagagaacgtactatgccaatggtggacacggcacgtccggcagctgcagaagcggaggaactgtttattgaagagcagaaatgggaacgcctcgtctattggttcgtcaatgtcacgcgtcgctatgcggaagagcggttgcgcagagacttgcatgatgcgcgtcagcgagcggaggttgcgcaatacatcgcatttgaagggcctgtgagtgcggtgcagcgcgcacttttcactcccaccaccactgcaccgatattgcacacagaaatgacgatggacaaagttgcaggcactgaggaaatagttgcggaagttccatcgctgcatgtgccacaacaaatcgttataaaacacgctgaacccgttggaatggctgaacagcaaatttcgagtccaacaacatggcatgaagagctgaagatcaaagaaagcaccgcagcggaatggcacacaaagaccgagctgtacaagcacgaaattccaagacaagacgaggagacgacgcgtgttttgacggcaccgcatgagcagaaagcggaaatgcgagtacccgaagttggcaccgaaagcgcacaagccagtgacccaagtgagcaatgtggcgcgtgtcgctga

SEQ ID NO: 83274 - DNA, 55 bp, Heterodera glycines
atggatgcgctttgggaaaaggacgccccagggcaaatggatgcgattcggaaag

SEQ ID NO: 83275 - DNA, 1123 bp, Heterodera glycines
  unsure (1)..(1123): unsure at all n locations
atgcaagtggtttattttattagacgccatgtttttggtgtgtgacgttttttatcacatgattttggtgggcgtaatgggtgctagcgcgtttgttaaaaactgccagcgcgtttgttaaaactgccaatgggtttgaaaacaaaaaatgggtaaaataattaaattaatagcttggctcaaattcaaccaaattaatatttcgtggtatcattcaatagctttaattgttctctttcagaatataattttcctaaatttttaacttaagtataaaagaagttataaagcattgaacaggctatgttttttgcaatggtaatgcatatataataataaacatttaaaattttaaagtctttaaaatgaaatttaaccaaaattaatttatatttcgatagccctaagaattctctatttatatttaaaattttagaaaatttcattgagtttcaaaaaagttctgaacaaaaaatgctgacttaagattttttgcaattttgtgacaataactttttttatacttaagttaaaaatttaggaaaattatattctgaaagagaacaattaaagctattgaatgataccacgaaatattaatttggttgaatttgagccaagctattaatttaattattttacccattttttgttttcaaacccattggcagttttaacaaacgcgccacacgccncgaagaattctttgtgatgtttactcaattgtcaatgccaatatgtttatataacatttgcaaaaaatggaaaattttaaatttttcttaaattcaactcagggtcggagttcgaattgagctgaaagaaggcaagacccgtccgtgctcacaaatcagcacctcaaattacccttagaaataattttgaaaatttcgaggctggatttatgaaaagacgattcagtcacttgaaagaagaaggtggttgcctggcgtcaattggataatgtcgccttgggacgataaatggaaattcatttgtcagggaatggcattccgcagaatttgaatcaattaattaaccgaaaagaacggatacaattacaaatggtttcaatttcttttgcgcctttccggttttgaccttttcaatgagtgcttcttta

SEQ ID NO: 83276 - DNA, 435 bp, Heterodera glycines
atgtcctttgctgtcgaaaagtccttctgtcgaaaagtcctctgtcgaaaagtccgtcgcccctttaaattaccaaaatttaattaaaattcaaaaacgaatgattttcttgatatatagatagatagtatatgggagacggaatatttttgaatttataagagtcagttttctagggcaactaatttttgcatcaaaaacctgggttacatatataccctttttctgattcttaactagacgaagactataatcacaatgaaatataaattttcagggcttccataagggattaagatttgattttgatcctcacttcgtttccgaattcaccgaagaaaatgattggccaaagttggacgtaaaagccagtggaaaatttggcaaagattttctgcgtgacattgtcacctctttaaatccatattcggcacg

SEQ ID NO: 83277 - DNA, 938 bp, Heterodera glycines
atgacgaatccaacgattataaggattcaagaccaaagttcaaaaagagaaagagcagatacgggagaaagtgctgggtacgagcgaacgcagtgggaaccgcagtagcaagctgtcacgcagcagttcagagacacgacagcgtagcagaggcccaacggtgggcgctataaatttgtgctagccaattctgtaaaaaccaacacatgtgcaattatgtcgaaaaattttgtcagaagaaatgcttattattgtttgtgctaggtcatttcgtaaaagtgccaattttacattgtctatataaaaactcgtcaaaacttttcttaaaaacaaccgaatcaaatattcttggtaataaatgatgattcataattttgttctataagcatgaaaaatttcagaaaacttcattcagtttaaagaaagttatggaaattttttgaacatttttggtcacagcttcttgaaaactgaataacattttttgaatttttcatgctaatagaacaatcaaatagtagtatgatgccaagattattaagttgggttttgaaaagttaatgcgagtttctctcgaaatctgtaaaattggcacttttaagaaacgacctaacaaaattattgtgtacattatctttttggtggaattgaataaatttcagttgtcgaggaacgtgtccatttcatcaacaacatcgtcagcaagtggggtatgtaaattttttagcttacttttttatttaaatgtagagtgcgccgggaccgggacttgccgggacctgagaagccgggaccgggacctcgatttttttcgggaccgggaaccgggaccaaccgggaatttttaaaaattcaaaaatttttttaaaattcaaattttaattttttttcaactgaaaataatacaaaatataaatttttattttgttttttattta

SEQ ID NO: 83278 - DNA, 2988 bp, Heterodera glycines
atgcccacaactcacttggatcagcaaataaggtgggggtaatcatttcttctgaacttttagaccaaggcgacattattgttccaattacaccaatttcctccaatgtcgtagatgcagtttttaatcaattttgtaaagtggagcagagtaaatccaaatacgtcaacctctacggtgcgccgtttatgatcacggtcacagtacttaacactgacggacttccccgacaacgaacaatcaaaggcaaagggcaccctccttcttcatcatatgcccatatttttaaaatcaacaacaatgacaacttttgcctattttatgccattgaattaatgcgctattattcattgtataaacgtaatattatttctagagacaaatggcgttggattagtgacagacaaactacagttttgaggcaaaaagtccatcttcttctccgagaagcagggattcccacaacagaaactgaatatgacgcggaaatttacatccatcaagtgcaaggattatggaatattaaacacccgggcgaatataagatttttatcttcaacgactatcaaaaccgccctattgctaaatctgatgtcaccgactaccagtttcccatactcctctaccataataattatcattttgatggcattaaaactctttctaaattcttcaagaagcgttactattgtctctcttgtgaatgtatctacgaccgcaaaacaacacattctatgaactgtacttcactctgtcacggctgccgggaggtgggcgtcgactatccgtgtgagcctcagcaaatgtacttcaaaaaatgtgagcactgtaacaataaattttacaacatcaactgctatgaacgacatcttaaaaatgatatctgcacaaaattcccacgatgcaatgactgtggtgtaatatataacattaaatatcattcaactatgagtcatcaatgtggagaaaagttttgtcgcctatgtaaacaatttcacgtaaaagaggaagacgacgagaatccatgcagtagttgttttatccaacctcttaaacaacaaaaaatcaaaccgtaccggatcatagcttacgatttcgaggcaatacaggacaaaaaagttggaaatagtttcgaacacgaagtcaactttgcagcggctaccgtcatctgcaccaattgtattaataatgaagaatggaaaaactcactagagggaaaacaatgtgctatatgtggccccaaccgtacaattacattctcaccatttgattacaaagagacaacagtagaccaaaaaattgtcacccagcaaactctacgggaatttgtccaatggctactatttgaacaaaataaaaaatacccaactgtagcctttgcacactttgggggtcgctacgacatgacaatgatcatcaaggaagttattgcacacggtacaatttttaatattcatagattatatattttttaaggtgttcacgatccacaaattatcaaacaaggaaatcgtctttatgaactcaaaattaaggataatgagcatgccccactaacaattttccatgacagttacaatttgatgcctatcaaattatcgggtctcatcaaatcatttggactcaaaattcaagtgattcattttcataaaaattatcaattttttttttaaggataaacaacactttccacacatgtttaacaaatcatctaattatgaaaatgttcttactaatttaccgccgtgcgaaaaatactgtcccaatcaaaagaaaaaaactgatctgcaaaagttcaacgaatggtacaacaccaattatgaccaacattttgatttaaaagaaaaattacccgaatactgctgcaccgacgtcaaaattctcacccacgccctcgtcgagttgcgccgggaattcaaacaattaacacaaagagaaggaaatcatagaggaattgacattctttggcaagcaatgaccaaagccagcgcctgcgtcaaaaacgttgcccttaatcatttgagatccaactctctagctatagtcccggagaaaggctacaccccacaacaaaaccaaagtgcactggccaacaaatttcttgactggtactctcacataaacaacgttcatgtacaaacggccagttcccgctacggagaatatatgtttaaacgtgaagggcaggtttatcaagtggacggctacattaaaggcacaaatgggcagcgggacaaaataattgaagtgaatggttgtttatggcatgggtgtgaggagtgttttgatgatatggatgaagagacgaggatgccaaacgggaagacactgggggagattaggctaaggaaacagaggaaatatgaaatacttaggcggtacgtcgacttggaggtggtatgggagcacgagatcaataaacaaatgaagagagacaaagagatgagggagtatttcgaaaactggaaggattgctcacctatcaaaataagagaagcatttcacggaggacggacaggaccaatgaaactaatccacacagcaaaaccggggcagaaaatcagctacaaggacttcaccagcctctacccgtttaccaacttctctacaaaatatcccctagggcatccaaaaattatttctttcacgaccaatgagcaaacggtcaattggctttctccaactgacaacccctacaaaggattacttaaaattcttctacaaccaccagacaacaacgtcaaagttactgtaatgccaataaagtttgatgagcgcctgctattccctctctgtgaaaaatgtgccaaagttattagcaacaaatacccaaatggcctcaaagacaacgaatactcctgcccccacttcaaccccaacgaccgcgcctttgtatcaacctgcacccatcttgaaataatgcagcactggaggccggctacaccgcccgcaactttctcatgtcctacaatacgaccaatggagtga

SEQ ID NO: 83279 - DNA, 983 bp, Heterodera glycines
atgtttgatgacgaggagatagaagaagagaaggaagacgacgtgtgggctggcttggaggaagaagaaggggacgacgaaaaggaagaggaggaaaaattggatgtaaaagaagaggaggaaaaagaagaggacaaaaagatttgtatttattcttagacataatcaaattttttccaaagggattttcaaatcggaaaattttgacgaaaaagggcaaaatatgcaaaaaacctgaaaatattggtaaaatatgcatgaaatattcagaaaaaaaacatgcataaacccaaaaataggcaaataaaagtcccgatttttatgcgcaaataccaaaaagatatttttcctattaaataccctacggagaaccctggagaaaaaatgcatttgcatattttgacagctttgatgattatattattttgaattttgcaaaaaaaaaaattaaacacaatcaaagtacaaagtttcaggccttagcggcggcctttgcagggggctccgatagttttgcttaaaaaagtgctttttattgaagggcctattaaatatatttcatttgtacatacattgaaggcaattattggggcactaatgattggtcgggctctttgcatggcgggcattgtttgactgtgttggcgtcggtggattctcttctgaatataatagtagcttttaaccataataaacttttaataagtaaaaattaaccataagtaaagatacggcaccaatgatggtgaaagtgcaaatcttgcaaaaatttttttatttgttacagttataaatattaacattaccatcagaataattgtgataaaaattgataataataataataatgatgatgatgatgatgatgatgatggttgaaatggtggtggttgggtgctgaaaatattagctataattattaaaatgatttgttattattatgattaaatgattaatgaattaaaaaaacgcaaaataataaa

SEQ ID NO: 83280 - DNA, 108 bp, Heterodera glycines
atgcttgatgacgaggagatagaagaagaagagaaggaggacgacgtgtgggctggcttggaggaagaagaaggggacgatgaaaaggaagaggaggaaaaattggat

SEQ ID NO: 83281 - DNA, 1506 bp, Heterodera glycines
  unsure (1)..(1506): unsure at all n locations
atgataattattatggtagaggagtatgggaaactggtagtcggtgacatcagatttagaacaaagtgaatattgtatgttcacttttgttttggaaaaataattgattaaaaaacaagatcgtaagaaacgtctgactgatattactccatcttttgtctcttcaatacattcccagaaattatgtacttatccatttcttttctgataaatccaattttctgcttttcatcacttacttttctcgatgaattcttttgcagtttctcttcattagaaaggcagcaataattgctatttgtttggccaaataccaaaccaaaaaatactaagaacattattttattcacttttatttgaatatttttcaagttcttttatattttatttatttatttgatttctcgacacctttactaattcggcatcataaaatattcctttaatgttatccccatttaaatcttcaattcggtaagcattccgggttaattttttcgcttcatttaaaattttttgaatcccagcaaaacttgccgaagattttaaattataataaatttttgatagaatattatatttgttcattttgtttttcattatcgataatttttgttttatattttgatttctagatattactatattttcatctttttttgcaatattcgatgaaaatcgctattttctgtgtatttgctttttttggacatgtcttgttggcatgaatatctacaaatacataaaaacacacgcatttggcccaatctgcacctgcgcatgtaaacaaacacaccccctgcatctacacctgacacaaacccacatacacctgcctgcacccaaaacacacgtgcacacctctgcatttcacctaacttgtatctgcacctctggccggtaccaaaacaaacacacacacataacacgcatttacacttaacctgtatctgcacctgcacacgcagacattcacgcatcgcataaacacctacaggaggccgaggatgcaggcgctgatgatcaaggtgcgtttatgcgtcaattaaaaagcaatttaattagatttcgttgcagtttttattgtaagaaaaaattttttccgttttttaatttataaaccatttagtgaaaaaaataacaatttttgagaatatttaaatgtttttttgaagaagaaatgtcgttttataaaaattaaatatgtaagccaaaaggtctaatttattttcaatattcaaattattattatgtttatagttaaaattttaaaaattaaactttttaaaaactttttttttaagaatatttgntcataagcgaccaaatggcgctcgatgtttgatgcggaggcttcaagaagtagacgaggaagacatgtcggaagggatgagaagggaagagaaagatgatgcttttagcaccgacganccaggggagtttattgggtttttaaaaaggtgttaatttaaaaaacccgatttagttacagttttgggcattaaa

SEQ ID NO: 83282 - DNA, 56 bp, Heterodera glycines; identical to SEQ ID NO: 52733

SEQ ID NO: 83283 - DNA, 1434 bp, Heterodera glycines
cacccatcatcgctatcccactttttgctcagcacccatcatcgctatcccactttttgctcagcacccatcatcgctatcccactttttgctcagcattcatcatcgctatcccactttttgctaagcattcatcgtcgctatcccactttttgctcagcattcatcgtcgctatcccactttttgctcagcattcatcgtcgctatcccactttttgctaagcattcatcgtcgctatcccactttttgctcagcacccatcatcgctatcccactttttgctcagcacccatcatcgctatcccactttttgctcagcacccatcatcgctatcccactttttgctcagcacccatcatcgctatcccactttttgctcagcacccatcatcgctatcccactttttgctcagcacccatcatcgctatcccactttttgctcagcacccatcatcgctatcccactttttgctcagcattcatcatcgctatcccacgttttgctcagcattcatcatcgctatcccacgttttgctcagcattcatcatcgctatcccactttttgctcagcagtaatcatcgttaacccagtaaatattcaacaaagaacatcgttaacacacttcgactttacccaacttccacgcataacagttttgatacagctttcatcgcaaagcaatagcttagaaaaagcttttaaatagattaagctttcgaacgactccaccaatgtcggatttggtttacaaagaaaaaagttatagccaaaaacatgctggcgccgaaacgggagcgccgaaacggcacagggacccctagttacaaagcgtagtattttgaaaattttttcacttttttttgacataatttttttttaaatttatttacacattatgatgaatattaagcattaacaagacaattatggcgactaaaaagtatattcacgattttttatctcaaaaaaattttgcaaaacaaaagggtcccccctattgtttttgataaaattaaaaatctgtcactttataactagcgccaaatttgcttaataggcccaaataattgtcatatccatgatcagcgacctctaaaacccccgggtacttggtttcaggactttttaaattaaaaacaaattatgtaaaaaaaaagtgaaaacattttcaaaatactacgctttgtaactagcgccgacttttcaattgtgagctttgattctcttcctcctctttcagacagttggaagcccgtccaattcgactttctgctccattccgtgctgttgcgctgctctctgctcgagttggtcgagcagcaacagttgtccctggagaatgtgctgcgcatcgaatgcattcgccagtcacccgccccgcggccgaccgccgaactgaacgaagcgcaatgggtggccgatcttag

SEQ ID NO: 83284 - DNA, 1572 bp, Heterodera glycines
atgttgtcctcatcatcatcgtcagcgcctgaggaaggggaattggacgaagatgttgccgaagaaaatcagccaattattcagcaacagcgatttgacctgcttaaatcgagtagccaaagggatattctaagtgcaaacggatatgagtaccattttgaagcttacagtagaactgaacagggtaaaagcccaaaatttttgcctaattgatttaaattttgcctaggaattgagtattggaaatgtgttaaacgccgtccctattgtcctggaagagttcatgtcgctggagcaattaatagggatgatgatggcgggcaatacaaagtcggggttatatgcaattcccgggataatcaccctcctgtacatgtgtctgtacgaaggggacaaatggagttgcgccgatttgcagaagcgcaaaatcctcctccgaccagacaagccattgacgatgtccgaaccaacatcccaccggatattcgggcaacgcaagctcaatcttcctcagcaatgggaagatcatttcggaattacgtagcacaggcacgggctgaagtgggagatgatttgcttgattctcctggagtgattattcctgatcggcttcgtcaaataacaatttttgacggtcatgaggaaggccgacgactaattgtttttatgtctgagtttggccgaaatttgatcgcaaactacggatctcatatagcaatggatggcacttttaaagtaataaaaaaattaattatcataatatttaaaagtaattaaaaggttgcgccgagcccattcactcagctatataatattagtgtccttatcgatttcgttgcggttcctgccgtttatgctttactacagtcaaagagcactgcgcaatacgcacgagtacataaatataaatttaaaaaataatttacactcaaatattaataaaaaatttttattttttaaggttttaacatcagttcgccagcttttacaaaattggcatcctgaaacagtgatgacggattttgaaagatcagcaattaatgcggtcaatcaaattttccctcttgccgtgcatagtggctgtcttttccattatgcgcaatcaatctaccgaagggttatcagagttttttttttgctaaatttcataaaaatataggttcaaaatttgccgggactcaacgagcggtttttaaacccgcatgatccggatgatacaaaaaccctgattaaatcactgatcagtctcgctttcactcccccaggcgaaccactatataattatctgtgtgttcttattagacagttccctcaagaagaggaagtcgaaggtacggtaaaaaaagtttcctaagattaatatttaaaaaaataattaataaagaaatcgtcaaatattttgtgagaagttgggttggttgttcgcgtgttatgcaaattgctgctgtacctattgaagaggaagattacggtggagccgatgcatggatcaggcattggattgaaaatgctggattgcaaaatactgatgcaatttttccacaagaaatgtggaacatgtgtgatcggtaa

SEQ ID NO: 83285 - DNA, 303 bp, Heterodera glycines
atgtacaatacaatcaaaaataaattggccaattttcggacggagaatttctggcttctcctaatcgttctcggttagtataattaatatcatttttgttaatgaccgtttttcactcattaatatttctctttgctttacacatgttcatctttcagtaccaccaattgggctcgcccggcgtcaaatgagttggatggaggtggcacagcctacaattaaattttttacatgggcgcttcgtaaaactgcgaaatttacagaatttttgagaaaaattagtcataacttttcttaaataaa

SEQ ID NO: 83286 - DNA, 1824 bp, Heterodera glycines
aatatcagtgaatgtgaaacggatggtgatgatggtgatcattcatattgtgacacagaattagtgatcagtgctgatcaaattgatcagctccaaaaattgccagacagaaacattcacaaaaacactgttatccaaattaatgaaaccggtcagagttttcatgggcgaaaattgttgcagcaacagccgccaggtaaaaatgtaaaaatttattaaaaaaacggatttattttttatctttgaacataaatctataatatgtatgagattaaataaaattttaattttttttcaatgattttggcaactttagcaggtttaggtgccgaatttttaaaatatagtttctatcaaaagtcttgaaaacatatttccgacagggccaattggacggaaaacttttttgaccatgcatattttttcaaatcaattcaaatttttgataaatatggtcaaaacagatgcgtctaaaactcataaattttcttaaaaaatggcttaaatagcaaaaattggtcattttgggtgaaatatagtacaattcacaacctaattccaaaaaattttctcggcgctttcgccgcagtcataaaattcactttatatgctgaattgactcagataccggaaagcattaaggattgacaaaatttgaattaaaaaaataggtgggaaacgtttttcaaaaatttcggcttcgaaaatttcgtttttttgtgcttcgaacttcaaagttcgaataaaatttgggctttgccctcggctgcggcttcgagagctaagccgagcttcgttcaccctctgctgctcccgattaaatttgattttctcaacaaattttacagtatgtccgtcgggatatgtgctatttaattacatgaacgcatgcaattatccattgtctgtgaccgcagcgagcagagaatatcccccagcaacaacatccgttgctgctaacaaacaagtgtctgtatgtgcacaagctgtgatgtcatcgggacgagtatgggccagcaccgactgtactgtacaggtagaacacatacagtatacggatgcgggaagatggatgccaaacatttgtacattttaaataaatagattaagaagcgttaaattctgtaaacaaaaaaatcggtataaaaaaaattccaaatttccttccggcgacgctgtcggcgttggcatcacacagaacaaacctaaatatttttttagattagggcttcttttggttagaatatcttaaaacctgacgatgttttttttgaaattttgcagaatactactcatagagaacattaggactattaaatgattcgtaagcaattttttaaaattttggcaaaaataaaattaagacattcatttttgtactgtatttaaggattcatgtgtagcggcacagccacctgtgtcgctgtttgagatgacttttaacgccgatggcagtcagtttatggatgttagctatgtggacggaattagtgatccgatcggtgtccgtgttaaaaactgtcagcagggacaggatcagacggtcacatttgacccacaggcggtggccaatttgcgggcaatgtttccacaaatggctgaaacggacaccgaaactggcgtatgtctcaaaaaatatatataataatggccagaaatggcacagataatagtggaaacccttttttaatagctcaaagaatttaaaatatttttttttaaaaattaaaaataataatggcatttttgaatactaaatgtttttgtttacatttttacaggaattttgtgcaaaattagtcattttttatttgtctgtttgga

SEQ ID NO: 83287 - DNA, 667 bp, Heterodera glycines
atgcccccgggggtggtgccgtccctcgcttcgcttaccctttttctaccgtctccgcctgcgttggctcccctcggccctcccccgctccctttggccgtctcctccctttccgtgccgttctcttcgcctcgcggcgtcgtccctccgtttgctccgttcgtcgtctttttttgtccgttctttttgcctatttcctcattcatttcatttgtgtcatttaaaaattgctgcgaaagttgtaaaagtttgtcaattgtcgccggtgtccgtagattttgttgtttttgtccgccatttatgcccaaggaaaacgccgtcacttcgtccattgtcatcgccgctgaattctttttgaaattctgcgtttgcgcaatgctttcagccgaaggcaaaaagccactgattccgaaattcgcgtcaacgaatgatccatttgcgatccgttcaaaaaggccaaataaatttgctgttgagagaggtgaagagaaagggggagaggaggaggaagaaaggggcgttgttgtcagaggagggacaataggaggaggaggaggaagacgagaagcatttgttgaagaggaagagacgcaaggcggaggaggaagagttggtgctggaagaggagggaaacaagaaatgggaaaggaaaggagggggggggggg

SEQ ID NO: 83288 - DNA, 2857 bp, Heterodera glycines
ctgcaacccaaacgtgcaagaccaagccggggacacaccgctgcacatcgcggccgaacgtggactgggcccggctgcacaatcgttgtgccaacttggcattccggtcgatgtgcaaaatgcggtcggtgtataaaaaagaaacaagcagcgttattgctcgagactcaagaatctcgaccaaatgattgccactaatagaccatgggatagtgacttttgctgtttcagaaaggcctttccgccctccatttggccgctcgccatggccacattgacattgtgcgctgtctttgcttgtccggcgcaagtgtccatttgaaatcgaatgtaaatgatgttggtcttttccgaatttgtgattttatgccgcctttaaggatggcatgaccgctgagattatggcactagcccaagagcagaagcaaattgccacacttttggccaaagtgaggccggagaaagcgcgcacaaaattcgtcaagcaactgtccacagtggaaggcccgctgaagaggatcaagctgaaggtgttcggacatccaggtagccgagctaaccaatgaaattgatcaattactgattggtgtttgccgatcgcattatatatactgattaatcggcttggtaataaaagccctgaaaatttcccctttttcccaacattgagtcaaatggattacttatttatccctcatccgtcccccaggggctggcaaaactcggctggtcaatgccctgcagcgctcctccgcctcctcgttgaactcgctgatggagtcggtcacgcgtcgcttctccgacaatcttttcccggctaacagcagcagtgtggtcgtctcttcttccacctcttcaggtatgtccaaatatttaaatttcgtagcattttaacattttttgcccccgctttcctccgacctttttaatttcaaattaggaccgaaaagaaaagcccggcttggccatgtcatgcaaagtttatccgatttttcttattctgcagaccaaatttcgccgactttgtgtacaatcaatggcagttcctcctcaatgattatggcatcgccttcaaaaagcggtatgttttttgtagggaaaaatgccttccccagggataaagggcagagtttttaaaaaatctaacaagaatattcatttgttaatctcatcatgggcaggtgaagcggaatcgtcggccgatgagggcatccattcgggagtgccgtcctcctcctcgaccacctcctcttcgtcaaccaacggcgtcgtcggcattggccatcggcacaaaacgtggccatgtgcggagcgcaactcatcagggcgggcgccgacgcagggcattgacattcaaaacgtggcatttccaggcaagaaagaaaagcatttggagtttccaacgtgcatccacctaacaaccggttgtgtgatgctcgagagttgactttcggtctcgcatctaaattcaaagtctcgcgcggaccttgggcaaacaatagaattattttcattaaagttgtttttgatctcgacagattgcggcgagttttccgtgtgggacttctccgggcacgagcccttccacatttgctacgaccattttgtgggcaacacggactgtgtgcatttggttgtcacccgatggtatgtcggcggcacaaaaaggaatcttttcgctaaaccgttgttttcaatatattcttaaaagaaacggattgccattttctgtatctttcggtatttttgttaatctcttttagtatataaaatccaaaacaaattttttgaaattaatgagttgggttcaacaaattagtctcgtccaatacttcgttttaatggggcagacatttttaattaaactccattaattcagttcggacgatcccatggatgagtataaggtgaggaacgggcaattagccaaacattgatacgattattcaccttcccccttgcccatttaaggagttgctgtactggctgaacttcctcaaaggccgcgtcacgcccagcgagccgatcggacattgtggacaaatttcgcgtcgatcggtggtggccatcgcaggcacatttatgggcggcgaatgtccgatcaccaagaacgaggcagaggcgatgatgaggacgttgaagatgaggtgatcaaagagaaggagagaagagaagagagagagaagagatcatcagaaatagttaaggaagaaagtgataaaaagaaagagagagtgccttgagacatgcaaaactgtagagggagattgaaatagggagaaaatgggaagagattgatcaaaaagatagttgagaaggaaatagatagagcgagagagagagagaaaacgttatcaaaataatggtaaagagaagagagtaaccacggaaaacggaaaagtgagtaatgagagattaaaagaatggctaaatggaagagaccagtgagagaaggggaagaatgagagggaaaaagaggacagagaaaagattaatatgttgaaggacaaattcaaaaactaacttttaaaatagttttaaacattctcaaactcccccccccccgcactttgcaggttcgaaacccatttcgacatccatggccaactgtttctggtcgacctttccgcgcagtccgattgtgtcggctctcgcgaattgcgtgcctttttagcgcgtcaacgggacagcattttgatggtattagcatttaaatgtgtgctaattaaactcattaccattttgttttgattttcagaggcttcaacaccccctccgaatgttggactctgcgctggcctttttggagcaactccgtgaacaatacgctcaattcccatgcatcacgtggccttag

SEQ ID NO: 83289 - DNA, 2115 bp, Heterodera glycines
atggaggaagagagtgagacgcaagggaagagagagaaatgggtcgcggtcgttttcgtacgagcacaaatttttgtctataacttttttctttgccaaccaaatccgataatcctggtatcattcgatagccctaagtgtcctctattagcctgcaaaatctcgaacaattttcttaaggttttatggccagaagaattcaaaaaatggttatttgaacattttttgccataactttttgaaccttaacaaaattgttcgaaatttcgggttaatagagaacaacaaatttttttaaaaggctgaaattattattttctaaattttttggaggcttttttgtagtgaaagacgaaaaaaaaattttagtttattcaagtttgatttaatttttctttaaataaaaataaatttaaagaaatcaaatcaacaaattttatttacttaaaaaacctctaagaattagaaaactattaatttcagttttttattttatttttttcaacttccatttttgttaggtttgtttcggctccaaagaagctgccggtctgctcacgctcggcgtcgacatttccgtctcccaattgcaattgtccgcccgctcggaactcgccgctttgctggacgcaccgaacactttgggcatggactggagcatcctggcggtgaagctgaacttgactgaacaaataccggaggtgggttaattagctatgataattgattggttattattagggctgccaaaaatatgtacaaaaagtggtccaaatatgtacataaatatgtaagaaaaatcccaaaatatgtacaaaaaaccccaaatatgtaaataaaatttttttaatggtattttttgggaaagaaaatccccgtaaaatatgaaatagccacaaaatgacataaaaattactttttttggtatttttaggcaacattttcaaacttattttttctttataaatcttcaaaatatgtaaaaaaaatgaaaatatgtacaaaaatatttgccgaaattttggatttttttttgaggattttcaaaaatttccgtaaaaaatactcaaaatatggtaaaaaaatgaaaatatatatgaaaaaaatccaaaatatgtacaaatatgtaagaaaatcccgaaatatgtaaataaaagtcccggtttttgttcgcaaacacaaaaaagaaagtgtttttcctgctatttagagcaaggagaagccaggaaaaaaatatgtatttacataaaattggcagccctgattattatcccatccattagggagtggcacaaatgccatttgctctttttcaatggcatttatcacttcataaattttaaaattataaattttaaacattaataagttgcagctgattttaatattctaattacttgcaaagtattaaaaaacttttgggttttttgattatttttatggcaattgaattgcatgccaatctattaaatttattttgattttattaatccaatcgaaatgctcttttgttatgtcaggtcgactcgtcaggccaatcgttgtcccgcactgatcagctgctcaccgaatgggcacttcactcgcccgacagcgcttcggtgggcaaattggcctccattctgcaggagatgggccgcaacgacgtcaaagaggtggcagagcaataatttcattgacttaaatgaaataggttggggggatttcgcattggttggaagaaaaatgtgaagcgattagtgaagctcgagagtctcggtctcaattcttgacttgagaaaagtctcgtttttgggtctcgggttttcggtctcggagtcactctcggtctcgaatctcgggaaattttctgtctcgagcatcattagaacgaggcggggaaaggtcagagatgaaagggataagagagaaaagcgatcgtaaaggcgaaaaggacaagattttcaaaatgaaaatattgagtagatgatttttggtctcattcctttaaaaatttcatcaatttcatccaacaaaatgggacttttcaaattttttctcggcgatgcccacaaaaatcctaatcattaaaaaataggcgcaaaatcgcaaatttggttttttggtgaaaatcta

SEQ ID NO: 83290 - DNA, 685 bp, Heterodera glycines
tgactttctgaaaaaatatttatgaaaacaaaaaaatcgattttttcaagtgtccgtttggggtactcaaacatttatggggagcaaaaatccaacgcagaattaaagtacaggctatagggaagctattcccgaaggattcggtctccccataaatctgggcgcatcggttcggggggactgccccgaaaacaaaaaaatcgattttttcaagtgtccgtttggggtactcaaacaattatggggagcaaaaatccaacgcagaattaaagtacaggctatagggaagctattccggaaggattcggtctccccataaatctgggcgcatcggttcggggggactgccccgaaaacaaaaaaatcgattttttcaagtgtccgtttggggtactcaaacaattatggggagcaaaaatccaacgcagaattaaagtacaggctatagggaagctattcccgaaggattcggtctccccataaatctgggcgcatcggttcggggggactgccccgaaaacaaaaaaatcgattttttcaagtgtccgtttggggtactcaaacaattatggggagcaaaaatccaacgcagaattaaagtacaggctatagggaagctattcccgaaggattcggtctccccataaatctgggcgcatcggttcggggggactgccccgaaaac

SEQ ID NO: 83291 - DNA, 1080 bp, Heterodera glycines
atgttatgccaactgttcgcgctcatcggatgccctctttttctgcttctgatcgccgacattgacaaagcaatcgccaatttgtttcaatttttattgcaaggattcaccgagttgacaaggaaaatatgccggaagagaaccgcgaaaaagagtcccattaccaatggggaaaatggggtaaaatgtgttgaggacggaccacaacagcaaaaagggtgcgccggtgccgaaaatgggtgccatttgggcacaacggcgacggatgagagagtgtcggcattggcagcagtgccatttctgttcgccttctgcgcattgactgcctttgcctacgcacatttggagggttggcattggttggactgcttctacttttccttcatctccttttttgccattggttcgtctcttccccttcgatttgttctttatgtaacgggtgccaaaatcattcctcccccccccaccttcttgggactgtttttaaccattttcctactgtaggttacggtgattttgcgccgtccaattgcgcttctgttctgttcacaatttgctctgttgtcatcggaatgtccatgtgagtttttgagcagtcctttccaaattcgcttctctttctttttcagtgccactcttttgctcgattttattggcatcgaatacatccgaaacattcatcgaattgagagaacggcgaggggaaaatgttgtgggagagaacggaaaaagggcagcagagggaaacggaaaaggacgagcagaagccggaagaaatgaagaacagggggaaccattgagcaactgctgatcagtcacccggccatcaatcgataagtgatcacttattttgcccaccactaccctgacctatgaccattttttagcctaccattaaccgccgatcactctttgatcagtcggtgggtcagtttatttaaccattcactgtgatcacttaccatccctacgccttattatgccaattaaatttggtgttagtgatcacttattttcaaccaccgtccctttgccagaccaatttttgatcagtgatcactgtttgctgataaatca

SEQ ID NO: 83292 - DNA, 986 bp, Heterodera glycines
atgagcaaaatcagtcgaaggaattgggcgatcagagattttgtacgtttaggtcaaatcaccggcaaaatcggagtcaaaaacgaatggaaaagcgaaaaatatgaagaaaaagttacgcatcaaaaaaagggagaagaaaaaggaggacttggaggagttgaagaaggaaatgaaaatggtgaggcgaacaaaaacagaaaatgattattgtttttgggcggctttttcaggacgaacatcgcgtgccattggacgaactttgcgaattgtatggcacaagtttggagaaggtgccgattcgcgtttcaattgagcattgttttgttgaaccttttgccccagggcatgccctcttctcaagccgactgcgttttggcccgcgacggccccaattcgctgtcgcccccgcggaccacgcccgagtgggtgaagttctgcaagaacttgttcggcggcttcgcccttctgctgtgggtcggtgccattctctgttacgtcgcttattccgtcgatgcgctgactttggagcggccctcaaaagacaacgtaaggcaaagggaacgaattgacaattaatcagtgattgattttgatcactttcagctctatttgggcattgtgcttatgagtgtggtgatcatcaccggctgcttccaatatttccaagagcgcaaaagttcaaagattatggaatcgttcaaaaatttggtgcccacttatgcactggtgatcagagacggcgaaaaacggcaggcatggcggagtgacagaatgccaaaacgcgggaaatcaattttcagattccaagcagccaattggtggtgggcgatattgttgaagtgaaagggggcgacagagtgccggccgacattcgcattacccaggcccatgggtttaaggtgggtcaaacgcggacacaaactcatttaaagcaattagggcactgtaaccgttgcgttatacagcaaactcatcatcattca

SEQ ID NO: 83293 - DNA, 1118 bp, Heterodera glycines
atgggcacggcaatggacaccgacactgggcaggtgctactccgcgtggccgccttgtgcaaccgagccgagttcaagccggggcaggtgataagagcaaaagcacacaaattggcaaaaaatacggaattttaatttattcttacggtaaaattattccaaaatgcataatcattagcatgcaattagcgacattagcagcattttcattactcgatgctcactttttgttagcacgacgtgcccgttctgaagcgtgaatgcaccggcgacgcctcagaaattgccctgcttaaatttgcgcagctttcgcttcccggggaagacggagtcaaagaatttcgccgccaaaaccaaaaagttgtcgaaattccgttcaattccaccaacaaataccaagtcaagcgtttgcatcttaacttaattttaggaaatacaaagttcaggtttcggttcattacaccgcggcgaacgaaggcaatttgctggtgatgaaaggtgccccggagcgagtgctgtgccgttgcgatcggatgctaatcgaaggcgaagagcgacccattgacgaagatttacgcgcggcttttgagaaggcttatttggagctgggcggaatgggcgaacgcgtgctgggattttgcgactgcgcacttgacaaggaccgatacaccaaggtgaaaaataaagaaaaatgaatttaaatgaatggggggaggaaaagccttaggggagggaaacaatcgacacaattaacaaaacggaaaggctagaattggcatcgtttccagcaattccccttcaacgcggatgagcccaacttcccgttggaaggcttccgtttcctgggactcatttcgatgattgacccgccccgcgcggctgtccccgacgccgtggccaaatgtcgaagtgccggcattaaagtgaactcacaaaacttactaatacgtacgcccacggcattaatgtgtgaacaggtggtcatggtgacaggagaccatccaatcaccgcaaaagcaatcgcaaaatcagttgggataatttcggaaggaagcgaaacgatggaagacatcgctttgagaaaaggcattacggtggccgaagttgacccgaagtga

SEQ ID NO: 83294 - DNA, 362 bp, Heterodera glycines
  unsure (1)..(362): unsure at all n locations
gtgcaacggaagcgcaggcgcattgcgctgaaaaacaaccggccgtgttaagcgacgcgaggaagccgctctttaccanccaaacacttgctaaatacgcaaaggtaaagccggggcaaaagcggatggcgagatggaaccaaccgatacatttctttcacgggggctaactttttgtaatttaggaaaagcaggcggaaaaggtcgctcgtcgccactcttccgcttcgcactctcaaggctgaggaggagaaagaaagtgcgaattgacttccgatatgcgctcttttcgtctatgtttggctgttattgttttgttgttttgcaatgataattctttgcgataaattggcgaattgttt

SEQ ID NO: 83295 - DNA, 494 bp, Heterodera glycines
atgtcaatttttaccaaggaaatgtcaagcgctttggcgcaaaaagttcgcgacaattacgaagaattgtttccgcaaagcaaaaaggcagcgttttcgcgccgttcgcaaattgcttgggccaacattacttcagaaattaatgccgaatttggcagcagcatttctgaaaaacagtgcaaggaaaaatggcacaacttaaagaaaatagcaaaaagagaaaacgcaaacgaacaaaagtgaagcacacaataattattttttaagttacattttacaggcatccccgtggcacgggcggaggaccaaaacgacttgaatctaaggacccggctctgcaaattattacggacactatgggcgagagcgcctcattcaaaggcattcccggtgggcggagttcggtgaaagccgacgaagcatacagtgatgttagtactccaacatcagtagagaaagaagtgggttactattgtgttatattagtactgtaa

SEQ ID NO: 83296 - DNA, 920 bp, Heterodera glycines
atgttaattcatgtatctattatctttttttatttaaaacaaagaaaatgtaacaacaatattattttatgttaaggtaagtgtggatataacaatataagtatatattttaataaaaatatagcaacaaattctttttttacataatctttaattatagaaaaatgttatttgcacaaataaaaaacaaaataattcaaaaattattatttttttaaatatataatatactcttataagaattcgggaaaaaaagaattagatatttgagagaaccaaaaaaccaatagcgcaccatggaaatgtttaaaaattgaaagaaaaaatgaataaattttattataagttaataaagcaatgaaaatttaattaacatcatttccattatcatacataatttataaattgagaaaaacatagtgagttaaatgaagacaaatgaatttaatgaaatgaaaatgaaaatattaagtatttgaaacctcttattaataagttttaaatttgaattagaataaaaataggaaagaataaaaatttttgatttcagaaattaatcgcgatattactgaatatatcttatagaggattaatatccaatattttttcaatctaattgctgttattaatccaaaacaataatttttactttttgatacatttttttactttgtttatttgtaattttaatgaatccgtctttttccatattttaaatttatatatgttttttctttattaattgtaaaattcatttaattatatatttcatgaactaaatttgttatttctgacttaatatatttgttttgttgtaattctaatcaaattttttattaatagtctgttattcttggcaagcggttcatctttcaaagttaacttcaaacattgagtattgtaaaaaaaaaattaataaa

SEQ ID NO: 83297 - DNA, 567 bp, Heterodera glycines
atgactgtcattaaaatgttgatggcctcctattttctttttattttctttaatttggcaaccgctcaaaatgaacagctgaattcatccacagaggagccaaaagcctataataatgtgttgacaaattcctcatcaacaagttcgaccgataaaagcacttttttggcctggatttcatagcttaattggaaaatttattttcaactgccaattaatttaacaattacgtactattaaaaatatgtactaaatttaaaaaattacggaaggataatcaattcgtacttattatttaatatttatttattttattttcctttttttcagcttctcctccgtttctgtttggctgtccgccgggcgaagagttgcgcctttgcagtttctgcgatggcacgtgccgtttcccggtgccgttttgtggctttttctgctcgttggtcccgcgctgtttttgtcagttggacagattgagaaacgcacgcggacaatgcatcccgcgcgaccaatgcttctcgaggcaaacgccggcggagagctgtataagaattttcatttaataaa

SEQ ID NO: 83298 - DNA, 853 bp, Heterodera glycines
aaagtcatgcaaaagcgttcggctgtctgtgtgcttgttggtgatgaggacccgaatgtgaaggggaagattaacttcatccaggtcataaatctaacagaaaatttcttagcatttttgtagcttctagaatctcggaatttaaggttcaatttttgcaattgcgaaaaaatttaccattactaatgctattccttccataatcttttaaagttattctaatttatgaattaaggagaaggatgactctccggtgaccatccagggtgagatcactggcctttcgcccggaaaacacggcttccacgtccacggtcatcgaccaacccatttatccattttaaaataggatttgttttagctttcggtgacctgtccagcgggtgtatgtctgctgggccccacttcaatccgacgaacaaaacccatggtggaccggaggtggttaagggagagggcggaattaaaggatgatatttgataaaatcgcgcttccttttttgattagggatatatttttatataaaattaaggatgagacgcgccatgtgggcgatctcggcaacgtgttggccgggcaggacggagtggcaaaactcgatttcacggacaaagtgatttcactggtcggtccgcacaacatcatcggccgcgcgcttgtcgtgcacaagctcgaggacgacttgggttcgagaattcattaaataatctaataaaattaaatcttactctcaatttgctaacaaattgactttttttaggccgtggtgaaggactcaagaagccggagagcatggagactggcaatgcgggtccccgtttggcgtgcggagtgatcggaattgctcagtga

SEQ ID NO: 83299 - DNA, 84 bp, Heterodera glycines
ctttattctcttgcattttccgtggaccttcaacacttaacccacaaaaacaaatgaaccgaattcgaaaagcattgacagtac

SEQ ID NO: 83300 - DNA, 729 bp, Heterodera glycines
atgggcacaatgggagagggaagtgatcggacggaagcggtggaacacggagaacggtgtgatcagagtagcgatcggcaccaaagactacgggtgagaggagtacacggcacacaccggcagcagtttggcaccctcccttcatggctttaactggcccaattagctgaaacattcggtttatttagttcaatatgcgaccgatcactgcgaagtcggacgccgaaaaacaaatgattggtggcgatttaagagcaattgatcatcatttttaagttctttaaaatcattattttctttctttttggattttttattttatatttccaaaatttaaataaagcaaaagaaagttttttttaatttatccgtcacagttaagcggatattctgtggacattctgccaatggtgcagattatttgtctgagaaacggatcggatcagagccttttggcccaaaagcgaccagaaaatttgggaagacgcccaatttaaggcagaaaagagaagccagtttcaaaatccatctttatttttcactacatattataaaaaatataaattttgctaaacaattccaaccaaatttattcatcgattctgacgctgaaataatccaacataatttgcgtcagaaattcatcaattgacgtggcaccacaacgagctgtttgcccaattcattttaataattcaacgaaagacagtttttattattttcaataaa

SEQ ID NO: 83301 - DNA, 789 bp, Heterodera glycines
atgccaatgtttaagttttggtattttaatggaaattttcggaaaattgcaaaggtgagttagggaggaagagcagctcgtttgcgcctaaatttgctgggaaaatttcaaacttatagaaaaaaatttgtaatcagtacaaagtattgttttctccctcactagacctactaccttcagtattcggtcaccgatacgcaaccgtcgcgtgaggtcggccggcgagttggacgcaatgcgcgagatgaacacgcccgggttggcgggcgtgccgaacgggtgcgagcagtggtcaatgccgccaacgatggacagtcccagcgagttgtgagcgtcgcgcacaagcggaacttcctggaaaaaatataaaataaaacaaaaaatgaatttctcaaagcactcaactctgaataaaaaaatgtgcttgatggaataatcttacgaaaaaaaaatcaaaataaatcatcatgcttcaagcggactcgaacccatgacaaattggtcattaaaatgtaagagggaaatcgcattatttatttattcaataaagaaaaggtccacaaaagggaaaatccgctgactttgtggacaacataagtataaattaattgtcaaaaagtaatacggataaaattaaaaaaatgaataaaatatttaaaagagagatcacaagttacacaattaaaagtaaatataagtcaaagcggctaaaatttatcaaaattatcgaacgcttatgaactatttattaaaaaaaaatattttatttttcagtcatttggcttttaa

SEQ ID NO: 83302 - DNA, 354 bp, Heterodera glycines
atggcacctccgacttgcgggttcattgaggtgctgccgattccaccgcaaatgcttaggccgagcgggtgcgtgtcccggcgcggcacaacaaccacacggagaccgtccggttgacgctcatggcgtacggtgatggtcagcgcgcggccagtggccttcaacgcctccaccgcgtcggtgtgccgggcgccggaaatgtcgcgcgagcagaccttaattaattttcggtaaaaattaggcaaatagaaaaaggtggagagctcagcagcaggtggttgaacaccgctagaaaattaaattttaaaatttgttttttttttgaaaacatgtcctaatttcagaacaatttag

SEQ ID NO: 83303 - DNA, 1491 bp, Heterodera glycines
atgtaccagaacattgctgttggcactgttggaggcgatcaaaatgccgttgaagcatcatcctcatcaacgatgatggcaccgaagaatgaatcaatcggaaaaacggtggtggagcgacagatgtcagcctcagtctcattgttggacgttggcaaacagtcggtggaagaacagaaaaaggtgtgtgtgatgtgtgtgtgtaacaagggttgcgttttccgaggcccaaaaattttttggaatttgaaattccggggtgtaaaaattttttgtatgtgatatgtgtatttttgtttgcacacaggttcgagcccgctctgtgcgatgcgagaattattttattcttttctaatgacagagaaaatgaactgtggtagaaaaaaatgcatttaaactccctaaattaaaaaattatgcaaaattaaatactctacaattcgtttttaaattaaattatattaaaattagttttaaactttaaatttatatttcttttgtagcaatttgaagtgacgaccttctccagcgtgtcgtcatcgcacaaccagcacaatcaattgccaaacggcaccatcggcaacaaccacaacaacaacggtgccaatggcaggaaagatgacgacgattttggcacagagcataaaaaagtggcatcgtttggcggttctcctccgcctgttgcgccaaagccgaaaacgaacgtgggtgcctatacttttctctttggatttttactacgggtgtttgttttttgtaaatgtttttttcattttttcaaaaattttgcgcatttcctgccggtttcagtttacatcgtttgccgtcaacgccgctccccataatcataaacaaaatggcaatagtggcggttgtactgacacgacgacaacaacggcaatgatgaatggcggcgtcgccaccatcgccgacggcactgcgccggaaacaacaattggcgacttttcgagccgtcttcgcctcttccaacaacaaacgcagcaacatcagcagcagcaaccgataatgccgaaccggacaacgagttcaacaagtctccagcagatggcgggggcggcacagccaacagcagcagcggcggcagtactgcccaagctgaaacggccattgctcagcagcgacgacttggccaagctggccgaggacgaccaaatgaggaccaaagcggcggaagctgccgctggtgatggacgccgtagggcagcggcatcgctgggggcggcggcgggcagttcgggcgacgcgtcctccggcggagagcaaccgttcccgtcgccgccaccgccaattgctgctgctgccggaggcggcgcgaagacgacgacgttgatgctttcgcccatgtcaccggttgtcgacggcggcacatttgagcatcttctcaatgactggtaggccagcaggaggcgtggtcaaagtgccaaatttctatggtatttgccatatttttgtgccttcataattaaaaaa

SEQ ID NO: 83304 - DNA, 1106 bp, Heterodera glycines
atgtgcacgaaacagcaacaatgggcagcggtgccggtggcggggcagtacaacagcgccactcgcctgcaggtgtgtgacaaatcagatgaggagttggagacgaacgggtgctgtgcggttgtacccgccggatatgaccgcagcggcgtcggtctcctgaattgaggactttttaccccctccccctccccgatttataaattccaaatttaagaatcgaaaaagtgataaaaaattttctacgttttcttaatttctgaattttttccagcgagcaaaattaaaataacaaatatttaaataaaaaaaataacaacaacaataatttgtggttttttcagaaaatttcaacgtcaaatgatgaaaagaaagatggaaagtgtgatcacatatttttggctgttgctgcccagtttgcatttgcgccgaaggcccgcccccctttttttatttttcgataaatgtgcaaaaaattgtcccaatgaatggctgatcaaaaccaaaaagaaatgtcctttatttccctcttctgtctctttctctttctattcaatcacttattttttctgtagccaaaaaattctcaaccaaaaataacgcgccttttccatttgctttttttttctcattattcactcatatattcatgtatttatagggcctatcacagaaaattttaaaaaaaatgtatttttagggagggccttgagccaaaaattgaaaaaaaaatggaaaattttctgtgacaggccctgtttttcattcaattttttgtccaccattaatgtgcaaagaaaggttcaaattttgattgatttgtatatgtacacaaaatgtttgttgtttctcatcacacaatttaatgtgcccattttttgttttttccatcattttttgcgccaaaaattctcacaattacatatttaacctaattattgtccgcaaaaccaaaaaggaaagcattcctcccatccaattatcatcatcattatcatttacctataattaagtgtttgtttctttcttttagcctctttttttgataatttttgtttttgcctggtgctccatttcacgttacacatacatttgattgggaccaa

SEQ ID NO: 83305 - DNA, 1911 bp, Heterodera glycines
atggcactgctgatcatgctcatcagcattgtcggaacgttcggctgccaaccatccattcgagcatcgggaatggacccgaaccttccatttcgagagggcccaagagtcccatgcaccacggagtgtgcagaacgaggagtcacaaatgtgagtgggcgggaatttaacaaaatcgagattcgttgcgatgacggatgctgggcaacaatgccaaagtcgaaggatgtgaactacggactgccagcgaaaaagctgatgcatggctatccttgccatgacaaatgctggtgggggagcaatgcccctttcaacacaacgaggcgcaatgccaatcggaaaacgggttcgaaaacccgttgctacaactcatggacacacgcttcggagcttcaactgtcaaggggcgccgcgggcaatgtcgccaattttttcattggcgacgagaaggcgggtcaatccccgcctattacacaaatgaacgggacgggactcaatcgaagcaaaaagaatgagggatgttcttggagaagatcggggcgagtcccgattcatcaattcattcaaaattgatcattcctaatttttgccccttttccatccaatttctcatatgcatttctccatttcgtaccattcacattttgcccgttcctttgtcccatttttgccccatcgcatcccttcacaattcaaatcttttctcatcggttggctcatcttcggccaactttgtgctcagatttcctttcacaatttctcactttttacatctgccaattcacattcaatttttgtgcgcccatttcctttgttcgcaattcgcttctagaattttctgtccattttttgtctctctcacaatttgtctaagtgcatggccttttgcccttcccccttcgaaaattgtctatttaagcgcccccggccaaggggtcgctctcttctcttctcttctcttctcttgcttccactccccttcgcttcatattcggtctgcctgtgaccaattcctccaattcccccgtcccatcgcccaattcgatcaattcgtcgcttttattcattattcgttttgctttaataaattcgtgctgaaacggcttggaggactcggaaaggagggaaaagcaccctccacactccatcacattcggcaaattctcgtgcggggccaaacggaggcgcccattcacgtcttgaccccttcctttcctggcagccctcgtcgttctcccccaatcctcccgatcccagttcctttccctttggcattggagaatccgggagttggcccggagcgtcagcgaatttcaagcagttcagactcccgcagccggagtctcgcggatcggtgtcagtctcccgccagccggagcagccgtagggacggggcgaattcccgtcgtcgacgaaaccaagtagggcagagaaggaaggaagagccgagcggtgccaaaccgtccaccgaagggcaggcccgttcgtcgccgctaatcccaccagccggagaagcgcgcatcgccggagtcagtctcccgccagccggagcatccacaggaggagacgggagtcgaaacccgtgctcatcaagtcgagagcgaacgtcacgaagttcgagcagttcagattcccgcagccggagtctcgcggttcggtctcagtctcccgccagccggagcatccgccgcaggaaacgggagtcaaaacccgtttcatcgagtcaagagcgaagagcaactccgcccgttcggagcagctcaaagggtcggacaagcccccttcacaaccaatcttgtcgagcaactcccgcccgttcggagctgctcaaaggggtccgacaagcccttcaccaaaatcttgtcggtggtgccgttaagcaagcagcaaatcgctgtataacatccaaca

SEQ ID NO: 83306 - DNA, 695 bp, Heterodera glycines
atgttgctggaggatggcgccggacaagcgcaacgcgtccaacaacagcaacaacaccaagtaccaagcaccagtggaggagttgtgccaactgttcaacaacaacagcagcaacagtcggctggcaacaaggccaccaaaaacatggcgacagccagtagcagcagcagcaagagtgccgccgccgccgccgccctcaacggcggggggcaacgggcgcaaaaaggtgcagcaccatgttagtagtgcactcactcgtttccggggccctatgtttcctttccccccccccgcccccccgccccacccactgtgtcgtttgcccgccatatcattcccatcccgcgaaacaaaaaattttattttccaaaattagaatttttttcaaaaaaaaaatcatagaaatctttcaaaaaattttagtttttccttttttaatggattttatcaaaaaaaaaagttttaatttattgctatgtaacattcttaaggtcgatcagccagcgacgacagctcgaaaaggaagtgttcatcaacagcaacaacaacaacaacaacaaaatgcagacaaatcaacaaagacaatttcaaccaccggcacaagtgccacaagcaataacagtggcgggggcaacaaaatgccatccatggcctataatgagcaacaagcaaagctcaaaatggtgttgaaatga

SEQ ID NO: 83307 - DNA, 1008 bp, Heterodera glycines
atgccttggcgccgttttttctatcgaccgtcgttgtgagttccgtacgataatttatgacattcttagactccctccaaaatcatatgtcattgatttcgaagggtactaatccaaagcagaggacagcgaagtgataaggtgagtaggaatagctcacttccttttttggtgtaaaatttttaaaaatatgaaaaatgaatcgaattccattgtttacatattttcacaactgaagatttatataatattttattaaatcctttcagtgtttggctgaatagcctttgtgatgatcattgcgatgactccgccaacccaaaagcgctctccctcaaaggctttgattattccgctatttcgttggatttaatcgaaactttgcacgaagtttctcttttcttatcgatataagcataaatttctgtgttttcccctccccccccccccctctccgtcccccttaatttgcctgatgaccgtacgtcccctcgagggtttccaatgtttggcttatttttggccttccctcatcacttaagcgatgttttcgcgcagaaacccacatttttcgcccgccgtttgcccaatgtttggcggaacggaatgttatgagaagagagaagacgcgccgccgggggggggggggggggggggggagcacaaaaacagcggcggatggcgcattgtcacttcccttcgccgcttcgcttcgatgcgatgggcgcgcacattctcccgcacattttttgtcccacgtcattcgccaacgggcaaaaaaacggtctaaaaatagctcacttattgcatcccaacgcaccaaaattagccaaaatctcagcaaagcccccgccccatcacagcacaaacagaggggcaattcagcagcaattcattcattttcccattttcgtcctttagtgcattttattatgcttttgtttgtacgccgaaactgtcagaagcgaaccgccgcgtgacagcgttagaaaatgacaaaaaaataaa

SEQ ID NO: 83308 - DNA, 199 bp, Heterodera glycines
atgcgactgatcgaagcaatggccaacagcagagagaaaataatgggaacaaaaattgaggaaaactcatcaaaaagtgtgtcggaggacgacacatcggcggaggaagaggacgaggaaaacattgagaatttcagaccgaatggaaccacaaataggaaaagagcacaccgaaatcccacctcggactcggcccaat

SEQ ID NO: 83309 - DNA, 2945 bp, Heterodera glycines
atggaaacatttgttgaaatagtcattcaccaacactcaacaccagaaatagttgtaactgatcaggggcgacaattcacttcagaattatttaatgatatggcaaaaatttatggatttgaacattgcacatccacggcttaccatcagcaatcaaatggccaaattgaggggtcaatgagaattatggcaaacataatttcacaaatgattaatgaaaaggggaataattgggacgaagtgttatcccatgctttattcatttacaattcctcaattcatacagtcactaaacattcaccatttttccttttacatttgcgccacccaaaaatgcccactgatcgcttacttaaactccctaatcaggaagaaatgaattcagacatttcaatttacaccagaaatcatgtttcaaaagctgtgactgcttggaatgcagtcaaagaagcagtcacaaaggctcagattatacaaaaggacgaaaatgataaaatcagaagggcagaggaaaaagtgattgaaattggtgatttgctcctactaaaaaaggaagttttaaagcataagtttgatcaacgatgggtaggtccattccgttgtgtaggagtcgataagaccaagaaaaatgttatcatacaacagatagatggaaaaggaaaattaaaaaaggtacaccaagaaaagattaaaaaattcaacgggccggcggtccttccgctaagagaggcggatgaacccttaaattgggaaaaatacgcaaatgatccaaatttggaacaagaggaagctgaagaaagctcagagagcgacaaggactcagaaattttagaatgtgaagagagcaaaaaagacggtgaaaataaaaaagagatcaaaaattctttttccaaatttgggtttgaaagtagcgatgatgaaaatgaaatggatcaaaaagaaagaattgtgtttgtgagaggtacggatgaaagagaaatggaggaaagacctgaaattttggacccgcaaatttgggacattgagcagcctatgccttgtacaattactgaaatatttgtagaaggggagtttaaatgggcttatacgagttggccagaggaaaatttgattcctttaacatcgttaattccaagcaattttgttaaagattactgggaaatttacgaaaatgcctcaggcaacagattcttaacagcatggttgctcgggaatagctttgagttatatttaaatgatgaaacggacaaaatagtcttgggaatacaagttcaatttgcattaaatgacatatggcactcaagaactgaaagggaaattgagtcctattgggaaccattaggcgaaatggacggtcaaacattagaaatacaaagatttcccgacttaacaattacccataaagaaaatttggaggaaaacgaacaaagaaataacatattggaccaaacgaacattaatgcaatttgctacaaaaataataataatgataataaaattaaaaataattatcaaaatggtcgtatggaacaaagtataaatgtgattaaagaaggggatttgtttatgagcatatttgatttaaatgaagaaataaatcaagaaatatatgaagaaaaatcagaaaaatatgaacaagaaacaaaaaatgatggtgacaaaaaagccgaaataaatcgtgaaaatacggatttcctaacaaaaaaacttaacagggaatcaatgacctcgccaaaagcgcctgcaatggaagcattcaatgaggagcatttaatcgccgaggaaaagaagttaaaaagtgaaattgaggagttaaagcggcgactggacgaaacaaataatcgaaaagcggaagcggaaaagagaagaacagagaggaatgagagaagacagatcgatgagatagtattggatgtggaggaagaagaagaggaggaagaggaagaagaagaattggccagacaggcaaaaagggggcgcctggacccattggaaacaaaaaaattggtggaaaaaacgatcaatgaaaaatgggaaggccaagagctggtcacaattgacccacgggcggcaggctttaaagagcccccagagggaactgacagccggggatgggaagacgcaatcaggctgcaaatgagaggagaaagagaaaaaggatggagagaatttttgtcgacgaaaacgtcgctggatcaaatgaaagaagacagattgaatgtgatgggaagagcgggattgacccagagtggtcgaagaatggcagaaaatagtgtaaagagtgcagagaaaagcataatggaaactgaatgcattctgccagaggggaaaggaaaacaaacaaaaccgtggaacgaattggaaatgcaacgggaaagcacagaagacatggaaagaagaagaaaattcgcagttcggaccccgccaaactcggaaccttttgcgaattccgggtggggagaaatgtcaaataacgaaggaaccgaaaaaatactggataagatcggggaaatgcaaaagaagttgaacgaagtcaataacgaattaaattggttggcaaaagatgtgcaagaactgagccaaaataaaggaaatgagataaaaaaaggggaaaatggccagcaggacaattgggaaaaaggcaacacaaacatccctttctggagacaacatgacgacaatcgtttccgtggtcgtggcacgggcggaaatcgcgggcgcgggagacaacgcccatttcaatatgggtggcgaggatcagatggatggaaaaaaaatgatcagcaccagcagcagcaacacaatgacgaagcatgcaccagcagcagtgtcactacaactcgctacaccggagaggaattcacaagaatggcaggataccgtgattgaagaaaaccaatttttccaataacgcttatatagtagggaagacggttaaaaaaaaa

SEQ ID NO: 83310 - DNA, 80 bp, Heterodera glycines
atggaggagaaaaagcgttccaagcaattttttgcccaaaaaaaaaaaatcgaacctcctcaatacacatcgaaggcaga

SEQ ID NO: 83311 - DNA, 265 bp, Heterodera glycines
atgccgtgctcgcctccatgtacagctcgcccgtgcgggcgtcaacgcggaacatgcccttccgtgcagtcggctcgtccaacctatgaaagcagcaagcacatcagtgagtataattgggcatcaataatgccaatgtggcggagcatgacaaaatgtcgccgcaaaaacaataaaaaaattttagaaaaaaatcaaaaattattagttacccttttgttttttttcaggaaattcagaaattttagttttcagtaacacctag

SEQ ID NO: 83312 - DNA, 1314 bp, Heterodera glycines
atgccaacggaggagacggagcacgagctgggcgtggaagtggttgttgacacacagcagcaacaccaacaagtggttgcacgacggacattcacggtacgcttggtacaacgtacaacaactgcaacggcgacgatggaaacggcgacgcggacaagatcaagcagtacaccaacaacaaccgcaacaccaacaacagctgaacaagagagcgatgtacggagggctaataggggaaatgtagcccggaaaacgggctttttgccaagttattatgctaaatcccagtttggcatgacgacatttcgcccactggacatttcgcctactcaggcaaaattggacaaatgtcttattttgacttaggcgaaacgcccggttttggcttacaaattagtaggcaaaatgtcagtgggcgagctgtcaagtagacaaaatgtcggcgtaagccaggtttagattggaaccttagaccaatcccaagggtgggggaatggcaccaaatttcggtagaccgacaaacggcactgtttagcccagattaagcctaagcctggtctggaaatcgaatatcccggactggcttgtcgagaattgcgatgcttaattttatttgaattttttaggataccactgctactgcaacggaaatgccaacaaccatgacaacagtagtaacagaaacggcaccaacaacaacaccgagcagtagcggtagaacaaccacattggttgaagaacaacagcaacagaagcaatctgttgatggtggtggtgataatgatgaagaggaaaggtgtggatgaaaatattttcaagttcgacaatttgacaaaaaagcctgaacctgcattccattttggatttgatgggcctggattttctgcgtaaaaatccaggtccaggaaaatacaggcatggatatatgcccagatcggactcaaaataattatccattttttaaatgaattaaatttgattccccaaggggaatgcaaccattagaaaagcaaaagtgccaagattggcaattcatttcgaccctttagggagtgccacaaaaaatttggtgacccttccccatagagaatatgccgaaaattggcaatcgatggcccaattatccatctaacaaagtaataagtggccatgaattcaaaatttagcacaattttcccggacgagttggacgacgaaccatttggcacaacgacggatattttgccggcactttcagcagtgccaccaaattcttcagaggccagacgggcgccaactgcggcaccgttggtgccattaagctcctcatcagtg

SEQ ID NO: 83313 - DNA, 429 bp, Heterodera glycines
atggaacggcacgccagcgcatacaaagtcaatcggatttatgaatggcttttctcaacgtctacaaaccaacagggagttgaaccactcgatgatgacgacctgctcatcgcatttgtgacgagggacagtgccaattttggccaatattgcatggaaatggaggaacacaatttgttgatgcaagtcgggttactgttgaggcgtaagggcaagggcaaatacgatattgacgagacggtacggtatttggaacaacagtatgaagcatatttgggcgcaatgtatttgttgagaaagaaatggaattgtgacggaattaaagatgattttctcacatgggcagaatgtgacagatttagaagctatttgatttcattgtatcaattcatctttcgttaaatatctggagggtaattaattaactaa

SEQ ID NO: 83314 - DNA, 325 bp, Heterodera glycines
atgcacgccgtcagcgccgacgttcatcaagaggacttaatgactcgtaagtgtcacgaaacgaatgtttttggaagaatgtaaagtctccgcccaggataggtagcttcaattacaatcaataatatggattgcattttactagagctcgaccttttgaaaaaggacctggatttcctggacataaatacaggcctaggaaaaatgcaggttgccgaaaatggcatgggcctgattcctggataaatctaggcttggatccccaaggtcgatcattgcattttacctttcattctaattgattcgaatcatgattcgaattaaa

SEQ ID NO: 83315 - DNA, 343 bp, Heterodera glycines
atgaaagcgatcactgcactgcgagaagagaagctgaaaatgcgagaggaacagcttgagcaaaagattttggtaggaaaatttaaaaaaaaatggaaatgaaatgaaatttaaatttttttttaatttttcagaaagacaaagaggagagacagaacgcatttgcggccgcggcagaggagcggcggttgcaagccgaacaagagctggaggatcagagaaaagaatggaagaaattgtcgatggaaaaggacagcaataataatgatgggaaaattgatgataaatgattgaaagaagagccccttttttgtttttcaatgagaaatttttacgtaataaa

SEQ ID NO: 83316 - DNA, 1523 bp, Heterodera glycines
gtggtacggacgaagcaatggaaaccgaacagcagacaggaaaggcaaacattgaggaggacacaatttctgtgctgggagaagatgaagccgaaacgccaaaagtgatttcctggagcacatgttgcactggtgatcagcacaaagactgcgcggaccttttaatggctgatctggatgctgttttggaccgttctggaatggggcttctcaaaatcgacaatccgctgaaggccctgctcgccaatttcctgctcaagtcagaagcggtgaaatcaggatcggccggaaagaagctgattttgcaaattttggaggccgaagtcagttgggagttagccacttactgcagtttgagagaagacgacgtaaaaagtggcgcatttccgtcagaatcagacgtggaaaagacattggaagtgtgggccgagcagtgccaaatcgtgaatgaggaattgaaaatgaccggcatgggtccaatttcaatggaagtgcccgaaggcctgtcccttttgccggaaaacgaaagagaagggctgaaaaaggcgatggaaagtgccgggtttcagctggagaaaatccgggcggcctcaattcacagaaaacggctcattacggaagagcgtgtaattttgggcgattcaggcgcattccaactaatgaagatttggcccaagtcggaatttgttggagcagaagcaggctcagtggcggaagtgatcagaaactttgatgaagtgattctgtcatcaaaagtcaagtggttggtcgtgatggtcggcaaagactcaattttggcgggcgaagcgattgacagtgtgatggaaagagtgaagagactccgccaattgtgctcaaaatttggccacgtgaaaaccttttggctgttgccgccgttcattttttccaaaaagaacgaatccgaagagttctgtggaagaatgcggtcaattttccgaaaaaaggacgaaattgagctgattgctgtgaatgaagaagggcgaagcctattggaggtgttccgattcggcaaaagcttcaataatgaaactgtgaaccatcatggatggatgacggagaagggattgaaggtgatgaaagcatggctcacggcggtggttccaggatttccgggtgaccgagaactcggaatccacacaattaagtcgcaaataattgtgccggaaagaggtgccaaagtgaggggtggaggtccagcagaccctccccaaattggccacaattggtccgagaaaaacgggaaaagaggaggcccaggtgacctttccccttctctatccgattcagcttctgagcatgcccaaaattcagttcggtctgtgaatgtgcgaagttatggagagaaaagtcattttggacgggttggtgcaggtcaccgccctggtccttcatttcgtggtcagtcgtcgtctcaattccatccgtatcagcgcatgcgcggagggcccttccaccattcgactccgatccaacgccgttccgaatttgtgccgagacgctga

SEQ ID NO: 83317 - DNA, 260 bp, Heterodera glycines
atgattatggtattgagaaaagggataaacaatagaaaatataaaatttgtgaatacggtattaaaatataaatttcgtattgaaattaaaattaaaataaatataataaaataaaaatgctaatattttcagaaatgaattatgatgaattgagtattgtgaaggaaggagctgttattatgataaacgatgaatcattgactgatcagcaacagttgaaggtggaaaaaataaaaacaaataaaatgaaataattata

SEQ ID NO: 83318 - DNA, 970 bp, Heterodera glycines
atgaattatgatgaattgagtattgtgaaggaaggagctgttattatgatagatgaatcattgactgatcagcaacagttgaaggtggaaaaaataaaaacaaataaaatgaaataattataataaaatataattttatatttatttttacattttagaaaatgagtgaaaattttgaaaaattggaattggtattgaaaaacaccaaacttgagctcaaaaatgtgagttttacaaagagtttgaaaatttaatgtgatttgcaattaatttttgtaaaaaaaattaattaaatttagaagggactccaagaaaagttgaagcagcagaaaacgaatgcactgctcgcaaagatcgaagcggagaatgggaaaatgaaaaatgaaattgagaaaatgcaggcaaaaatgaaaatggacgagaaggaggagcaattggagaagaagaaggagcagtacatgaacaagttggagcaactgcataaaaatgtaattctcaaaaaaaaatttctcaaaacttaggcattgaacccaaaatttcggactcattgaactaagacagatttgaatatcttccattttgatgttttctgattgtttaaaaagtatattaaatcatcctaagacagaaagtggaaacaaatttcgggctctcaaccgaaagcacctaaaaataaagaaattaaaaagaaaaatctaaataaaatttaagtttcctttaaggtgacatcgatagttttaatgggaatattttaactgttcactttatttaaattttttgtttaaattttaatttttaaaggccgaggctgagaatcgaaagctgaaaaatgaaattgagaaaatgcaggaaaaatttgacaaaaaggaggagcaattggagaagaatttggaggaattgcagaaaaagttggtcgaaatggaacatcaacagaacgaacaacagaaaagcattgaaatgtaaaaataaa

SEQ ID NO: 83319 - DNA, 190 bp, Heterodera glycines
atgcggcgatgcaaaaataatctgacggacgaagaatatgaacggtaaattttatcttttacaaaaaaaataaatgtttaaaaatttattttgccttttaaatgattgcaggcttttccctaaaagtgccgacaaatatgtcttcccaacgaatacaaatggcatttgtgtaggacttggcaatcaaatg

SEQ ID NO: 83320 - DNA, 2274 bp, Heterodera glycines
  unsure (1)..(2274): unsure at all n locations
atgaccgagggcattctcttgcgcgaattgctgcacaattgtcggctcaacgcctactccgccgtcattgtggacgaagtacacgagcgttccgtaaggcattcattcattgaatttaccatacaaatggcacctattttattttatgtcaaattaccccatttttgacctctctcctttttgtcagctcaacaccgatgtgcttttgttcattttgcggcaagcgcaactcgaccgcgtcaaacgtggcgatgcgcccctgcgcatcattttaatgtccgccactttggacgcgcgtcccttttccggatattttggcggcgcgcccatttattatataaaggggcgcatgcacaccgttaaggtgatgaacattgaattggaggatttttttgattgaaaaaagagtttaaatggggtttccttcaggtttttaactcacccgacctgaatttggacgacaacgactatttgttcaacgccatttcaactgttttggacctaaacgactcggagccggtggagagcggatttttagtatttttaacgggccaagaggaaatcgacacggcaatgaacatactgaggaagctaaaacaaagcaaatcggaccatgccgcggattgcattcacgcggtggcattgtacgcggcggtgcccactgcggtcactcaacgggcatttgagccaccgccaaaagttggcattcactcggaacattagcaaaaaaatgaatgtgcgaattcagggtcatcgaaaggtgattttcgccacgaacattgcagaaacatctgtgaccatccctggcattgacgtggtcatcgactcgggcaaagtgaaaagacggtcagtgagagggaaacactttaaattccaaagggatgcgaaattgggtttcgctctccttggattttttgacgaattagattttcagttctttcgccgcttccaatcgcatggatttgctgcgggtggagaacatttccaaggcccaggccatccaacgcgccggccgtgcggggcgcgagggccccggcaaatgctaccgattgtactcattggaggactacggcactcttgctgacgaacaagtgcccgagttgcaacgctgccgacttaccaccgtgagaaaagcaattgcaaatcaattcccagctacaattttacaaaaaaccatgctcaggttgtgctcgaactgctccaacttggggtccaaaaggtgacttccttcgcgcaccttctctctccgcccgacattggccaagtgcacgccgcggtggaagaactgctcgcactccgagccatcacattgagtccaaagggacagctcgaaatcactgatgagggcactaaactcacggcattccctgtcgaacctgcgcatgcaaagtgccatcattttggaataaaattactattttcatttttttgcttttctcaggattttgctgtccgcctccgagttgggctgtcttgaggaggcgtgcaccgtcgtctcctttctttctgctgatcccgtgttccaattttcgggccacgaccttttctgtctgaatgagaagcaaaagtacggccaggagagcaccggcctttcttcgagttggcaaatttcaatttttgtacgcgaaaaagttttaccttcagattattccgacatgaaattccgcaccaacgaaggtgaccacgtgcgaatggtgcaaatttaccgcgcttacgcatcggtgaaacgaatccaggaaaaaataaaggcaattataatggaatgggaagaaaatttcgagacggtgtcgggaggggggggggggtaattttgaaaaatggataaaaacgacatttattccaaaaaattgactttcaataatttaaaatggatcgaaaattttgaaaccgatttttggcataaatgccaaatgtaacgtaatcgtagataaaaactcactctttgtcttctataggaattttgcgattccaacaatttgaatctgcgccgcatggaacaggtgtgcaacatcaggaaacagttgcacgccgaatgtgtcaagcagaaattgcacttcagcacctccatgaacaacttggagatgttgaggtgcaaatttcaattttttgggttatctaatgccattgtatactttagaagggcaatttgccggggactgttcatgaacctgtgccatttcgacacctctgcccagtgttacgttttggaccgggaccgcaaagtgcatgtgcgcatccatccctcctcttgtctccacaaccaacggcccgccn

SEQ ID NO: 83321 - DNA, 674 bp, Heterodera glycines
atggttggaaagcaaaaagttgcaaattcgccaaagcaaaacgacggcaaagagaaggaaaagcaattgagagacaaaaacgcaccaaagtaatttcctaatttctactaaaatataatatatatttttttagaattccaataaatgcctaccaacgttacgtcacgcatcgcctgaaggtgtccccgtcaaagaaattcggcacttcgcgagaagcgatggcaaattttgcagctgaatggggggccatggagcctcaaaacaaaaaggtgaaaggacataaaaatggagaagaaacaatcgtttttgcttttagcctttttttgacgaatatatcgcggagagaagcgaatacagcaaaaagatggaggattataaagtcagttcgggggaacaattcaaattagataattacttttaatgttattaatttgcagaaaacagaggactacaaatcatttcaaagttaacaatttcgctcaaaatttattgaatttgtaacatttaagtgcagaagtcggcaaaaaggcggaaattgacgaaggttttgcatttttcgtttttaagcattttttctttggcatagggtcactcgacgatcgctgggcaccatcgtccgttgcatttgccaccgaatgtcaagcaaatttttagtcgcgaatttttggagtaca

SEQ ID NO: 83322 - DNA, 335 bp, Heterodera glycines
atggtagcaactgttgacatcaaatataatatctcctttttaaacaatgaccttaattggctgactgatacaaagggtgattaaataagtgtcaaattaaattaaagtgccgccaattagtttattaattaggcatttgtccccactgtaattagtctctctttaccccccccccccccccaatttaatcactcgtcgactctgttttttctgaattgcacccgttccactttgacttcgtcgttcagcagccgataaatgtacgaaacaattaaatcctgttgcacatccatcacaatgaaggaagggatgacatcgcttaaaaaacaaataaa

SEQ ID NO: 83323 - DNA, 757 bp, Heterodera glycines
tttgaatagcaaaaaaaagggcgtcgccggagaaaaatttgaccttcgtatgaaaaatcgggcccgagacacccccctgtcccaatcgtccgtcgtatggcccttgtgctgagacaccccttgtgcatgtgtgatgggccgtatggccattttccttccctacgatgtaaaaggggtaaacaaatggcagctaaaattgcattatctgccaaatgcccttcccccgttcatttctccatcgttttccctttgcgttcagttcactgcgttcggggcgactttgacgacgacacggcatttccggacgtgaaggtcatcccggtcggccactttcgcatcggaattacacatggccaccaattcattccctggggcagtctcaaggcaaacacacaaaaagggggggggggtaattagcgagagagcattttaaaattcgtgccttaggccatggaactcgcggctcggcaaatgaacgtggacgtgctcatctcgggccacacgcacgagtgtaaggtgtacgagaaggagggcgtgttctacgccaacccgggctcggccaccggcgctttttccatcgtcaaagagtgggcggggccaattaattaattaccgtccaaaattttttatttgttttttaagcgatgtcatcccttccttcattgtgatggatgtgcaacaggatttaattgtttcgtacatttatcggctgctgaacgacgaagtcaaagtggaacgggtgcaattcagaaaaaac

SEQ ID NO: 83324 - DNA, 445 bp, Heterodera glycines
atgcgctccattcgcgcatttgctgccccaccggctgtggctacaacgtgtgcgtgtccaacgtgcaacagcccatgctcagacgaattggccaaatgggtgagcaccaaaaaatgcccccataatattccttcccacatttaaagaagcccgaacccggctgatgtccccggactgtccgagtcccttccaaattcgcatcaaatgcgtcgtgccccgtcccgcctcgtggtgccattcggcccgcgagtgccccacctattccaaggcgtacccgcgccggtgctgtttgaccccgtgcggatacaacgtaaaaaacagaaaaaatatatgacatttaaataaattttttaggtttgcatgacaaagtttggagacgggggatggattatcgcataagaaaatcctcaatcacttttttttgaacttacgcaatttaaataaa

SEQ ID NO: 83325 - DNA, 2081 bp, Heterodera glycines
atgcattccgcgcggaaacgtcccgcggacaaagagcagtacgagcagcagctaattcattacgcaatgcgaaaactcttcaacattttccccctcttggagatggacgacattggaaagttagtattacattgtggtttgagctcaaaagaaagccctggatttgggtatggttttcgattgtgagttttaaatcttcatgggcctggaggttcgcaaattttggaaattttcttaacaaatccattaaaaattctaaaaaaaatttttgcccggcggcacctatcggcaccgctggcccccctgttcccgaaaattttttggaaaaagcgcgccgcaatgcattcaaaatcgaactgtcttttaataccaaaatgtgccaatgcaaatcataggctcaaatgtctctctctctctccccctttttaggtcccattggcacgaattggctttcagcgtgttggccaatccgacggtgactctgcgcgaacattttctgcaggaattggtcgtctcgctgatgtaccaccactatcccaaggaggaacaaacagaagttgttgttgctgaatgttgctctctctctgttcccccaatttgcgcctctttcagcaagccctccgatgcttttgcgatgcgatcaataacattgtgacgcgcaatttgcagacggatcaatcgaacatcgatcgatctccgtcctactcatccaattcttcgcgcgattccctccatctgaacccaatggccaaggtgattaatgtgttcgttcgttctttcatgggtaaacgagtgctaattccagttggacgacccaattcgaatccgttgtatgtccattttcaccgcaatgctccgttcgggccgttttatgcgcagtagtgtcgaattggacggtctctacgaggcattggtcggtcgtataatgtaaaaaaatacgggtttttcaattcatcactttcagatcacaaaagagtctctcgccgccacttcggctgaggagcgtgctatggcctaccaagtggggcaaattaattgttttttctaagggaatgcttttcccattgtcagtgtctcacctggcgctgtttgttctccgagaccgaagcggtcacgttcatgccaatcatttggcacgcgctgcagctgcaccagggccgtggactgctctcctacctggacatgatcggcgacttggtccgcttctacggctacgccaaaatggccaattggtacgtcaaatcgctggacgaagtgcgcgaggtggatgacactttcatggtggaggaggaacaggaacgggcggtggccgaaggtcgcagcgtaacgcaaatgacgcggagcaacacgtcggaggaggacaccgatgcggacatggaggagggcgacggactcgcagcggatgaacgcaaaatggaaatgttggacaaatacattcactgcgcacgccaagcccaaatggttgtggccaattggatggactgctcgaacttgttgaccctccctttttctcttttgcaggaacctcaagtggccttccgtgccaccgagcacatttgcggttggctgttgtgcggtggtctgcgcattggaagtgcggaaagtgtgaaggcgttggcccatcttttgctggtgatgtttaacacggagagccgtgacagagcgccggaggcgcacgtgtgcctttcccgctttttgccctgcttcgtggcggtcaatcgccgacaccagcagttgctgttccgggccttcatgtccgcattttcactgcttcaggtggcaatccgatcatttaattgttacgttttcacatggaattgttcgagagtcgagacattgaaccaaaacccgggaaattcccaatagaaataaattaaacaattttttttttttgttttaattaatgtaactttttctagacaatgagtttggcactgcaagaagaggcacgtcaaatcgacactgtgaaaatggcgatcagtgtgcagcaattcactgcactttcgatgttggccgaacgtgccgttgaccgacacttgggcaccgttcactcggaatttgcacagaaagtgctggagatg

SEQ ID NO: 83326 - DNA, 168 bp, Heterodera glycines
atgactaaaacaagagaacaaggacgcaaaaggaagcaaccaaaaagcgaagacgcagatggagacgagaaaaaagtcaaaaatgatgagcagcaaaataacgaacagcaggaggagggacgggaaaaggaagaagccatcgttgatccagagcgaatgaaaattttg

SEQ ID NO: 83327 - DNA, 1863 bp, Heterodera glycines
atgtcgaagatcggtcggatatggaattcggcttttaccagcgcagtggcaaaatggttgttctccgtgagcttttgcgtttgtggcgcgaacaaaatccagatgctttcgatcatcgaaagctttgttatcactgaagggttggcaaatttaacgctaaaaaacatttaatttatttatattaccgtattattacagttattccttccttcgcatggacggcacaacgccaattggcagtcgacaaactctcatcgaacagttcaacaaagttgttgctgcctttcttacatttctcattttaattctaacaataaggatccagatatttttgtgtttttattgacgacaaaagtcggtggacttggcataaatttgaccggagcgaatcgcgttttgatttttgaccccgattggaacccatccacagatgcacaggtcgatttgctcaatttcaataaattaattttcccattttgggttttaggcccgtgagaggtcctggcgaattggacagattagggcggtcacaatttacagattgtgcgttgcaaaattattgcccaattaaacagttaattaaaaaagcttcaaaacagattaagctttcgaatgatactaagcttattggatttggatgacagaaaaaagttatagagagttatagtggaaaaacatgctggggccgaaccgtgggggccgaactgacgtagaccgatgggtacgccacactgtgcagcgaaaagcctagtactatctcgtcgtttcttttttgctttgttatttctcattgacgtactatctcttcgattttaatggtgtaaaaaacaacattacttcgtgacctttaacttttttttttctacacgttaaatctacaccaaattttgtataccgatagagaaaaaaataaagaatttttcaatcgatttttaacagaaaacaatcgcttatttcattagttatagaacaaaacataaaaatacatttatttttctctcattttggtgtactaatttcatctctctaacacatgaaaaaaatcaaattcactattgcctataatggtacaaatcaatttattattagataccaaatttattcagtttagttgggaatgaagcaagttttggctgatcaaaataaaaaatacaaaaaaggcattttccagtgtaaatttaaaattagcgcgcaaaaatttacgccaatttcattcctatcagtatctccggactcccaagttccataaagtttttgaaaagttcgccataacaaatttgaacgccgacctctctccaaccctcggtcgaccggttagaggctaaattcaggatactaaattaattaaatttggctctttcgtagtcagtttttaatgtttttgtgacttaattcccatcccaatgtgaataatccttgcgctaatatcatttatttattttttatcagcttttaataataaaaaaactaaagaaatgccaccaaaaaacaactccgcgagtaaaaaaacacaggtattaatgaaaattgattgtaatgtttaattaatatagaattttttaggaaagtccattacaaaggcgttggaggaaaagtagctggaaaaatgtggtttgcttactatttttgttaatcatttcaattttattgttaaaaacatttttgtgctagggtttttctaaagtactctttatctaaccattgctttttctaagctcaacactttgatcacgcccgaccacacaaagaaggcctacgttcgcttagccgcagattatgatgctttggacgtggccaacaaaattggcattatctaaacacattctttttttattccgcgctttgttgattttcgggaataaa

SEQ ID NO: 83328 - DNA, 853 bp, Heterodera glycines
atgggactgggaatcagggaaccggaattcaatccgattcggtcagattctcgatcccggcccggaaagcagttagtatgtgcattttgaccttttaatgaaagaaatgtataaaaaaaatcaaaagaaagcggagcgaaaagataaggtcaaattggacgacgaaatattggggaaagaataaaaaaaagaactgaaattaagttttaaagagaaattttatacctttctatcaactccatttttgaaaaattaaaaatttgttatttactcattttaagtcattgtaaagtcggagttttatccaaaaacgatacaacaaaactagcttaattatttttttaaaatatattttcatgcatattaagggcatgcatagtttcattattaattttggcttaaattcataatattggatttttatgcaaatctattaagaaattataacaaaattagaaaatttttcgtctcgcctcgggaccgtaggccaattcttataattaaaaaaaacaaaaatgtcaacaaagtctgtttgtggccagtattattcttattctggaatattttcgatggcatcttaaaagcttaacggtataaggaagtgtttcacagccgaccaaagtcaaagttgacgagaactcaatcattctatctccctatacaatctgatacagcaacactccagcaaatggcactccaaataaaaccgattacaatgagaacggatcaaggatgtaggaatgccgacttccgattggcggtttccgacattttgggctcggaattcccgtttccgatggctggatttttctgagcatcgtaattccgactgccgaaattttataatattaaa

SEQ ID NO: 83329 - DNA, 1817 bp, Heterodera glycines
tccactttttatggattttccgacctgctttttttaaagaggactttctatgaaaaataagtttaaatggattttaatattataaaatttcggcagtcggaattacgatgctcagaaaaatccagccatcggaaacgggaattccgagcccaaaatgtcggaaaccgccaatcggaagtcggcattcctacatccttgatccgttctcattgtaatcggttttatttggagtgccatttgctggagtgttgctgtatcagattgtatagggagatagaatgattgagttctcgtcaactttgactttggtcggctgtgaaacacttccttataccgttaagcttttaagatgccatcgaaaatattccagaataagaataatactggccacaaacagactttgttgacatttttgttttttttaattataagaattggcctacggtcccgaggcgagacgaaaaattttctaattttgttataatttcttaatagatttgcataaaaatccaatattatgaatttaagccaaaattaataatgaaactatgcatgcccttaatatgcatgaaaatatattttaaaaaaataattaagctagttttgttgtatcgtttttggataaaactccgactttacaatgacttaaaatgagtaaataacaaatttttaatttttcaaaaatggagttgatagaaaggtataaaatttctctttaaaacttaatttcagttcttttttttattctttccccaatatttcgtcgtccaatttgaccttatcttttcgctccgctttcttttgattttttttatacatttctttcattaaaaggtcaaaatgcacatactaactgctttccgggccgggatcgagaatctgaccgaatcggattgaattccggttccctgattcccagtcccataagtttagggattggtgagacaaatacgaaatcctactgacaaaatgccaaattttgagataattcatcaaatatttaagtaaaataattttatgaaaatactgaggaaaagaaaaaggaaaaaaatcaataaagctgatcaaaagtgatattttcttccttcaatgagtgaccaaatcaaatctgaagttggggccaaagttggcctcaattttatcaccagcgccattcaaactcaaagtgacgaaagggaaaaagaaacaatcagcacaggaggatgtagccatcaactcagaattatctaaataaaaaagcacgggaaatttgaaggaaatgaaaattattttgggttttttgggaaagaagggatagacggtgccgacaagccaggctccaagtttttcttcctattgggttgatgaaaaagttctgaccctctgaaaaaacaattatgcaaaaaatgatatttaattctaaagagattgaaaaagggaggcaggcaattgggatgaatcagcggacggttggccatcttttggccatttgcatttgttgtatagccattacttttgcaaaatcgaacgattttcaaaaaatggacaaaattcgcctaaatgttgcgttctcaacgcaacaaaaaattgagcaacttcgatgggcggttcttcctcatccaccatacagcccaggcatcagcccgtgtgactactatctgtttcgatctatggagcacttcttgagagggaaagaatttgctgatcaaaacgaggtcgaaaatgcattggatgacttttttgtatcgaaaaatgatcagttttataaaaaggggattgaaatgttgcccgaacgatgggggaggatcattgatcaaaatggtgagtacatcattaat

SEQ ID NO: 83330 - DNA, 721 bp, Heterodera glycines
cagataccgccctagttctgaccgtaaacgatgccaactagcgatccgccggcggatttattcgccctggtggggagcttcccggaaacgaaagtcttccggttccgggggaagtatggttgcaaagctgaaacttaaaggaattgacggaagggcaccaccaggagtggagcctgcggcttaatttgactcaacacggggaaactcacccggcccggacaccgtaaggattgacagattgatagctttttcatgattcggtggatggtggtgcatggccgttcttagttcgtggagcgatttgtctggtttattccgataacgagcgagactctagcctactaaatagttggctcattgcttctgtgggcacaacttcttagagggattttcggtgttcagccgcacgaaattgagcaataacaggtctgtgatgcccttagatgtccggggctgcacgcgcgctacactggcaaaatcagcgtgcttgtccttccccgaaaggggttggtaaaccggtgaaaatttgccgtgattgggatcggacattgcaattattgtccgtgaacgaggaattccttgtaggggcgagtcatcaactcgctctgaatacgtccctgccctttgtacacaccgcccgtcgctgcccgggactgagccatttcgagaaattcggggacggttagtgttccggcttcggtcggtatgcagactggaaccg

SEQ ID NO: 83331 - DNA, 1562 bp, Heterodera glycines
atgccgaatgaggcggtgttcaaaacacccacgccatccacaagggcacagcacccaaagacaacgccaattgagttgaataacacagtgtccaaacaacatctggacaagttgacggtggtgaaaggcgacatcaccaaacaacaaatttggatgatcgtcaatgccgccaactcggatttggtcaaaggcggtggagtagacgacgcaatccatcgcgcgtgttctcctcgtcaaaaagagctcgaacaactgctcaacatcaagattttgtcaaatggtggaccaattgcggacggcggggtcgtggacacgcccgcgtttggagacttggccaacaacgtccaatgtatgccagtgctaatcgtgtgttagtcttagtcccacatttgtagacattttgcatgctgtcggtccaaaagtcagtgcagcgctcaatgagcaccaccgcaggtccctggcaaagtgctacaccaatgcattggaccatcttgtgagcatgcacatggatatagcaaacccccagtcgagatcaattgttagtgcaattggaatttattcgttgacttatctttccataattataggcattcccaagcatttccaccggggctttcaatttcccccgtgtggatgccgcgcacattgccattagagcaattctgaattggcttgcggaccaaccagcggatgcaccggcaatcgatgaagtccgcttggtcgcatttagtgacgaggactttaaattgtacaaggagattcgcgaacgagtaataaataagcaatcatgttcgtttctatttttttcgtaggtcaaacgccaaatgaacgctggcaaacgtccaacgcccaaaacatcgttgcagacgcctttacgcattccaatggtgtgtatatgataacaggctcatttgtatgtttgttataatagctttccccgacaacatcgcggctgtcggaatcggttgagcgaatcgacctagccatgactcctacaacgagtcgcgccccggtcccccactttccaattcaacagcagcgtcgcgtccgaattgttgatgtacgaggcgatggagcttgcttcttccggtgaatatattaatgcactaccaaattacaagttaccattatgtagggccattgtgttcgccattgttggccgtgacgatgtcaacatcgcattcaacttgcgtcagcaaatgtttactcttttgcgacaatttcttgacgacccaaactgtttcccgcgaggcttctatgccaatcgcgcgcgtttcatgcaatttattgaagcactccttttgggcgatgaaaacaccaactttgacgcttacatcgcaagtcgggtgggcgcaactgcttgggcagacgcatctgatgctctgctcgcggccgtcttactcgggcagacaattgttgtcgtgtcacctgtagatcctgacaatgtccgccgtgctacgagcttttttgacgacacagttcgccatacaattggagtgtttttcccagacggaaatcatatggtgacaaataatttcaaggcctacctcatattggtttaa

SEQ ID NO: 83332 - DNA, 798 bp, Heterodera glycines
ttatttttgggcccagccgcaaataaaatagaaaagtcaaatggtcaatttgatggtttggttacaaatggtgtgctaattctttcacccaatgataatgatgatgaggtaaaagagaaacagaagaaaatttatttaaaattttttttattttcagggggcctccgtttatttatcagcttcctcttcaaacaatgatgatgatgaaaatgaatcagacagcgaaatttctccaaattgttggaaagaaggtaattgtcatcattttgaaaaaaataattcaaaaatttgagaaatttctcattttttcagaattgcttaaataatgccaaatttaaaattaaaattaatgtaaaaaaagttaagtcaattaatttagtgtccgttaacggcaacatttactcgaaaagagaagtgcgctctcctggcaaaatgggagaattgcttcctggaaaaacaaacaaaattgaagtaaactcatcatttcatattttaaataattgtaaaaaaaattatttctaaaaaattactcaagaagaaccattttgaaataacatttttgggaaattttgatttcaataccacgcaaaatttcatgacaaggctttcaaaaactcttgtaaaaaagccctaaaaaatcatttttctgcattaaaacatttttgaaggcaaacattgttttttagggtattagtgctttaatctgaatcataaaaaaataatatatatttatggaatcaatgttttatttttttgttttttaacttttgaattattatggttgtggattaaaataaa

SEQ ID NO: 83333 - DNA, 111 bp, Heterodera glycines
atgccaattttactccgatgggtcagaatcggaattggaaccgaaattttggtaaccgaacgaattttgaaaattcacgatttcaacggggaaactttaacaataatcgag

SEQ ID NO: 83334 - DNA, 2495 bp, Heterodera glycines
atgccctaccttaaattgacttttcttttgctgtcgcttccgttcggttgcccattaagctttgtcaatcatcgtcttgaccaaccgcagtcagcagtcacttcgggtagtccccctgttgtcccaattgcctcacttctcttgtgccgctttaagctgatcgcacatgtcccttaaatatgttcctttgtcgtgcaacgcagcgttgcatccctcgttcgtgggtgtgcgaccaggagaacgattgttcggatgggcaggacgagaagaactgcggtgcattttatacctaatggtttcgttggacttttctttttatttgtgcagagactcctcaaaaacgatgctctgaaagtgaatacgaatgcaaaaacacacaatcaatgcaacagaatgcaaatgacaactcttggctcaaccacttggcccgcaccggtttcacacacacgtgcattccaaagaaatgggtttgcgacggggaggccgactgtgtggagaaggatgacgagttgaactgcgaaggaagtgagtaactgacgaaaattcgtcgatcacaattcttttttggttattcttttctctgatcggcctttctgcacatgactttttcaaatttgtcaggtttctgtttttgatatttcagagcttaaatgtgacgagaaacactttgagtgcaaaggctttgacttgcattctgcgacttcgtgcattccaatcgaatgggtatgcgatgggcaggtaattctcgactaatattagaggaatagggtcaattgttctgctttcatttaggctgattgtttggacatgaaggacgaagcaaactgtacagctaaagaaacgaagcctgaatgtgaaaaggactctgagtttcggtgaatcactcattaatcaattcttttactccaattgattctcaaggtgcgattctggtcaatgcatttacaaaagttggcgctgtgatggggacagtgactgtatggatggaagtgacgaaaacaactgcaaggtggacacgtgcggttctgttgacaagttcaaggtcatcacgcgaagagtccacctgaaaatgcaaactgacagttttagtgcaaatcatcgactttctgcattcccaacaaatggaaatgcgatggcgaaccggtaatttaatgttggaatttagaaatttgtttatcaaacctaatttcaattcttatatgtgttttgatagctaagtaatgcaaaaaattctttgacaggtaaaagtcgaaataaaatcaggcgatcggtgaatgacataaggacaaaaaatgtttttggttttgttaaggactgtcctgaccactcggatgaaacggactgcgaaggggttactgctcaacaggaagtgcactgcaaggaccatgtttgtttcaacgtctttgcccttttcccaattcaattgtctttttctgcactttgtccaggagtttgcgtgtgcctctcgttcccaatgcatcagcagtttttggcaatgcgacggcgacgaggactgtttcgatgggagtgacgagcacaactgcacacgcattcagtgcaaaccgaaagagaaggcgtgcgctgacggaaagagttgcattgacgaggaattgtggtgcgaccgatcggaggactgcgcggatgggtcggacgaggcaaattgtcccaacaatgacaaggggacggaggaaaagtgcaaattggacgagttcacctgccccggagagaagtcacgctgcataaaataccttgatctgtgcaatggccattcgtccaacgaatgtgccaagaagggtctttgcaaccaggaaataagtcagtcaaaggcattaactttgctgactttatatgattttttggaacctatccatttaatattattttgtagactctgccctaaaatggtttctttaatctcgaatattgcggattaggtttctcaatgaaattttaaaattgtagggtccggcggaaaaatgagaagaaaattaggatgttttcaaaaattcccatttttaattttaaaaatatttggttacgcgaggtaagatatagcctcctcattgtcagtcctctggctatgcacacccttccgtccactctatcaaacgcttttggtgaatttttcccttaatctgtgcagaatcatgcaagttgactggggatcagaatgacccgtgcatttcccggaagatggccacacatggaatgctgtactactgcgccaagggttacaatgccagcgtaatcgcggacaatcagcccggcttttgtgaaggtgcacaattgaaaaaataatgcttgtgtctgacggcatgcatctacttatcagacatcaacgagtgcgaacagcctggggcgtgtgaccaaatttgcacaaaccttcctggcagttaccattgcagttgctacccaggctaccaattggtcaactctgactctgacaaacccgtaatgcataaatgtcgtgcgattggaccggacccgttgctgct

SEQ ID NO: 83335 - DNA, 2100 bp, Heterodera glycines
atggctaacccaattgcaaccaaaaaacaaaaagtaaaattgtcttacgaacgccacctttacaccttcgctaaaatgagttctgatgggatgacaaaattttggagatgcgagttcaaaaaatcaatttcacattattttggagtttctccggggaatttctcgcaactatcgaatgaacccgtgattttttgttttattgtccaaattacctcatgaacccgtgaatttctgttaatttttacattttttattgttaaaattattgttgaatttatttttaaaatgtttattttacattttatgctgaaatttaaaaagttgtttttactgtgtgttttttcatttttctgtacttggggcccaaacgaccctggagcccaaaaacgagggcccaaaaacgggggcccaaacgcccccgactcaccgaatggacgcaacggaattccgttaattgaatctaaaataacataatgccaaatttttgctttatttatttttttctttcaaaaattcacatcggttaaaatttgttttgaatttgaagttttgttgttgtttttagtcaaaaccttcaaaatgagttcaaggattaacgtcgtcagtgtgcagttgttggagaacccggccactccgagtgaccacatcaaactcgaaattgttttcgaaatattcgaaaacattaaggaaggttgtgttgtttcttcagcaattcctccccgtgttcaaaattcataaattaagacgtcgaatgggaattggttttcgtgggcactgatggccgagaagaacacgaccaagtgctcgactcagttctcatcggaccgattcaggagggacgacacaaatttttgtttgaggttttgtgcctttgaaatatttttattccaataaataaaaaaagcagtcaaaaaatttggaaagaaataaatcggtagtccatgccattaaaatacctttatcataacttcaagaaacagaaagaaggcccattccccaataactttctgataaataaaaaccaaaaattcttttcaggcgccacctccacaaattcacaaccttcgacccgaagattttatggatgtcactcttttgctgctcaagtgcaaatatcgtgaacagcttttcatgaaaatcggtttaaataaacttttgtttggttatgatgccatttatgttttaggttggttcgtcacgcacacttacactgacccggaactcgtcgaaaaccctccttctcagcccgtcatcgaaaaggtcaccagcttattgacttcttttacaatttatttttcatttactcgtcggcatttaagctcaagcgaacgattgtcggcgaggatgtgcgcgtgacgagttacccgatcaaatgggacgaggaggcggaacagccgatgggtttgtcgcagagagagggacgggccgaaagcccctttttctcctttttctgtcggaaccaatgaacccctgcataaaacattttgctgagcattatgcagggaacaaaagcctacaacaaccatttcctttgattgtcagatgacgatgaagagccaaacgccgggaatgaggtttcctacggagtggcggccattgaattaacatcgaacggcaacagtcaacaaatgaatatgtcacaacaggaacagacgccgatggcggctgttaactaagcggatgaaagttgcgagcgttaaaaaggacagaacggactcgatgttttatgggtacaaaaaacggatttgatcttcaaattgcatttatcactttaacccaatgttttgttcgacaagctcatcataaatgtatgcggcaaagccgcccaacttgataaaaaccaagctatccgaattgatgacagaaggataggaaatttcatttacaattagacatttttaattacttaaaaaattggggtcacaatacagttttgaaaatcggagtttatggggaaaccaatcttggtgcattcgagaacaaagccaacttgaccagcgaaaacttggcgtcgtatgtcatacccgtgtccgggggagaagttgctcccacacctttcaaaatagtttttaatggacactaatctagtagtcaaataaa

SEQ ID NO: 83336 - DNA, 187 bp, Heterodera glycines
ttttgaaaggtgtgggagcaacttctcccccggacacgggtatgacatacgacgccaagttttcgctggtcaagttggctttgttctcgaatgcaccaagattggtttccccataaactccgattttcaaaactgtattgtgaccccaattttttaagtaattaaaaatgtctaattgtaaatgaaa

SEQ ID NO: 83337 - DNA, 1875 bp, Heterodera glycines
tgatcaacaagttggagtcggcagtggcacttgactatcggcacaaccagagcactttggtgtggtcggatgttagcaaggaacaggtcggcactaatttcaagatgcaatgtatccgtttaatttctaattagcttaatggcaaagcttgaccgttcatttcccagataatgatttgtgcgggtatcaacagtacccctgggaaccacgcgatgctggaaagcatcaacagcatttgtggcgagaagagccccaatctgaccgtcataaaggacaatgtcactacgccggatggacttgccgtagattgggtgcatgggctgctgttttggacggacaccggactggacactgtcataaaccagaaacatttcatttgatgacagtctttttcagataaatgtctatgatttgcgcagaaacaaacggaaagtgcttttcgacaagggtttggacgagccgagggcaattgccgtggacccatccgctggtctgatcttttggaccgattggggttcggacgcgcgaattgagcgcgctggaatgaatggcgatgacagacaggtgacctttttatacacttattaatagtggccttgattgcttttttgtcacagattattgtacaaggcaacgcgataaaatggccaaacggtttggcattggacattttggacaaacgcgtgtattgggcggacgcgaaaacgaaacaaatcaacacttgcgattattggggcgagtcttttccaaaacaattaaagattaaaatttacgttgcccttttacgtgttttgtttctcgcttctgcaggtgaacatgttcgcgtcatcctccattcccatcagcacgttcgccatcccttttctttggccgtatttgaggaacgcctttattggaccgactgggaccacgagggtgtgttgtccgtcaacaagttccacgggaaggacttccgacaggtggtcatttacttctcgatcattcttttgctctttgttgtcgccactttcattttttatggttgaggtgttgcgcggcgtgagcggtccaatgactgtccgagtgtaccacaaacaagcgcagcccgttctgcaaaataaatgcgaggggcgcgactgcgaccacctttgcttgcctagggcattatatcgtttgtttttcccgatctaaatgatatttttaacttactattgtaattgacttatcgaacggcatttttaagagaaacctaccaaaaatgccgaaatccgactcaagggactgccttactcttgcgcctgtgacattggtttccgtgtcgatttgaacaacagttcaatgtgcgtgtcaacaactgcggtcctttccgagtcgactgtcttctgtcagtaaatgtctcattgtctggtgcacaaagtttctcccccgtttaccccgccgtttttcaaataatttttttaaaaagtattttttagtttttcggggtaaacgcgcggggtgaggtccccttcattatcagcttttgtctgtttctcatccaattttgtgcccaatttagtccaacaaagtaaacactatggccaaagctccttctcctacatgttcgccttcatttttctgggtgtcttatttgtgctggtaacaaatttgctcaatttgcgccttattttcttccccattaaaggcctacactttctaccgtcgccaaccgcgtcagttttctgcgcttcattttgagaatccaatttaccgccgaacggtggaggctgacatggacgcggaactcgaaaataccggcgacaattccctgggcccaatctccattttgcccgtaggtggcactcacaatcagagtggtcacctttcgagcggactgttgcatcagccgggcgagct

SEQ ID NO: 83338 - DNA, 199 bp, Heterodera glycines
atgtaaaaattaacagaaattcacgggttcatgaggtaatttggacaataaaacaaaaaatcacgggttcattcgatagttgcgagaaattccccggagaaactccaaaataatgtgaaattgattttttgaactcgcatctccaaaattttgtcatcccatcagaactcattttagcgaaggtgtaaaggtggcgttc

SEQ ID NO: 83339 - DNA, 321 bp, Heterodera glycines
atgaccggcttttacaccgagaacgcacaactgagagcccgagctggaccgaactggttgctggtacgtgtcgcacgcgaccgccaccgacccccagctcgagtcaacacggacccgaaaccattgcacaattcacccagagtaaacagcactcccccgatccgggtaccagaccccgaaaggctggcctcaagaccgagctcacgcagctactccgagcatctcagcgcactccgcctgcaaatgccccattcgccactgaacagaaggacagcaaaccccagtctggaggctagcagcccaacgtacagcaacaaacgg

SEQ ID NO: 83340 - DNA, 510 bp, Heterodera glycines
atgcatccgttggcacttattcgttcggctaaccctccgctggaggacgaccagcagcagcagctgatggccaacaacatcgtgcacagacggcgcagcacaccgaaccgatgcgaagcgttgcgcttccgttcgtcccgcgttcggccggcaattgacgaggaggaggaagggaatttcgagccaatcgaacaagatgaggccgacttggacgacgaattcggatcggacatgcacagcgacgacacggaaaacggtcaatcgtcgatggcaacggatgcggatgaattggacagtgaggtgggcacggagcaacgcatggagaccgacgggggcgaggacagcgacgacgaaatggccgaatttatggcagacaatggccaaatggaggccgaagaggaggaggaggaagaggacgagtggggcgaggacagcacggaggaggacctgttcatgttggccaaactccgtcagcaccccgaaattccgtttaaggtgggcagcgaatga

SEQ ID NO: 83341 - DNA, 640 bp, Heterodera glycines
atgcatttgtctcttttgaagtgccatcgcctcgtcgtcgtcagtgcactgtactggtcggtgaccgcgtgtttctgttcggtggcacaatgttcgtcccgtttcgctcgctttttctaccccatttccctttgccctcaggccaaacggcgagcggaaaagcggactgtccgaccttggcgatttgttcgttttggacttcgcgccgtcgttggccacgctgtgctgccaaactgtgctcaaatttgggctccaccggcatgccgccaatattttgcccacaattatcatgtgaatatttgtttctgaactgtttccccccccccccctccgactgttctttgatgggttaattctgacaaatgggcgtgaatttggggacgtacagtcccaggggacgaaaatgcaaaagggcaatcaaactactgtatgatataattctgtacaaacatttcaggaaggagttgcattatctgagcactcccaatcggatctccaaattgcacgtgccatcgtcggacaatatgacccacggctaatccccactcattcgtctctttgctttcgctcttacgcggctttcgacacattggaacggcatttgatcagtccgtccttctctccctctcttctcatctga

SEQ ID NO: 83342 - DNA, 1082 bp, Heterodera glycines
atgttttcgttttgcatactttcacactcgattgttttacccagaatactcaattctcatactgtcgggaatcaacagcaaaaaaggcagggttacaaatccaagaatttgacgggggaaatccaaatttaactgcggcaaatgattcttttattcaaattttgggaaaggcacagggaaaaattcgcatttacgacaattcaactggaaaatttggagaatgaaaagtgtgtcttgatgagatttggacaaacattatatcagtaattgaagttgaaatgactaaatcaactaaagtaataatgggaaaaaccgagataatcgaaccatgaacggaaaacattattagcacatgtaaaggagcattttccaaaagaacaaaatttcttggtaaaaggatttagtcatcaatacccaagcataattattggtagaacattagtgatccctgggaacagtaataatgttacaatccaaattttgaatgctgggaatacaaatgtaaaaatttatgaaggatcacatattgctgacttggaacaaatttacataaatgcactgcctggagatgaaattcatccaaaagattacatgcctccggagacaaaatggcacgaaaatttgcctaaattaccaacacaaatcgtgaacccgccaccttcagaaaaaattaacctggaagggactagactaagtaaaaagggtcagaatgacttaaaaaagctcgcagataaatattccgaagcatttgtgggagaagatggtaaaatcggacgctacaaaggccaaattgtacatcgaatcgatttaatacccggatcattaccatttcatttccgaccgtaccgttatccgccggaaactcaaaaagaaattgaaaggcaaataaaactaatgcttgaccaaaacatcataagagagtcggaatccgagttctctagtccgatcgttatggtgccaaaggcagacaaaatatcgtggcgttttgcagttgattacagggctttaaataaaatgactaaaaaaagggtgttccatttaccaaatattcaagaattgttggatttaatgggtgcaaaaaa

SEQ ID NO: 83343 - DNA, 202 bp, Heterodera glycines
gttagggtgggtattcatgggcccgtcccgtattcatcctaattggggagaggctgagttcacttgcgacggtgtcgcatgcaggactccccgctccctggttacggtgtaaaattttagcatataggaatttggagtgggtgctcggaacggatattttcggactggaaatggccgtggacgttaccggcacatcagcatc

SEQ ID NO: 83344 - DNA, 245 bp, Heterodera glycines
atgctgtcctctcgccagctcggaatgagccgaaacgatgccaacggttgtccgcaactgtccgcaaaatgcacgacgcgacccgcgccaaatgccgcattttttggcatttcaaactttttggcattccgtaaaattgacgacaatctttgcctgttaaactttatggctgatgttattgttgttgttgctgatgatgataatgaaaatgaagatgcttcttcatcactgctgctgctatcaga

SEQ ID NO: 83345 - DNA, 557 bp, Heterodera glycines
  unsure (1)..(557): unsure at all n locations
taaggatggcaaagatttgtccaagatggcacaaaatcggcaaataaaatgtaaaaaaattcatntaaaatttattcaaattagcgaaattattattttttaagttatcaattccgactctgatagcagcagcagtgatgaagaagcatcttcattttcattatcatcatcagcaacaacaacaataacatcagccataaagtttaacaggcaaagattgtcgtcaattttacggaatgccaaaaagtttgaaatgccaaaaaatgcggcatttggcgcgggtcgcgtcgtgcattttgcggacagttgcggacaaccgttggcatcgtttcggctcattccgagctggcgagaggacagcatttcagtggaacaatgaaaaatatggacaaattggaggaaaatgagaaaaaaaaaaccaaaaatttttgagatcgaatttatttaatcctattgttttctttgtatgatttaatccaattttcgaatttatttaatccaatttttctttctttgtattatttaatccaattttctttgtcaattaaaatattttt

SEQ ID NO: 83346 - DNA, 1202 bp, Heterodera glycines
atgagcttggctgagcaaattgcgccggaattgaacgacaatgaactttttgacgaaattacggcactgaatgagacgcttgaaaaaatttctgatgagaaatttagagaaatgaacgctgaacagaagtggatgaagctttttgaggcgaaattgcccaatcttcttttgcttgtcagcaaaattctttcaattcccgtgtccaatgcatgtgtggagcgcgttttctctctttgttcagcgcaatggactgatgtacgcaattcattgaaaatcgaaaccgtgaaaagtctggcacaaatcaaattgaattacgatctcacttgccccgaaatgtatgatttgctcatttcctcaccaaaattgttaaaaatgatcatgggaggtgaaaaatataatatttgatacattattgatcgaataaattgtaaaaataactgatttgaagcaattttgcaaaatgtccttattttttaccctaaaatcttattttttggccttgatgttcttatcttgaaaaattttcgatacgcgccctgataaagagtgacaaaattaattaaaacatttatttaattatcgtcattttatacaatgagaggcgggtgcatggacagtaaaatcaaactccttctgaattttgtagatggataaaggcatcagccgaaatgccaaaaaacaaaaattaaatttttaatgaagaaataaaggaaaccattatttatccactttcaagatttggccaatttttttgacattttttaccaagggaccttcaagaacaaataatgcaaatcctatcataaaaacataaagttcctaattataaattatatttaatcattccaattattcaaaaaatctttctaatctcatggatatattaattaaaaattcagtcttttattttggactttacgctcttaaaataagggcgtccctattttggtgtttatcctttttggcacttaaatttttcaataaaacataaaaataataagaaaataatattttcaaaaatacaccaccataaaatgcgagtcttctcaaaaaaagaatatttcattgacgaataccgaaatttagctctttttaattgcagttaaatccgatccccattaataactctgtgaaaaaatattttaattgacaaagaaaattggattaaataatacaaagaaagaaaaattggattaaataaa

SEQ ID NO: 83347 - DNA, 354 bp, Heterodera glycines
atgccaaatccgttggaaagcgctcaacccggaaccatttatcgacatatgaaaaagtttggtggttttatggtttgatgagtcaatagaaattgaaaagggaagtccggtcatttcctgcaatgcaatggatactgaatgcggagcgactattcctaaatccttatcaatttatatttaaatttataggaaaaacaaccagtagtaattgctgcacatttcttctcttttgatccgtaatttgccgcaatttttgaatcaggaaaaatttttgacaacaaatctgagacacaatcggccgatttaaagctttgcgcatggcgcgcggtgtgatatgcccaagcgcctaaacaa

SEQ ID NO: 83348 - DNA, 551 bp, Heterodera glycines
atgtccttatttgtaagatttgtccttatttagggctattgttcttattttgttcttatttgtcgcttgtccgaaaaatctgtcaattttctttataaattctgattggcgtactgtttaagaaaaatatttttaaattttgcattataatttcctttttgctgttaattttgtctaattatttttgtatttgttgtttttctcttttgtttttaatttagcagctgcactaatactaacaaatggcaccgcctaagcgcaaaaatgtttttaaaagtgaatatgccaatgaatttcagggtatcacaaaaagcaaaacaggagatgaattcgcgcattgtatcccatgcaattttgacatttcattgttgtctattggcaaagcggccattcctcaccatctaaagacggaaaaacacaaaaaagcagcgaaagctgcaaattccgctttggcaatcacggcattcatgccaagcaaatcggcacgaacgaatttggaccgtcaaacagcagcagtggaaggttgaattacaaattaaatcagaaataaa

SEQ ID NO: 83349 - DNA, 718 bp, Heterodera glycines
atgtgtggtttcatgtcgacaaagtgccttttctctgttcatttttatttcttcattttaattcaacttttttttcagttgtcctctgcccatgtttatttaaggtgagttttgtgcaatttgctggcctggttcgtcgtttattatttctaccaaatctgtgaaacttatttccccttcattttaaggttgtccccaggccaaggcgtcgaagaaattccagaaaattaagttttttttttcaaatcgaaaatctcaaaataatcgaatgtgtgtgtggtcttatttcaggcttctccaggactgttgccaactcgtcaaagctaattcgattgaagtgtgatttttttaacaaattaattttcatatgaaaattttgtgttttttgaaaaaaattttacgaattaaaaaattttgagggctgcaaattggctttcaccgatgttgtgtacacaatgtggggcaacttgaaaaagacgggcgatatggtgacgggacaagtcggctttcacagcgacaaagctgtcaaaaaagtgatgcgttttattgttaggcgctactttaaaaatggcccattttgaattttattaaaaaacccaaagggtggactcaaatttttatgattataactcgtaaaaacttgttctcggttgattttttggtccctgaccacaaatctgtgacacctatttacaccattttctcaaactcgaataaa

SEQ ID NO: 83350 - DNA, 241 bp, Heterodera glycines
atgccgacattcgccaacaaatgccttccgctcgaacttctgtacgaaattgtgcctttcatccctgccgaaaatgccgccccgaatgcgctctcgtcctgttcgctgctgcacaaacttttgctgccacgtgtcatcaaatggaaagaggtatgccgtgccattggaattgggcttgaaaagcaatttcggtggtcatccactctgagaacacagtacggaactattgttcaatgggctc

SEQ ID NO: 83351 - DNA, 1019 bp, Heterodera glycines
atgtgcgcgtttcaggtgaagcaagcgataaatcgccgaattcaatcaatgggatttatgcaattgtacagctcaaaagaaccaaatggacttgagtttcagcgccttgttcgcaaaattggggctctacaattctgtcctcccaactatttagcccgttcgcttcaactcatgcgccacctcatcactagggcgtgtaattatatggatataaaatctcgaaatatggccataaaatatggaccaaaaatcgcaaaatatggacataaaatggcaaaaatcgcgaaatatggacataaatggcaaaaatgtcaaaatatggacataaatttttcaaaattgaatgtaaaatttcttcaaatttattggttgaaattgcatatgagatacatttccaaattttttgactcggtaaggcgctttgacaaagacggctttcgttttgcaattagtcggtcaacattcggaaattagtctcgaattttttcggcaattacgtgcaatcattttaaaagaaaaaaaacataaaagctaaaatttattaatttttttagcgcaaaatcaacaacaaaagcgaaattttcgcttttttgcttatttttgatataatttattaatttttaagaaaatttaaatttattcaatattctcgagaaattttggcgaaaaaatgattttttgaaaaatttttcgggttttgggctcaaaaaggctaatttagctctgctgggggccgttctaatagaggttttttttgaaaaatgacaaaatatggacataaaatatggacaaaatgccaaaatatggaaaatatggatatagaaatccttcctagaagcttcaaaccaagctaaaaacatgtttttcgtgcgtttcaggcctccaataatccaggaaaaaaatatggatttccatataattacacgccctactcatcacacactccccattgaaaatttttcaccaagaatcacatttattgtcccaaacttattcaaatgaacggaatataatagaaa

SEQ ID NO: 83352 - DNA, 154 bp, Heterodera glycines
tgattgcacgtaattgccgaaaaaattcgagactaatttccgaatgttgaccgactaattgcaaaacgaaagccgtctttgtcaaagcgccttaccgagtcaaaaaatttggaaatgtatctcatatgcaatttcaaccaataaatttgaagaa

SEQ ID NO: 83353 - DNA, 1332 bp, Heterodera glycines
atgacgagccccgagttgcgtcagttcgagccgcttgagatgtccaactcggagccggacgacgatgagcggtcggaggacggcgcatcgctgggtgccgccaccgcacgcgggacgcgtagccgaagcggaagcgcagcacgacggcgacgcggctcatcgcggcacgacgggcacagtttggcacgcagcaaatcgaccaggcatgagaacggaatggacaaatttgttaattcaagactcttgagcactcggaaaagtgcgttgttcggaggcctaggctatttaccatcctaaaaactttcgagaaaatgggagaaaaattctgtttttattggcgttttagttatgcaaaaaaatatattaaattatttgaaaagttatatttttatctgcaacaatcaaatacataattataaatttttgtgccgtgctccgccgagaaatttttaaaaatggccaaaaaaataaaacaaaaacagaaatcctcaaattcaaaatctgttttgatctgaaaggggaactaaggtaaatgaccccccttttcagagcatcgttacggcatgccaatgcgacgggtgccaacagtgccattcaaagagtgccgacgggtggcggcagggacaacgccaattcacttgcggtgtccggcggtgcgcaaatgttggcacgcaacgcgtcttcgatgagtgcgggcactgcagtgggtggcggcagtcggaagcgggaaacgatttatctcaactgatcggactcaatcatcaataataaacataatgactgatcagttttgattgcttagcattttcttgctggtcagtgcttgatcgatcgaattttattattaattttcgatcacttttctttgagctttcgaaaagctgatcagacgattagccacatattttggccctttttctgctcccatttatctaactaatcgtgaaacgctgttgtttagaagcacattcaaattttctcagctgatcagtgcaatccttaagcttaaacatcaaaattgatcgattagctttgatcaatgcatatcagtccgagcagatacctttccgtatcaaattatcattcattgatctaatccataatgatctttgttttctcgatgttcccatgtgtttatcatccactctttttgaatctctcccacaatttgatcccactcttttgaaaaggccttttgttgcaaagtgccaatttttttctcatcattctgatcaatcaatatctatctccatgtatcaaccattgatcacttctttccaccaaaaaccgttacaaattgcttaacaaatgctaaattttatttataataaa

SEQ ID NO: 83354 - DNA, 155 bp, Heterodera glycines; identical to SEQ ID NO: 51421

SEQ ID NO: 83355 - DNA, 2732 bp, Heterodera glycines
atggttaaaaaacatccgcttattattgattcggaaaaggaggaacatctccttatcaatgacgaagatcgtggtgtgctgccaccaggaaatgatgctctttgtataggttataaaaagtttgattcatgaaaataattaacatttaagaggcaccgggatgcgttatctatggaaatgttggtcttagaaatcgtttaagcatcactaaaactggtgaaaacagctggcgaccacaattgtctatcaaacgtatcggaaatattttatataaatattgatatttttgagtttattttccctcgctttacgggctcaaatttattgtaactagcaatttgctcattagcagttgttttttctttttgtggtttaggcttgccaatttaatactaattgaagttttggcacaaagtattttgtataaaatcaaaaaaaaagttaccaataaaattttcaagcgcctgctgtgtaaagagttgatggctaacacaaaacatgcttttttcattatatttaaaaataatttttttaaatgtacattacaaacaaaataattatttaattgcttattttttattctagcaaacaatgcgcaacagcaacatgtccgctattacgctgagattgacggcaggaaatacccaactcaagggctcagttatgatattgatgtctgtgggacgggtcttttagttgatggaaagttttataaaaatgcggtccccacgggtcatatcaatgaaatcaatcgaattgaggaacgaattcccgttctcggctcaccgagcaaaggttagtgttacgttagttttaaatctctcttatttcctgatgaatattgccaatcaattctctgactcactatccgtctaaaattcttatcatttatgaaatttgcttgcaagcagcttatcccgttttatctttttagacattccactaattgctgcgggagatgttcagagaaatactgcacgtttacatacgaatgttgttggtcagcaaattttagggagtgtttcctttccaaaaattccgattgggggaaacactgattatataaacgctgggcataacaagcatgatggaaaaagcacttttggagacaccaaacgggaagaaaaacagaagaataaacagaaacagcaaaagagaggaaagccaatgggtggaaatattatacatataaataatcaaaacaatgaaaacattggtggtactcaagacatcggacgcatacaaattggaggaatgccaccaggaggagctcttcattttaatactggtggaaatcgcaacgttggtggtactcaaaagattggaggcatacaaataggaaggatgccaacaggagggacatttggtttaaatattggaggcaatcgcaacgttggtggtactcagaacattggaggtataaaaataggagggatgccagcagaaggatcttttcattttcatactggaggcaatcgcaatgttggtgatactcagaatgttggaggcatacaaatagaagatatgccagcaggcactactactgaagataatcataaccttgatagtgctcatgagattggaggtatgcaaaatgggaggggatgtctatctttttgataccaactaaaagctaagacttgaaaagattttcaatttttattttagatttagttgcttctctgcgaaatcaactcaggaaaaataagatttcgataaatggacaaaattacgcggttgacggacctaatgttaatgttggtgttgaagggcatgatttgagtgtgaatgggagagtttatcaaaacagggccacagagcagtatctggaaattatacaagacaaaaacataagaaatgtaattgtcagtgtgccattagcgttattttctcgcgaaaacataaccgttgggcaaataaacgctgaatgcgatggtaatttatacattggtcaatcgacagggggctgtcttcgcatattatgcgttgacatcaaaaagcgtgcgtatacaaatggaccaaaaaccagaggaaatttacaaattaaaaatacaacaatcgaatgtgtttccattggtggtggagatgaaaatgttattgaaagtgatggagttttacaaattaccgagtcgccaatgggcaatgttgcgatgaaaagcggtggaaatctaaaaatcaaaaactcgggaatggaaagagttcattttgaaagtggtggacagttacaaattgaagagtcaccaatgcacaatgtttgggtgaagagcggtggaaatttaaatatcaaaaactcgggaatgaaaagagtgattattgaaagtcgtggagctcttcaaattgacaacattgacaagttaccaatgggaagtgtttggttaaaaagtggtggagctataagcattgacaattcgaaaatagaaagctatgcgaaaatgaattctggcgggtctttcactataacgaattcggaaatagtaaacgatgcagaaatgcattctggtggacatttcactataacgaattcggaaatagaaaacaatgccgtaatgacaacatctggcggctctttcactataatgcgttcggaaataaaaaatggtaaatttgagtgcaatggatcaatgacaattaaggagtcgaaaatggagagtggtagcattgtgtatagtggaagctttactgattggaattctcaaatagcaagcaaagttcgtaaagagaaaaagcattga

SEQ ID NO: 83356 - DNA, 200 bp, Heterodera glycines
cgtgcatctatggcatttccaaggccattcatttatccatggcccacattttggctaatccctccgttccctcaaatccgatccccggttttctctccctcccttcagctatatctcagctggacatcagcagcttcactactctcagcaaatggaatttatcactttttgaagaaatcccaaagcttgggttttcctgg

SEQ ID NO: 83357 - DNA, 369 bp, Heterodera glycines
ttacatttttattcataaattttgagcaaaacacaaaaaaggtcaaaataggttttgttaaacttcttagggttcaaagaaaataaaaacgataaaataagtgctaataactcgaagagttgcttaacaatcaccaaaaaacatattttccatgctttagggccactggaagttcaggaaaaataagtaaaatctaaaaaacttatttctatgtagtaatattatttagcaatacacattaatatgttaattaaaaagaaatttagtaaaactgacaaacaataacttgtttttatgattactgtcgaaaagtccattatttttaatttttctgtcgaaaaatccttcactgtcgaaatgtcctttgct

SEQ ID NO: 83358 - DNA, 780 bp, Heterodera glycines
  unsure (1)..(780): unsure at all n locations
atggaggcggacatcaatgccgaaaacaatgatggctatagtccgtttatgttggccgtcatgaaccaggacactcaaattgttcgttattttgtctcgaaaggggcgcgagttgatcggaccaacaaagatggtgaggagtacaaagtagtgatttcgggacgaaaacgatgatatctttaggggtatttttcgacattttaacgaaatatcaaccgagtaaaatgtttcggttttttattttttaatatttaccgatcgattcaatcacttgtaagatctctagtgtttaagcagtttatcatgctttattttaaacgctccaatttattttctgctcacaatcagcagctggaatttttgaaaaattttattacgttggaaaatttaattttgaaatcccaagcatttttttaaattttcattcaatttgggaagtcaaagccattgcaggcatttcgcgcttcacttctgtgccggcagtgacgacagatttgagttgtgcaaattgttggtggagaacggggccaatgccaaccaaaccgatggcattggtcgtggcgttacgcctttgcatattgcctgcggccacggcgctttacaaaatggttagaaaatgaaaattgccttccgcatcctatggattggcatatttaatattccataattagtcgttgctggcatttgccagatgtttttttattattattattttttgcgtgnggtgggggattanaatgatcaaagtctgggaccgggaattgccgggacttgaataaa

SEQ ID NO: 83359 - DNA, 568 bp, Heterodera glycines
atgaaaatttttactccttttctgcttgcttttatcggaactcattttgctgtgtttgcaacgctccattctttggatgaatggaaagaaacatgccgaacaattattaatgaaattgaagacactgaaactaatttagcggctggttggttttattaaaccataattgaaaagatttgtaatcatttgagatcccgaagtatcgaagatctaggaaatagagaccggaatacaatcaccaaatttaaatgcaaattcgaagctgatcagacaaattgatcagtattacgggcagtatcctatcgaatggaataacaaatttatccttttctttcaacttaaaattaaggattaactcatttaaaattaaagatttctaattgaatttcaactaaaataactgtaaaaaattatttaaaaaattttatgtcggatttccgcttgggtcgggttttccgactcccagttttatccctgtggccggtcggtaccaaatgaaatggcacacaaatgccgaatttaggaataattacattaaaataattcataaaacaaatgcttaaataaa

SEQ ID NO: 83360 - DNA, 2025 bp, Heterodera glycines
atggcaaacaagttcctctcggatggcaataacatggcaatcagtgatgaaattcaaagtgaccttcaatgccccagtcgtgctaatgccaaacgcctcaactgcacactcagatggggctcatgtccaatgtgcctgcctgaccacgattcagcaaaaatcaactgccaatgccgagatgtcaaactcgaaccagcactcgccgatcctgagaagcgcctaccaattcagctcaaaaacttgcttctccggaacgaaaggcgggacatttttgccgaaatcacctacgcgccgattcagttgtccattcaattcgaggggcttcgaatcgctacggaagaagacctcacaaaatgccatgccatgtccaagggtcttttcgggtgctattcatgccacactggagctcatctccatttgcaatgccacaccgacttcggttcagcacttggctacgttcgttgttcggatggcaccgagttcacagctctctgccacaaaacaccagaaattttaaatgtcagcctatcattcaaccgtgccgaggtcgacatcaactgtaccattgaatgcagtggaggacggaacccattcgtgattaatggtcatctccgctatgtgccaaaacacttccaagcacctaatgaaggaagctcatttgcctcgaaggccaaacccagcaactcatgcctaatttggtgcccagattggaacttcgacttttccgatgtcttttggtatttctttggcctccaaaatgctctacgaactgttggcatcatcactctggcccttttcatcatctatgtccttttgcgttgcaaccctgcccttcgatcttggagagccataagccgagtcgtccttttgttccttgctctttggcctacgactgattcttctgcagcgggagagctgagccatctactcagcattcaaaattcagcaccaaagctgcagtttgaaggccattcttcggtgtcaagacgtgtgactgagactctcgacatttttgatgcacaaatcgggaccattcatctcgccaaaaaccaaaaatcgccaatggacttcgctataaaagccgtctctgtgccagtccattcaccattcctacaaattcccgaatcggccttccacattcaaacccaagcccaattccctccttttccaatggccacactgatctctttcctcgccaacacaatgaacatcgaggtggaacgctttggtcttgccgtgaccacatcgctgagccgttggaacgaggcccgaacaatcgttgagggactgcatgaacgcggctacgaactcaagacgaggcatctgcacccacgtgagcgaaatgtgcgacttcacggatctgagctgagccgaagtggtgcgaatcgtctcggtgcctacaatggaagtgcctgtggcccaactgtctccgagctgtaccgctctcgacatggcatcactcttcggcacccctctgccccatgcctgatggagcccggcgggaatggacaccatgattttttccccatcgaaatgatccgagtcgtggcccctgaccaagtttctacaccacggggcttgtccacacgctctcttccccgcccccgcccgtctcacttcgagctctgggacagaactgaccatccgccccggtcccgagaattggtgatcagcgttatgccccatggtgattcgacgactcgaggtgccgcggaggaataccgcatcggtgttggccgcgaactcacgatctctggccccctcgttctacgaatctatgctggtgcccttcttcttgccctattctctgttgcccttgtcgatggccaatcatctattgctggtccctgccctgctctttcatttgctctttgttctccacggccgctcaaaatttcttgcccttgttcgtcgctttttggtccttcaccttccgattttgtgcaaatcgtgaacaatttgctccgctggcttgttcaccgcttcccggcagcgaacactttgctgaaagccatgccaaattag

SEQ ID NO: 83361 - DNA, 1904 bp, Heterodera glycines
atgccggccattgactgcgttttctacggcgccgctggcggcgccattgcgaacaatggcaccgaaagacactttttggaggaactttttctgtccgtgcgcgaaaagcagtaagaaatgttgcattttaaaatcattttttctaatttcaatttttagacccgctctgaacagcctgcaaaaagcaatgaatgaattgagtggtgggaaagtgccattgctcgacttttgtgtgttggtcgccaatcagcatttggccacaaatatcaactgggcccggcaggatgtgtacttcaaccaattggacgtaatcaacatttttggcattcattgcctttcaatgaatgatgccaatttgatcattttatcattttagcgttattatcgcccgcgttattttatcgctgcgtgggctattctccatctgatcgactttgcctacggcgttaagtctgatcaacttccggtccaagtgaatgtcggccaggacaaagagttgggtttttcttttttggcaaaatttgtgctaatttttagacaggtcgaaatgtgcagcattgcgctgttggggtgtgaccaattccgagtcgaatggaacgaacttttgctggtgggcaaatgcaaattttggaaaatgaaaatttatccgatggcatttcgccaatcggtgatttgattaaactcgggttgggatctccctcgaatcaaaattctcgagtcccaattttcgattaatcaaacaatgaatgaatgattggccaattgtgattgctgattgcctttagcaacttcgccaatatcacttcgatgagtacgattacgtcgccttcaaatacctcactctgctcgactacagtgttttccaccgtaagaaaaagttattattttctttttgtatttatatatttttaattaggccccccttatgacgaggcgaaattcgcgcagtttcgcgcccaattgtaccaaatccacagcaaagtgctgcacagttggtccgaactgcgcaattacaacggactgatgctttcctccgttttgttggacattttgcagaaatttgggtaatttttttcatttggccaaaaatttaaataaatttttcttttttcagccaattagcctcaaaatgcgtggagagtttgcggaagaaagcccaggcggagcagctgaagctgccccaactgatggaggaaatgctgggaaaaggcgccgcgggggacgaagcggcggaagcggtcaatggcgaagaaagcggcgccggaggggcgctgaacttttacgtgcactaattaattaattaatgagacaaatgggaagcagaaaaggggggcagaagaacgggcgacagaaagcagcagggcatttgcaaaacaaacattgtacgacagggacaatcacttcacttaattgaatgcagttgttttttatttcattttttgtaaatttattatttttcaatggcattgcaaaatctcttgcccaattttgtgtaaaaaaggccaaccaatcaattaattaaatcattcattcattaattattaattgtcgtttttccactgattttctctttgctgtctgattatttgatgcggatgtacagttgaatatttaattctgttcttttttcccactttttaattctctttttgcgcttcattcgttgccttacgctgttttttcttattttttatttatttatgcattttcattattaaattcacatcaaaatgtgttattttattattttttcttttcttgccaaaaagcatcctcttctttctttcttcctattcatttaccacaagcggcaatttgtcaaagcgatattattaaatgcattttaatttaatgtaattattttattttatttttttttgactaaaattaatatactgaataaa

SEQ ID NO: 83362 - DNA, 1467 bp, Heterodera glycines
atgcccgtccccgactctgatggacaatgggcggtgagcagcgggtgtttgagcagcaatgaatcggcggcgaggacgagcctaaaagtgtcttggccaatctttgaattgttgttttaatcccacccaaagattggctaccgaaacattttgggcgtggagcaatggctttgcgggaaggacttttgcaattcgaatatcggaggaggagagggagagggagcaaatgattggggcggaagggagaaagggcggggacagacggacaaagatacaccgaaacagaacggaaaggacggaggaggggagggacagaaagagggcgaaaagagcggacgcggagaggaaagcagcgctaggcggaggacacgcggatggcattggccgatgcacttttgttgggccattttggcactttatttccttttcacttttgtacacatccattaataaaaactcgattataaacattcaattttaaacgttttcctttggaaatgacctttggacttggcttttttctgatcagtcgcattttggtccaaaaattggtcaaaggagcgactctcctttcccatattcccttcccacctaattatgtttaacatcccattaattatgcactttaacgtttccatgccgacttcattcgcaaatggtcttttcggtgaactgtcctccgtatgctttcatttaattaataatttcgtttcactttgcttttgctttctattaactcacttaaatgaattgttcgaaataaaaattgccaaaattttaaaatatttccgtcgaatttcggcacaatgaaaacctacgggaagcaccaagtgccaatgtttgatggggaggagaaggaagagaagaaagttggaacagaacaaacggaaggcaaaggaactcgcttgtcgcaacagaaggacgaatatttggagcaaaaaaggtgaaggaaaagcaaacccacgccatttgagtccctttccctcccctccgttaagtgcgtcggctctgatcaaagtcggcccatcggactttccgatcgcccaaagggtctcttcgcttaggtctaacggcgtcaaattaaaaacacatccgaccatcgctcttctcaacggcacaaacaatgaacagaacattcgcaaaagcgcttcgaccccttcgcttcagacaaagcctctccaaggaaaggaagatcggctgcagctgagaagcgaattcgaccggactgtgcccaatgccgcacaaatgcttttagcggcacgggaacgagaaaagcaaatggcaattgcatcgccgagaaatgttggaatgcgactgccaccgcttcagctgccaaacgggccgaagagaattgaaatggaagagtgtaagaaaggagaggatggagggcagggaatgatcgcaacggtggcgacacggcctttgccgcaactgcagccgctgaggcagtaccaagtcggagaataa

SEQ ID NO: 83363 - DNA, 780 bp, Heterodera glycines
atgtgtagacgtacattgatacagcgattagtgcaaacaattagacaacgcaacaacaataactttaatgctacagaaaagacattggttttaataaaaaaaaattgctaattaatttaaattaatgattatttttgatcctcaaaaaataaaatttgaaaatgaatcattataatctattttaatatttttaaaattaaaaatttcattttcattaatttatttcttacaggaaaaagctagcgtaaccattgaacatttttatatatttttgagcaaaataaaaatggattttattgctcaaaatgccaatggatttgaccagaaaaacgaatatttggaaatagtatgttttgctaattttaatatagtaatttaaatagttatttatgttattaagcttcttcttgacggattaaaacgaaaagcaatgaaggaatttgtttcaactgttattgaagtggaaagtagcaattcgggttgaatttgattcatttttgaaatatatctaaaagatgattaaaatattaattttcgccttttaaataattcgtttatattttttttacgaagattttatatatttttgaaatttataacgacaatttattattttttttaatatttataaaagtaattatttcggcgcttttacttttatcatatttattttgtcagcaaaaatttgattttatacaggagttttaactgagtcaatttacatcccgaatattcaactaaacattagctgctatttgaatatgaattaacgcaaataaa

SEQ ID NO: 83364 - DNA, 1030 bp, Heterodera glycines
atggcaaattatttactcatatttattctatttaccataatcagtttagtaaaaagccaaactccaataaataaaaatggtaaatatttttgttctccgacattttaggagcacttttttgaattaaaactgtctaaaaaacaaaaaataaatattttttttcaaaaaatggtgacccaaattaattttacgagttaagcatttaaggcaaatgaaaatctaaaaaactgatataaacatttcccaaagatttcgtttttaagtcaatttgaggtgctaaaaatttgagtcacttcttattatcattaaggagtgatctgaataacttgtgcaaaaaattggtcggaaaatatcgaactacgatttttttaacatgtcctagaaatatttttaatgaattatttttcatatttttaaaaacactttttaaggttcatccactgaaacgatacacaaaatgaaggttcaacatgaacagggtttagaatttttgaagctgttgacagaaattgttgatgaacaattcagcagcaacaagttcaatagggttagaaattttgtcggcaatttttattgattcaaaagccggacttttttgtcctgtttttgcgaaatttttcacaataatttttttttattatataaatttttcatttaaattaataaattttaaagttagaatttttttcagatgaattatgatgaacaaatctcttcagttttaaagtatataaaaatcaaattggaagaaaaaataaaggaaattggtgtacaattaagtgaaattggtcatttctttttgaatttttgctgtgagcagtttggcttcattaacactaccgatgaacccaacaaatccaacgcattatcagtgaatgaaaaaatacacaaaatttatcataatttaaaaatttttttttattttagagtaatttaagttcgaaaggatcaaaaatttgtatttttggcacatttatagcattagcagaatgtatcaaagaaaaattgatgaaaaatatgtaataataaa

SEQ ID NO: 83365 - DNA, 146 bp, Heterodera glycines
aaaaaagtttggcacgtcataactcggcactcgtactcatttcgcagaaaataaaaccacttttcttaagaacccatgggtgctctatgcacccaccaaatttcattccgaaactccacggacacctccagaccttcctttgttag

SEQ ID NO: 83366 - DNA, 1087 bp, Heterodera glycines
gtcaagcaattgacccgtatattcctcccgaaacttcgctgttttcacgaggggccaaagacattttccccgatttgaaggcatttgctacccgcaaataccaagggatattctacgggttgaggaggattcggaagaaggacggatttcagaacttcaatttgaaggttcgatcgagtacattcccatttccatggttccttttttggcaccaggatttcacaaaacttgccgagcaaatctacgcaaatgcgtacaatgcgttggcactgcgagacaaaacgaagctgcacgaactgatcactgaggccgcgttctctgtatgctttttcttttcccttttccaagttgagtgttcattatcagaaattatttaaaatttgaagaaaatgtggcccgatgttgagaaaggcacactccattggaaattggtgcagttcagcgaaccgtccaaagtgctaacggtgcgctgcttggacaacccgaccaaatcgggcaacgacattgcgcagattattgtacgaatgcacagcacacaggtgacaaccaacactatcaccaccacttttaatcatatccggtcaaattttaacaatttcagattttggcactttacgacaaggacggccatttgttattgggctctgaggaggagccaaggcaatgtttggaatacgtcgtctttgagaatcacgtggccagcgtcgatggaatgtggcgtttacacgtaaaaatatttaaatttgtattcttagcattctgaattattattttttcaacgacttacattctattcaatgccaataagtgaataattcctaataaagttcaaattttatctggaaatggatttggctggtttattatttattttttcaaaaatttcagatttaaatcactagaaatatcgaaccttttccatttttagtgccgcatttaccctaattggctgaagcccaaacaatcgccgcaccggcaaggactgatcgacgaagaggaaatggagaaactgcccaaagaaccgctcaaaatctcatccgggaaccaagttaagcagtccaaaaagagaagcagcaccgcaggatga

SEQ ID NO: 83367 - DNA, 631 bp, Heterodera glycines
atgacttcaacaaaaaataatagcaaactgaacgaattgttacaagctggtggttatgatgcttctgatggaattgacagtctcatccccagtcatcttaaacaagtaattcttcttaaaaatgaaaagttaaatttaaattttttcagctttctcgcccggtcattcgtcgtgttcgaatgctgaagaaaattcaggcacaatctttggaaattgaaagccagttttacaaggagttgcacgagcttgagatggtaagattgggagtttcatgtccgcaacattttctaatcgtagagctgacgacgctagggagagaatgtgatgcttgcctttattggaccccgaaataggctaatgcgaaatttcacaaaatcaccttttaggggttagtaaaggcgagtattagcttatcaccctttcattttttcaatttacagaagtaccaaccgttgtacgatgctgtgaatgccaaggtaactcattaaaaaggaagagacttgttcaattttctcttttcaatatatattttattcagaggactgccattgttcgtggcgagatggaacttacggacgcggacggtgaacttccgccgcttgttagtgaactcgagccacagactttggag

SEQ ID NO: 83368 - DNA, 236 bp, Heterodera glycines
ctcacccttctcatgtatcgttcgttgatgtgggtgtttcggttcgcttttgcggggttcgagcgtcgccagcccatgaaacgctcaaacccaccgggttcctccaattccttgtgatggtgcacaaaacgaagttgcatgatgccggtggaaaaaagtgatggtggaagacggcacaacgaacgcatggcattcaaagtcaaaaatggcataattaaaaatcttttttttctgaa

SEQ ID NO: 83369 - DNA, 1313 bp, Heterodera glycines
atggtcacagcagggcaaaatccaacagattctggtggtgacaaatcggcatttttcccgaaggcattggccgttctttcttccggcgttttggcattttctgatcaggtaatcagccaatctctgacacgaagagtataactgtgccggttactaaaaactgaaagacgctcacctaatgatcaatctgatcagtaattagccaaatacgcaggcaatcgcggctattcgacaaattgagcattcgcctcgaattcaattcgacgcggttgccaaggtgtaccgggtgaacagcacggaaacgggtgaactgctcgagtttgacgagtggggaaggcatttgagcacattagccacggacagaagcggaggaggaacagagagaaggattttgttgaggagaagcatcagttacggagaagaagcggaaaatgggcagacaatgctaagcattttggaggagaaagaagggcaaaaaagcacggaagtgaaagtgatcaaagggcaaggcggaggaagaggaggagcagaggggacggacaaacaacgattgtggacaatcgaaacggaagggggacaaacggttgtggaggaagaggagggggaggaggaaaagggtggagcaacgactgaagcggaagttggggcaggacgagcgggggacaacattgttcggcagaatgtgagcgcagatctttaatgtttttccagctcaaattggagccttttcttggcttcgagtctcaagatcaagagcaaactcaaattctcgggagtatcattttttccaacgagtcgagttctaaaatgatcaatcttcgtttgggctgtccgcggagttttgttcacggcttggttttgggcttggccatcttttcccgtccccatcaagtttccgtatttctcccttcttccagatcagtgtcacttcatcggccgatccgatcagattgcaattcacccgggacggactcttgaaaagggtgtccaacggaacggaccgaacattcttttcatatgacgacgaaacacggctgccaatttgggcaaaattcccggatggaaccgaatttgaaatggcggcgaatgaatggaaagcaaaaggggaaaaacggagaggaaaaagcgaacggaggagcagggcactttggacactgggaaagtactcagatgaccgcgccgcgcgagtgtttatgggagacggcgaaggtcggtcaattcagtcagagacggaccatccgccgaaggcgttaaatcccgaatttgtgactttttggtccaatttatacatagagaagaatggcatttggtga

SEQ ID NO: 83370 - DNA, 3887 bp, Heterodera glycines
ccaccgctctcgcaaaactctcggcttctgatcaacctcactgtgtcgccaaaagcgcgcattgtgctgttggcacggcattccgttaggccgacccccggggcgcatgattggcagaaaattgtttccggtgaccgaatgcacccattgacaaccgatcggaatggacgcgacacggtaggagagcagagatcagaatggaatgaaagcataaagtagtgattagaaaagagaccctgattaagtcaagttgagctatggccaagtcaacctgatcagacaaagaataagacatgagatttgggtttttggggataagaaatgaattcagaaaaatgatcgagatcgggagtctatagtttacagtaaattaatttaatgaagactgattgaatcattataaccaaatgatccaaatgactaaagtgtgttgactttttcagacgtttcttcggcacacaatgatcagtcactttctgacagctggccgatggcattttggctttttgaatgaccgggaacaggtgttttttggcggtgattcctctcacaatttgccccattccttcagaatgaagcggtcactttgttggctacagtcacagaaaacggtgccgaaagtgatccccatcatttggcattgtcctcctcctcctcttcgtcgtccgatgatgcgccgtgccaattcgactgtttcggcaagggattgtgccgtgccgggcgctgtgtgtgttaccccggctacggaggcgtcttttgcgaggagaccgcttgtccggtactgtgctccggcaatgggatgttcagcaacggaaagtgccagtgctatgccggcttcaaaggggtcgagtgccaaatgctcgacaattggtgagacaatgggagggaacagcagggaaaggggacaaagtattagtgattatcgagaccaagcgattgtaaattgggcccaaaaacaattgggcgggggacggccgataaaattggaatttttaattaaaaatgcacttttaaattcaaatttagaactttaacgaaaaagctttcttattcaaagtgatgaactgcggcgcattttaaaatagactgattttgaattttcttaaaaccaaagggcgggccaatttgatttgcaaaatgatccccgaaattttggggtttgctcatcacgaatcttacatcacttttgatcaattccgacttcctaatttcaaaaaaatcctggatcgaaaaatttgaatttttgacttttgttcgagctcagtttggggcttagactggtaaacataggtatcagattcatgatcagggactccaaaaatacacccgggaacaataaaagtcatctcattggaaagggttcttaaatccaacaaatccttcgaaggtgtgaggatccgagctgtgcagggcatggcaaatgcgattcttcagacggaaagtgccattgccgggagggatggactgggccaaattgtgcggaaaggcaatgtccgggccgaaacgattgtgccgggaggggcatttgccacgggggaaaatgcttttgcgcgttgggatggacaggcgaaggctgtgagaggaaggcaacggaggaggaaaagcatgaagaaaagggcgagcaaaagccgaatggaaatgacaaaattggaccgaccaatcggaaaaaaacggaaatgccatccaacggaccgagccaatgcccacacggatgtacggaacacggcacatgcacagccgacggacagtgccagtgccaagcgggatggaacggcgagaattgtcaaattggtcggtagagaggcaatagtttgggaatttgactgattgacggatttttattcaaaatgccaattgatcccccgtttccgtttcgttggcattgtgagtgagtcataagctcaacaaacagcaactcttttcagaaacgtgcgcgcgaaactgttcgaatggtggccaatgtgaactgttttcggatgggtggcggtgccaatgcgacacggcacattttggggaccattgccaattcgcaaagggcgaacggagttgcgacgacggacacgacaacgacgggggtgagagagaagcattgaaaggacggcggaccattaacagaggcacaataataggatgtaaatcaaacttttagccccgactttccccccctccctcccttcaaattggcatttccataaaaaattgccaattttgccccttcagatggccttaccgattgtgaggattccgtcgagtgttgtgcccacccgttttgcgcctccgattcgctgtgtttggccatgcctttcccaagcgaagccgtcgatcgccgctcactttccatcagcgatcgtttggcttctccctttttcgatcgggtcaaatttctcttcgatgggggcgaacattcggtgcagcgatacgcggacattcgccttttggacagaaagtgggcagatatcgataaataaatacaactatatatcaatcactgatcactcattttccctaatcttcgatcaattttccactcattttcaggcgcatttccgtcctccgcggccgcgtcttttcctcccggggcggtccgttgacaggcgtgcgcatttctgactcagaaaatcctcaccacggcttttcgttgtcccgcgctgccgcaatggacgaaagtggtgaaacaacgacaacggctggcacttttgaattggcactgaacggcggcggaatggtatcagttcaggtaggggagagactaagccctgaaagtgtgaggcggcaaaatttatgattgtctcccatgttccattggcatgactaagcccagcccttcggggaaaaatgccatgaattggacattctgtccaaatcaatcggcttcttcttttgattttcgtttagttcgttcggcaaccgtttggccgtgttccgctcactttttacttgccaccaaatcgaatcgtcagcattggcaccgtttggatggaccgtcctttctcgacatcgacgagaagcggctttttccccgccgccccttctgcgtccgcgtcgcattgcgttgcgtctctctccgattggcactttcgtccgtccgtctcgcttctccgcccgctctcctcctctcccactgtccctcttccatctgatcactcttcttcttcttcccctacgctttctccacaattgtccatcgattctcgcgccatttcgctctctgtgctcattcccggcactgatcagttcctcttttattcctcaaactgtgccgacggtgctcggagtgtgctgcgcgtccaacttttgggcgaccgtttgcccgccgggcttttgcgcgtcgaattggcactacaaattgacggagtgcggcaccagcggacattcgcaccgcgcgagtcgctttcgcatgaattcgtgtgggaccgacaaaatgcgtttggacaacacgagtacggacttcgcctggcgcaatgtgagtttaaattattttttgacaattctcgaacaatttcccgcctctctgatcacggacattgagcctcgagccgagaaatgttcctttttgggttttaaatgaattagacgacattttgccctctgagtcaacatttcttttccctttaagtcgacatattgtccctttgagtttacattttgtccctttaagtcgacatattgtccctttgagtttacattttgtccctttaagtcgacatattgtccctttgagtttacattttgtcccctccgttcgcttcagtgaccatcagttttcatctgtccacttgtgcgtcgtccgtccgtcacttcgtttccctccatttgtccgctcactctctccccgcttctccgatgccgtcgttttggtctctctcttccgtccatcggcttcatcc

SEQ ID NO: 83371 - DNA, 81 bp, Heterodera glycines
gctaacaagggaacattccgagctgtgagtgggaaaatgcatataagctatataccattggatagagcggggtcgacttgt

SEQ ID NO: 83372 - DNA, 1952 bp, Heterodera glycines
ttcatcaataagggcgtccattggaataggaggaggaagaaaatggccaaagaaatcggccggagagcagtaggaacgggggggggggggggggaggatacccctcgcatacctaatttgcattttttttggtgtttctcacaattgtttcggtacgattcttccttttttaatagcattgaagactccgatttattttttaccaaaaaaattatttttattcttatttaattcaaaaattgttcgagttcgggtcaggcgttcggtattgggaaaaataaacgtcaaattcgtgattagcggcccaaaaaaccccaaaaataatcaaaatacaacttttacaggcaagaggatttgaacccacagcccagaaacccatttttaaccaaccgagcaattcgtttcccttcctttccctctgtcgagaatgtgccccgaggcaatgaaattccaatttttgagggcctgtaacttttgaagcaggcaaaatgcaccgctaaaattaaaaattcacaatacaagtcgaccccgctctatccaatggtatatagcttatatgcattttcccactcacagctcggaatgttcccttgttagcataggaaattctggggccatcctaaaaagtgacacatttttctgtatcccttcagctatttgttcgtctcccaggagcgtttcggcttcgccctttggtccgcccttttgcagggaaatatcacttggcaagagaccggcattttcccacgcgtcacttggtgcgattttgatgtgagaagaacaatatatttacattttttaattttttcaaaaaatgaacatttaaaatttttagaatgaaaatttgtaattttccccccaatttttcgtgttaaggtgcgcgagatgggccaaactgtcaaccacacggtgcaatgtgtgctcacactgaacgttttcatggagaaggtgtgtgtgcaattgacattaatttttcatttaatttttgtctcaattttcggtagaaattagtttagcccaaatgatttatgactaattggggggcggcacgggtttaattccattccatgaaatgatcattttcctattttctacgccactgaacaggtgttcctgatcttgtgggcttggtacgctgtgttggccgcgttgaccctggccaacatcaccgcttggctgtacggctatttgagcgtggcgtccgctgaccatttcattttcaaccatttggagatggccggcgctgaacaaatgctgctgttcgacatggacgggcggacgaaaagcaaacgtaggcttatgtttggagcaaaatttttttaggtttaattaccccctattttactttaatggttaatttgcatcaaaaaaattaattgaaaatgaatttattttttattgcaattgttgtctagtggtaggccagtgttcagacaaagacaaaaatcacaatatttattcattgaaaatttttaagagaaaaagaaatttggatttattttaattatggtaaaaattctgaaacatgtaacattaaaagaataaatatttcgggagcagctcgttacactccccgtgtcgttccctccaaaagtttttaaatttcaaacttataaaatgtttttttgaaattttctaatagaaaattaaaaaaaataccggaaacgatacgggaggagggcgtaatgaacccaaatatttcattttataggcaatttaggggggagctaattgtgtgggataaatgtgtgaaaatgatcgatgctgtttgttcatttatattttttgttgcgcagatatgcaattcgccgtgcgtcgcttcgtggccgaatatttgcgctccgatggcatgttcattctgcgcctgattggccaacatgcggacgttgtgttcaccaccgaccttgtccaccggctgtggacatcgcactacgaaattgagaaacagcgcg

SEQ ID NO: 83373 - DNA, 339 bp, Heterodera glycines
atgcatttgcttattattgttttagtgttctttttcataaagaattcaattgacaaaactttatcagttaatttatatgaaaagaatggaaaacttaggccaacttttgctgaaatatttggccaaaaatgggacaatgaaaaaatggaatgtgaaaatgaaactgatcaaaatgcaaattatctccaaaatgatcaaaatgaattaaattcggtcgattcaattagcagtgatcagaataatcaattagatgatcaacaaaaattcgaaattgttcacaaattcacgcaataaaagaacgaattaagaaaaaagggaaatattcagcaaaaattcaga

SEQ ID NO: 83374 - DNA, 291 bp, Heterodera glycines
atgaacttggatgacctgacgagttggccagcggtcaaggaagcgttctgcagcggaatggaaaatccaaaaaaattagaacgctgtcacaaaatggcagaaaaattgcatttcatcgaggaggaagacaacgaagctgaccatgatgaggaggaggatgatgaagataaaaacgaagttggcttgtccacacgttcaaattttgtcgattcacaatttgggaacaatgagcagatccatccaatcatgtcgggcgacgccgaggacggagaagcggaaagtcgagaatcg

SEQ ID NO: 83375 - DNA, 1001 bp, Heterodera glycines
atgatattctttcttataattgtcatcatcacgttaattattagtgattcatttgcagcaattgaagaatttcgatttagccgtaggcaatcagcgggagatgtgctccgcagagcaatgtcagcgagaaattacacatttaatgaaccattaattgtgataaaccatatggtcaatgatggacaagaaagtaatgagcaagtgagtttttacggggttatgtaaatagattattcgaggtgacaaactaaactttttaattgattaacagaccaatagttctttttctttgtcgacacttatcgttgcaaaagaattgtcggacgaagaaagacggataaaatcagcaaaagaaattcaacaagaattattggcaaatttgcgcaaaatccgcgaaaatattccccgtccaaagggtgtaaaacatttttttaagcggtttattgaatcaagaaaaacgaaaagttttgagaaaaaattggcaaaaaatcccgatttggaaacagaaatcagtgagacggtgctggacgaaaccaaagggggcccatgtgaaaaactgttgcccgcacgtgatgaaaatgggaagctgttcaccgattatgagctgagaatgaaggcacgttgacaaatgtctatttttgcggggacgtcaaatgcttttggccaactccgtctcagccaaatttaagattctcagtccaatagtttcaagctttttttggcattatcgatcccttttcttttgtaatttttgaatactaagcattttggtgcttatttgttagcaaaaaatggaaaatatgcccaaaattggaggcagttttttgttgaaaatttgtatttgatggcttttttataacgcctcagcaccctcacagggagttagcccgcttcaccattttgtatattttataacagagatgatttccccttctccactcaaaagtgtacaaatttcttaaaaaagcttcaaggttgcacataaaaatataaaaaataaa

SEQ ID NO: 83376 - DNA, 569 bp, Heterodera glycines
atggcaaatgggaaaacggcgcagcggatacgggaggacgatgcgcgacggatggccttcatcacatctcaggtgcaacaagtgctcgtattttgggagtgcgaaatcaacgcggagaagcgcaacaacaacgaaatgaagcgctcctttgcgcagtacaaggacagcggccctatccgtttgaaggactgctaccatggaggacgtgtgggtccgcagcgactgcactacgaggtgccggaggggtggcggatgaaatattacgacgttcgttcgctctacccccacacgaatgccgtgacagcataccccgtgggtcacccaacacgagtgaacatcattggtgaggcagagcaggcggttgactggcgacgcgccgaccaggtgccggtccgtggcattctcaaagtgttcgttgtgccggcccatcacgttgatgtgcctgttctgcccgtgaaatttgatcagcggcttcttttcccgctgtgccgtacctgtgctctgcaacacccgcatggagcggtcaatgaagactacgagtgcacgcatcgcgaggatgatgagcgggg

SEQ ID NO: 83377 - DNA, 843 bp, Heterodera glycines
atgctcttcgcccatttcgggggtcgctttgacaacattatgctgtttcggcagttcttcctcaacgggttttgtccacagatgatccgtcggggtaacaaattatacgaaatgaaaattgcgaggggcgaaaaaaacccggagatcatcgtaagagacagctggaaccttatgccggtgccgctcggcgctctgcccggagcgtttggactcaatgtgcaggataaggaatttttccctcatttggcgattgttgcggcgaattatgggcacattctgcagtcgctaccgccaaaagctgactacttatacggcgggatgacgcccgaccgacagcgcagattcgaccagtggtacgcggaacaccaccatcagcacttcgacctgtgtgaacagctcgcagcctactgcaccaacgacacgcgcatactaattgaggcgttggtcgcttttcgcacggagttcttgacgatcagtgacccgctggagcggcatggatgcttggatgacgacaacgacgacgaagaggaggaggaggaggaggaagaagacaatgcatttgaagtgatcggcggtggcattgacataacgtgggagccgatgaccatcgccagtgcctcaatgagacactttcgacttaatcacctcaagagggatcagctcgcgatcgtgcccgagtgcggctacgacactacaaacacgcaaagccttgtagcgcttaaattcatggactggtacgccaaaaagaacggggtgagcattcagacggcacactcgccaggcggagagaaaaaattggccagtacactgtggacggatacatcgcggcgaccgacaccgtga

SEQ ID NO: 83378 - DNA, 821 bp, Heterodera glycines
atggaaaaagtggtcaaatttgaggaacatcggcacaatcggtggcgcagggccccagcggtgtggggagagccggcgccggattattcggcagtcagcctcggcattccctctactgcctttttcctctatgctctgctgtttgtcgacttgaagacggtgaagcactaaagtgggctaaaaattggcattttcctttcatttagcaatgggaattgcataggtaattttgggtcaatttaaatattatttagtcggaccattatcgccgagaacacgaagtcgtgaagcgagaagtgatgcgactgcgaaatgaggcaaacactgtgagaccgaacattaattagcacgccaatggcactaattaggcccaaataagcaaaaaccaaatagaaagttggaaaatccgccataattcttgtcggcgccgtcagattaacagggattattaaaagcgaatctgcttcagtacttcttccaaatcaacatccgtctgcttgtcgtggacattttggagacttttcgcgacgatctgtccgcctcactgtattctttcgagcagtaccgtaaccagcgtgttgcccagttgcccttccacaatgttgccgttctgatcagtcatcgccacgcgggcggactcgcattcatcggcgggctgtgctcagggcgaaatgtgatgatggccggggttggtatagaacaataaatttaaaatattctcacaaaatgtgcaacaatttcagttttacccgcacaaccccgaggcaatggcgtccattttcttccacgaagtcgcccatttgatcggtccgtctcaatga

SEQ ID NO: 83379 - DNA, 733 bp, Heterodera glycines; identical to SEQ ID NO: 18709

SEQ ID NO: 83380 - DNA, 946 bp, Heterodera glycines
tcggatgagttttgaagtgaaagcgggccaaaccgtggctttggttggctattcgggctgtgggaagagtacggtgatggctttgctcgaacggttttatttgcccacccggggaagcattgtaagaacgaaaggatggaaaagggagggaccaatcaaagacagtgctaatttcagctgatcgacggaattccaattgaggagataaacattcacagattgcgcaaccaaattgcgatggtttcgcaggagccgacgctgttcgactgcacaattcgcgagaacatcacttacggaatggcggacagagaacgcataacgcacgagcaaattgtgagggcggcggagcaggcgaatgtgcacaatttcgtgctgggactgcccgaaggtgtgcagttaagggattggcggaacagcataatttggcggatgaccgcccaccaattagcccctaattaattgccttaatgtttgttttgttgccccattttgggctatgagacgcgggtgggcgaaaggggcgcccaactgagcgggggccaaaagcaacgcattgccatcgccagagcactgatcagagagccgaccgttcttctgctggacgaggccacctcagcacttgacacggaaaatgagaaggcaatcaatccgaatggggcggaaagggaggaaattcctttgttttaaaggccgtcaaaaaggcattggaaaatgcccgcaaggggcggacttgtcttgtgattgcgcaccgattgtcgaccatccaaaattcggacattattttcgtgatcaaagacggccgagtcgtcgagcagggttagcagaggcagagaaagaccaaagaaaaacatttgctcacccaaacacaggtgggcacgacgaactgatgagcagaggagggatttacacgacactctgtgagacacaaattctgaaggaagaggcg

SEQ ID NO: 83381 - DNA, 1035 bp, Heterodera glycines
  unsure (1)..(1035): unsure at all n locations
atgcgcaactttgccttcattttcatttggtttctgatccagttggggaatcatttgctgagtgagttaaaatattaataaaaatataataagaaataggcaaaatggataggaatcgaatcctcgctatgccaccatttcgaaaatgacaaattcatttagttgatacgggagttttattaagtacttaatatttataatgtttagaaaatgttcgtgcttttccaactgcagaaaatggaagcggaatggtaagtggagtgtttgtggaggaagaactagcagttgaaatagaaaagcccaacgaagcgaaccagaatgtcaatcctgaacacgatcaaactaaacgcgaaggagctgtaagcgaggggaacatgaattccaatcatggacatgcagagaccgtatacgagggaaacatgaatgccaatcatgaacatgctgagaccgtacacgaggggaacatgaatgccaatcatgaacatgctgagaccgttcacgaggggaacatgaatgccaatcatgaacatgctgagaccttacacgaggggaacatgaatgccaatcatgaacatgctgagaccgtacacgaggggaacatgaattccaatcatcaacatgttgagagtgcacacgaggggaacatgaatgccaatcatgaacatgctgagaccgtacacgaggggaacatgaatgccaatcatgaacatgctgagaccttacacgaggggaacatgaatgccaatcatgaacatgctgagactgttcacgagggaaacatgaattccaatcatgaacatgctgagaccttacacgaggggaacatgaatgccaatcatgaacatgctgagaccttacacgaggggaacatgaatgccaatcatgaacatgctgagattgttcacgagggaaacatgaattccaatcatcaacatgctgagaccgtacacgaggggaacatgaatgccaatcatgaacatgctgagaccttacacgaggggaacatgaatgccaatcatngacatgctgagactg

SEQ ID NO: 83382 - DNA, 531 bp, Heterodera glycines
atgttcatgattggcattcatgttcccctcgtgtacggtctcagcatgttcatgattggcattcatgttcccctcgtgtgcagtctcaacatgttgatgattggaattcatgtttccctcgtgaactatctcagcatgttcatgattggcattcatgttcccctcgtgtacggtctcagcatgttgatgattggaattcatgtttccctcgtgaacaatctcagcatgttcatgattggcattcatgttcccctcgtgtacggtctcagcatgttcatgattggaattcatgttctcctcgtgtaaggtctcagcatgttcatgattggaattcatgtttccctcgtgaacagtctcagcatgttcatgattggcattcatgttcccctcgtgtaaggtctcagcatgttcatgattggcattcatgttcccctcgtgtacggtctcagcatgttgatgattggaattcatgtttccctcgtgaacaatctcagcatgttcatgattggcattcatgttcccctcgtgtaa

SEQ ID NO: 83383 - DNA, 1652 bp, Heterodera glycines
atgtactccatttggaagcatttgcgcgaaaattcctgctacagactgctgttcttcatcggaatcactgacctgagcatactgtggattcttggattcctccgggcatggtttaatctgcacggatatgtgttctgctcctttccgacactgatttattttgttggcattgcgacaacatgtgaacaatatatataattaaagagttatcgaagcgctttattcaaaatcccggtgtttgaatttttttttctgtccaaaaaatgccaaattccgatgaatggtttgcggcatttttagtgatatgatttattattctgaaattttttcacctctattttttcatgatctagcttggctcaatttaaaattttggggctttttaacatttaaaaaattgagagacttgttttatgatcgattttctggaatattaaatgtcttcacaaaaaatattaatatccatacaataaataaatatttggtataattcgtgaatttcgatgaataattaattccattcatttttctattttagcgctttggatggctgaaagcactgctgatttggtaggaataattaacatacaattattaaacaatgaacaaattctcaaaaaggaattattaatatttagtctgacacattgtaattttatcatttaaataatttatatttttaattttattttatttaaaaatgattttttggcatttcacccccaaaaggttttggcattcaatcgctgtgttgacttcttctcaccccattattcgcgacttttgttcagtggccatcgaacattgttttggaatggcgcctgcgccgcctacgcattatattgggcaattttcctcaaaccgggcatctacagtagcgtttattttggctcctttttcaacccattcatgggctaccgtaacgatgaacaaattgaggttgacaccagaaaaaataggaaattttaggagaatttttgcaaaataaaaagttataaaacacattttgcgggaaactttcttgaaaaaataaaaaatttttttattttttttattttaatttatttccctatggcattgaccgaatggaatcccgagaataatttaattaaaaacatcctcccattctccaatattcttttttgttcgataacagcatatttcttaaaacaaaaaaaaatgcaaaaaaaaggaaatattatttaaaaaatttatttttcacatggaaaaataaattttttttaaatgtgaattttcttctagggaaaatcccggtttaattacgcgatttttttttatttttacaataaatagggtaaagcgaaatgcgtaattgaaaatgcgatataaaaaaagagcgaagtaattcggcaaatccctttgtccatacaatacttctatttttttgtaccgattacagtaccaaccggtgttgcacattttccacaacactacggtggcagtgctaagcccgagcatttatctggtctttatcataaaactgttgtacgacatacaaataaatcgcagacagctgagtgctgttgtcaccgaattgagcgctgtgcagagaaaggtggtatatgattggatttttttagattttccaattttttaagttttggaataatttaatgatttttaggtatgaa

SEQ ID NO: 83384 - DNA, 1595 bp, Heterodera glycines
attagagtgcgccgggacagggaattttgggcaaaaccgggaccgggccttgccgggacctgagaagccgggaccgggacctcgatttttgttcgggatcggaaccgggaccaaccgggaaatttcaaaaattcaaaaaaattttaaaaaattcaaattttaatttttttaaagtgaaaataatataaaattatttttttaattttatttttattttataaaacccaaaagttaaagctaattaaattaatgaaaattttcaaatcgaatttacttttattatttcaaacaattaatcaatttttgactcaaatgatcgaatattattagaaattcagatttgcttttcacatcactttatttcggcgcgctttttccaaaaaacttttgggaaagaaagggggtccggcggtaccgataggcgccgccgggggaaattttgaaaatttgagtgcaatttgttaacagattttcaacaaaaaatgctgatttttgggattaataggctcattttgtactgattttctttaaaaaatgataaaatacaattaaaaaattgaggaatcatattttgtcggtaggaaacccatgaatatacaaaaagaaaattcaaaatattttagtttctgtaaagggattgaaccaggggaaagatgaagggaaagtcaaggagactagccactaggccatttttacagttggtactactacttttatcaaatatcttaattattatttcaaaattttttcttttcactccaattttattcactaatatttcactcagaccctcattcctaccagtgcttgttccgggacctcggatgaccgggaattcccggcccggtcccggtcccgacgcactctaatatatataattaattggataatgcccccatagaattggcaatccgcttgtgctttctccgcttgtcttctctccggccattttgtccccgagcattttggggttctgttttgacctaattgtctaattgctttttatttatccatttcacaccttttggcctgcaattttgtcgcctcgttttttctctcccctggttcgcgttcattaaccctttaattatgtttaattggaccaaatcatattttggattatatcgcctcgtataatggctcccatcgtgttgtctccgcttgtcttctcatccattattttgtctccgatacttatggagccattcattttgtcgccaggtcaaataaaaatttaaatgaaaaacaattaaatcaacttttttagggtttttgaacagtctcgtaagttttcaatttgaaaatccacatatttcattttcctgtcccagattttgagtccggccatcttgaccccgctaataatgtccccccagttgttacatccggccattctgtccccgctggtgctgaccccggccattctgcacccgacagtgatgtcgcccactgtgctctccccgttcgtgctaaccccgcaaattttctctcccaaatttctgggcggtcttttcctctccccctacgcactgtcccccgtttttaagtcgccccttttcgtttattcgatcgttttgtcgccgagttggctgagc

SEQ ID NO: 83385 - DNA, 1286 bp, Heterodera glycines
  unsure (1)..(1286): unsure at all n locations
atgtccgatgatggctcatgcgagactgagtcaattgatgcatcagatgctgagtcggtcgcatcgaccgaatcattgattgatcgcatcgataagacgagaaaattcatttctctgcgagattactgcaagtaccatctcgcaataagggatgaaaatttggagtggcaataccaccacattctttcatgtggtggtggtcttggacagcgctgggtcctagaccaagctgcaaaaattgactggcaaattgccacttttttgcgccgtccagacatggacttgcgcattagtactccaaaaaatttgctgcattatttggtgaaccaatacaataagcagcaagctcggcaaaaccccaatgcacaacaaaagagtgttgatgacattggcagtgttgttcgcctttctgaaaagaatgtaaattcgcttcagtattggaaaaaaaggtatgaagactgtaacaccatttttgcacgttgccataacccaaaaaaggcgcggctcttcatcacattcacgaacaaccgtgagtggccagagttcaaggagaacatttacaaaaatggtcagatgttcactgaccgttttgacatgtggatgcgtgtgtggtccagcaaaattgctgttttccaccaggagctctatgaaaagagtttcttcggaacaatccttggctcaggcgagtcaatggagttccaagggcgtggtggcccacacgcacacattgtagcccagacggacctggacgcagtcccagaagtcatccaggaatacatatgggctcatattccacctttgccagacaaaggcgatgactccccaattgcacaaatgcatcgcgaaatccgcgaattgatgcatatgcaactgcatagatgcagtgatagttggtgcggtccacgtgaccccaactttgggcggtgtaaaaagggcttcccagccccgtactcgaaatgtacgattctgcacccagacaggcccgcgttgtattaccggcctagcccaaccgatggtggtgcccaaattgaggttaacggcttaatatacgacaactcacaggtcgtgccgtacaacccatacattttgctgcgttaccgagtgcaccataatgtactatttgcgtacggtaacaaggcaaatataaaatatgcactcaaataccctttcaaagggcctggacattgttatgtcgagtgcaaagaggagtccggcagcaaaatcggtatcgatgagccggcccatatgccaaatgaacttccgtggagctacggaagcttttgcan

SEQ ID NO: 83386 - DNA, 504 bp, Heterodera glycines
atggacaaaagactcataccgacaaaagacctatggacaaaagactcataccgacaaaagacctatggacaaaagactcataccgacaaaagacctacggacaaaagaaccacaccaactaaaaaccattcacgtataaaagacgcaaaaaaacccattttaattaaatttacaggactcaggttacccgaccgagtcagacctggatacccggattttccaagacccggacccgacctttttaaaatacaatatgtcgtacctgacccggcaggtccggatccaaaaaaatgcactgccaagaatggaagtcgggtcaaatttgagggaaagaaaaatttagaaaaattaatttactatataaatacttttactttcttttaaagtggcgttgtctattgtctctctctgcttattgtcaatatcaatttcttcacatagcgatgaatattaacagctatgtttaatatttttgttgaaaaactgccacagtatgcaagaata

SEQ ID NO: 83387 - DNA, 525 bp, Heterodera glycines
atgctgaggtgcggtgtttcttccgagagtgactcgtacattaatgcttccccgttgcatttgccttttgcgcatcgcaattacattctgacccagggacctctgcccaacaccacctgtgacttttggcagatgatctttgagcaagaaggttggttcagctctcattgtacattcaataaaactcgttttagtttcaatctgcattatgctcagcaaagtcatggaaaaaagctttgtcaagtaagaaatcggcaacgttcgttaaataaaaatttcattttcattaatagttggattatttatttctttttaggtgtcactcttatttcccttcaaaagatgagaaaaaaattgcatttaacaattgggaatgcgaacttgagcatgaggaatcaaagccgaattacatcattcgccgtgttcgactcactcggctggaaaatcagggggaaaagcagcgcaactcacctccaaaggaacaagcgacagacaatgcgggaaaagagcgaaatagccgaataa

SEQ ID NO: 83388 - DNA, 484 bp, Heterodera glycines
  unsure (1)..(484): unsure at all n locations
atggcttgggcttatcagcacacccgcgcactgtttgtacagaaactttttcgtgtccgccgtacaatagcgaaaggcacggacaaaaacaagccacggaaaacggagcgatcttcatcagcagcagcaagctgggcatgtgcagttgcactgctaacagtggttagctgacgagaaaatgcaaaattaaattaaaataattaagttgttaggacattttttntagaggagcatctaagctaaatataattttctcaaaatagactaagtttattgcctaaatttaaaaaaatagttttatccattgtttcattttttatatattttattatgaacataattttgatattttaattgtttaaaataattcaactcgtttataacgccctaatttatgtaatgaattaattaattaacatttggctgtgcttcatccagctcataatagtcggaagtcgcacgcgcacagaaaaaaacatttgaa

SEQ ID NO: 83389 - DNA, 1151 bp, Heterodera glycines
  unsure (1)..(1151): unsure at all n locations
atggttcaagctgtggttcaggcacgaatgggcaaaatgctttctcacccttgcacaccaaatcctgaacaagcagattatttcaatattgtaatcgatgagattggtgaaatttctgcatatctaaagtcgacagttggcaaaaagtcatttaattgacaatttaatctcattattaatatccaaaagattgttttagctatccgccaaattccacggtaatgacgctcgaattcattttgtacacggacgatggtgatactttgccattagaagcctggttttgcaatctgaacgattccttttgtattatgtaatgtttagggtcatccgactcgattctgagtgccaagattggtcagcccatcatggcttatggacgcaaagtgcccggacaagtttctaccaccaattgtccactctgctgaggtctttggtcgttgcgtcacgctttacaccgacttatcgtcattatgtgcgacaagaaaacccttcccatgagtcggagacttttgtcatcacttacagggttcataaaagcgatagtgcattcctattttacaatttaaggtatttaacggtgaaccagacctttctcagcttggcgatgaatttaaatctaaaaaactcggacaattaccaactccttttggtgttatgttcgtcgagttaaattatagaacaaaaatggaaatccaaccgcagccttttgtcgatgaagccgctaatgttcaaaatattgtgaatgctatcggttaacttttttttgacaatattacttaattagttgaatccatttttcattttaaaatcaacagatttaaatttctttttgatcataaacgttggcattttgacgaagtcggaggtctgaatgtgactgaaaaatgatcattattactgcaaaaaacgaatccaaactaaccctttaacctacacaattntaaagaaaaaaacctagagatattaaggtgtattttttataatttcaattattttcaggaaaatgtcctttggcgattgctgtgccgcaagagggcagtgaaacagtgccaataagtccaagcttcacgggtaacatcaacatgttcagtgcgagtcccatcagtcaggtggaaaaacactcgaaaaaaatactagtctaaaataaa

SEQ ID NO: 83390 - DNA, 465 bp, Heterodera glycines
cacgaaactgcaatcaccacctccgcgcttcaccaccattaccaccaccaatccaccgacatttcttcgtcctccccctcgctgcttcaaaagcagcagaacccattggtcgacatggtcaatccgccgagcaatggcagcatcagccaacactcgtcgacctcgccgcccagcctcacaaatgtgctgttgtgattgatattcgaaaataaatgcattataaaattccctatttttgtacatttgtgaatttatcattttagagctttattttttattgttttgttattttgctgttattaatcctcgagatgtttcctctgaacctttttttctgggctttagctaattgtttcccgagtacaaaaaataactgttcatatgttctaatatattcctatcctttctcaattaacgcatacctcaaaagcataaatcactgaatatataaattcatttatttta

SEQ ID NO: 83391 - DNA, 461 bp, Heterodera glycines
atgtcccaccaaccatttgctaatttcgaaattgtacggcttgaagcgatgatcattgggttagaaatcgacaaggaccaactgcaacgagatgtttatcatcttaaaaataggaaaacacaaatccataacaaaaaaatcgaattgctacaacaaaaggaacaattaataagagaaataagtgtgttgagagagacaaaggcaactttggtcaacgagacgaaagatttgagagaagaaatattggaattacgagatatggatggttccaatgacgacgacccactttgcgccgtttgctataccagaaaagtcgtcagcgtttaatgcaaaactaattttggatattttagagaaattatgcatgcattccatgtggtcatcgtgccctctgcaaccgatgcgccgaaactgtttcaattgatgggcgttgccccttttgccgtgaagaacttattggg

SEQ ID NO: 83392 - DNA, 3017 bp, Heterodera glycines
atgtttattgcaccattcactctaattttgtctggagctactggtagtggcaaaacgcaatggttgatgaaattgttgagaaattacaaggaactaatagacccgccgcctgcaaaaattctgtattgctattcagagatgaatgagtcggttcttgatctgatgaagcggggaattgagacgcacaacggcttgccggatcaagcgttgatccagagccagccgaaaccactgctcctcgtgctggatgatttaatgctgaacgtgggaagcgattttctggatctgctgttcacacgcggttcacataactggaatgtcagcgttatttttgtcacccaaagcctgtacgggcgtaacattagaacagcgcgagctaacagccattatttggtgctgacaaggaacccgtctggtcaactccaggtcagaacggttgggtcacaacttttcccaaaacgactcaattactttatggaggcgtacaatgaagcgactagtcagccgttcagctacttggttataaacatgcacccaaatgctccggaaaatgagcggttgacaagcaaaatattccccggggagagccgtgaggtatatttacctgtagaataagcgtaatgaacgaaacaagtgcgctaaaaaactatttaaggaagggaaatttttttggttcgcaaaatgtacgagttcagtccatacattcgcgcaaattcggattttttcaaaaaattagcctcaacaaaatcggataaaaggaaaaacgatttgctgaaaggcgcatccgtagaacaaattctcggattggttgagatttgtgcaaatattttaaaatttaactttcgcctcaaccggcgacagaggagacgattggccgtgtacgcagactattaccgagcaattgcacgttcacgtagtgagcgcacagccagacagaggctacaacagggcagcggaatagctttaggagctattttggcgccaattttgagcgttttagctgaacagctggtccagaaaattgttgcaactccatcagcacaacaacaacaaaatgaagcacactaaaaagatgctacttgtaccggagagtgaatatttggcgcttatcaacctgctgaaagggggcgcaggtggaacggactcacttcaagccgaaaaagcagcgatcgatgccagcatccaaaaaaatctaaatgacaataaaacgggtgcggacgtgaaaatgaaacgtcactcgtggttgtacaaacagaggcatcagatcaaggacatgattgagaacaaaccacaaaaggtgattgtggaaaacgctacaggcacagcgccacaaaacattgccccgtatatgggcatacagaaaccaaacctcaacaagcttgaagaattgaacgggcaggatggcaaaaaaaaaataaaaaaataggacgaaaatcggtccaggcttccagaattcaaactcccaatggtgccagctttggtgaagaaacggatacgtctgcgcctgagaccgatttgcggctaaccaaaaagagacaacaaaaatttttggagcttaaaacaggcccagagcattatgataagctgcacgaaatgattgaacgaaaccccgaaaagtacggagtcgataagtcgtccggcgaaattctaacaaacttcaaaaagccggtgattaggtccaactacattgactcactgatgtacttgacaggacagagagcagatgtgccgaaaggtcatcgattttttgttcaaaaaattggcagcgacccgcaaatgatgaaatttttccattcccaacggggagagggtggtagtaagcggagcaagcgcaaaaaattcgttcttgttaaatcaagcgctataaaaacggtaggactcagccgaatggagcaaccaaataacacgcaacgtaaattctttaaaccgcttctatgggcaaagctgtagtacaaaaattactggaacaagtgtattacgatcttaggtcgccggcaagttacgctggtattcaaaaagtattgaaggaagcgaagaagcgaaatccgagcattactcttcgtgatgttgaccattttttgcataaacagcgcacctacacgttgtttaagccgcgcaaaaaccgcttccgcagactaaaaactgtgcctagcggactacacacggactggcaatgtgatttgtgcatcatggacgcgctgaaagagcataatgatggatttcgttacatccttgtgtgcatagatgtgctaagtcggaagattttcactgcagaggtagagtccaaaaaaagtgagcacatgattgcggcatttgagaagattttcaataaggcaggtgtgctgcccaataagctgtacagcgacgctgggcttgagtttcaggcaaagaaaatgatggactactggaaacaaaaggagatcatcaagcacgtgatgtacagcccacatttgcatgctggagttgtggaacgcgcaaaccgtacgcttaaggagcgactttacaagtattttagcgaaaagaacacaaagcggtgggttgatgtgctggacagcattgtgcgtaacctgaacagctctgcgaaccgaacaaccggagtaaggccaatggacgtcaactttaaaaatgccgctgctctacggaatcgcctatataagcaaggcgagtcgagtcctaaaacgccaaaatttaaggtgggagacatagtgcgaataagcaaagaaaagggtgatttttcgaaaggttattttccgaattttacggacgaactgtttcggatttctaaagtgaatccgaccgatccaccttcctacaggatccgtgatcaagacggggaagacattaaagggattttttacgagcaagagctggtaaaaaccgttgcagaaacagcgcatagagctgaagtgctgaagactcgacgcagaaacggcgtcaaagaacactttgtgaggtggattggctactctgacaaacacaatcgttggattcgagacgaggacattgtccaaaattaa

SEQ ID NO: 83393 - DNA, 2242 bp, Heterodera glycines
gtataaaaggccgaccaaaagtggggagggtgccacattgtttctttcattgtgagaacagaaggatgtcattcttttatttcttgctgatcgccttcattttattccattttctccatctatctgccggagaatggattaatgttgagctgagtgtggacccaccaaattcttttgaccgttcattccgcaccatttccaagaattcacctgcgcaacattggttcggctataatcgggacacagcatgtcatgttgagctggagaggaatatcaatcggctgtacaccaacccggatacgtggaacattgccctgacagatgtggataatttaatgagcctgggacggacaacaattgagataccgtcaaccgccttaccatgggcatgttttgggcatggcggccatagttttgtaattttcaacctccaaaatgctgcgggtgaggtgaccgtactgcgtggacaccaacaaaaaatagcacggcaattgagcgcgtatggccgcattttgtttgatcatattgccgcccgattgtacattgtggacaagagcgaacgcagaatcaatgagttgctcattgccgatttggagcggtggtggactctgaataatacggacgatgcgttgaacaggacgtcggcacatgttctgagaagcaattttgttggctttttgccggagcaaaaaacggattatttcattgcagctgatcatgtgtacctgatttggcgaaggcgagtgtacaagttccgcattggacactatttcaacgatccttcgtcacagctccagtttctgaccaactcaagcgacatacgcttcaacttcctcttatttgaagcaggtgcagaaaggctgggtgaaggcggcgatcgtagaaatagcagatcagctgttgttgtaccagcggtgtcgtcgaacggaattgaacgtctcttgctcgcgttgacttacctattcgatcttgtcgtcatattgattgccatttgtgcattccgccagttccgccgattgggaggtggtgcagccgcacgaaatggggatgacgcgattgaactaaatgaatacgatcttttccattcactttcgttgcaaaacaacaacaatgggggcggagcctatgacgtatctgctgcatacaatccaacgaatacagcaccaaggaccgcccaccagctgagatcttgtgcaactatttaaacggctcactttttttttgaattttccaacacacacttgcataaatttactgttattttatgacagccaaaaaataattatattgggtatttgctgcggctatttcatgcaaagagcgataaaacattttcaagaatccttggcactagacaccgttgaacagctgtatgcgcattttaaagaggaaattttgagcgcacctggtgaatattatccaaatcctctttgtgggcttggttgtgtacacattgtcaacgacgatcatcctgatctgccggtgtgcgtcgaaggaacgcttgatttgatcgcgggacttgaactgtactccacatgttatccgaggacggaagcagggacaatcaactggtcagcaagcagagcaatcacaatcatagattataaaattttcaatttatgagcaaagtcctgtacgtggagctgaaggacatgatgatttgcccgggcgagtcgccttgctgtcgctgcgcacaacccatcaacaacaacctgtcacactaccagctgatcgtggacgagctggaccgttggtgggtggacaaccaccaacacaatcgggggcacgtcgtcgaacgagaagaagaggaaagcgtcgaccactcaacctggtgaaggcactgtgtcgtttcaacggaggctgcatgccatcagttttaccccagatgattcagaggagacgaatagaaaatttgtgctttcttcgtgatctcaggctgcgaacagtgcacctgaagaataacattatgatttccgccaactcattgtcatttcacagtgcaggcagtttgcttgcctaccgtggctatttgtccataacggtagagcagcacttgtacgttcgccatcgtgttcgtcttaggttccccttcctgccctgcgttgtgcaatatgggggaaatcaccatcactattattttccattagaactgcttgaaatatgttctcgtccaactgacgaatcctcctaatctacacaccttccgaatactgttttattgttgctgttgctattgtgaaaa

SEQ ID NO: 83394 - DNA, 306 bp, Heterodera glycines
atgtctacggcggaacttcaaagcagcgaaaaacccattgagaaagctggaaaagctgataaaaaatcatcaaagccaaccttactggatcagcagcgcttcttctggaaattggcccgcccaaagtttgccgtgatcaactttctctgccctggatgtcgtcgactcaattacaagcacaaggaccaattcaaactgatgggagatagcgaattccactttacccaagtgatgtgcccaggatgcgtaaagtacaatatgatgcaaacagatatctataacaaacacacaaagaatcctcattaa

SEQ ID NO: 83395 - DNA, 414 bp, Heterodera glycines
  unsure (1)..(414): unsure at all n locations
atgtccatgnacaactggncncgcacctgggcgacctctcagaccgaatatcccgggcatgaacttttggaatttgtgagtggaggatgtaagcagtacgcgctgagaatgcggagcaaaagaacgggagccgaagacactgttttgaaagttagaggaattacattgtccgccgacgcgtgccgcctactacacttcaacacattcaaacaagccgttttacggtatgccactgcagaagaagaagaagatgcttttgaagaaataataattgactatccaaaccagcttcgccccaatattcgtgaaggagcagtgcaatctgtaagcatttcgaagcgataccgtcccgttgtgaccaaaggaattgtatcagaaaattttattgtacgtgattttggatttaaattgtag

SEQ ID NO: 83396 - DNA, 1171 bp, Heterodera glycines
atgacttccgagaagcagcgccgttttgatggatggtacaacgagcactgcaatgcccccttcaacctttgtgaacaacttgcttcttactgcactaacgacacacggattttgatcgaggcactgattgcctttcgggcagagtttttggctgttacggatccaattgaaaaccacaacgccgaagaagacgcagaggaggaggatgaggaagacgcaattgatttggctgggaacaacggaatcgacatcgtcaacggtccaatgactatcgccagcgcatccatgcagcattttcaaatgaatcatttgaagaaggagcaactcgccattgttccggagcgcggctatgactcagcaaacaaccaaagtcttctggcgctgaaattcatggaatggtacgcggaagagcatggcgtccaaatccaaacggcttattcacgttgtggcgaaaagcagtttgggcgatacacggtggacgggtaatatatttttttacaataatttgcccttaaattatttatttgttcttagttatattgctgagacggacacggtcattgaagtgaatggatgcgtttggcatgcgtgttctgctcctcatcaccgatttgatccacaagcagtcatgccaaacggaaagacggcccagaaaatccgagaagacgacgcgcagcgcctacagtttattagcggaagatgccgggaagttaaagtcttctgggagtgcgaaattagtgaaatgctgaagcgggatcagcgaatgagggagtcgttcaacagctatgtggacaaagggcctatcaatctgaaggactgttatcacggtgggcgcgtggcccctcttcgtcttcgctacaaagtgccagaggggtgcgttgattttttgtaaatgtaatataataaaaaaaaaataatattttcagttggaaaataaagtattacgacgtgcgctccctctacccctatacgactgccgtcacgtcctacccaattggacaccctacagccgtccacatcatgcagggagatgactcaattgtcgactggcgccgccctacagacgtccccatcctcggcattctcaaagtcttcgtggttccgccacgaagggttgacgtccctgttctccccgccaaattcgaccaacgactactgtttccgctttgcc

SEQ ID NO: 83397 - DNA, 644 bp, Heterodera glycines
atggacaacaccgccccaaaaaaattcttgacttcccttgaccaacttcaaattccccccgaaattgacaacgacagcgccattcccgactatgcaaaactgcttattaagcagttgcactcgctgctggccaccgcgtcgtctctggttcaatctcaagtagcggcaactgacgcgattgaggaggaccgccgacaacgaaccgttgtcatcaccaatgtgccggagttccaatctgggaaagcgtcggagcgtggggaggcggacagtgcactggtcaatttgattttggacactgtggacctcgaccaaaccccaatggtgttccgggtcggcatgcgaacgcccaacagagcgagaccgctcaaaatggaatttcccacaaagcatgcggcgcggcaggtgctcagaatgaagggcaaggctttgtcgttgaatgctctacatggtgcgcgcatcagagaaagcatgaccaaggagcaattggccgaacgccggaaactaattgaggagtgcgcaaagaaaagaaaagaagatgcgggagattggattgtctacgcaaatcaggtcatcctgcgcagcgaaattgacacaattcgtaaaaagaatttttaaattttcatgccaaatcacaaaaaactaaa

SEQ ID NO: 83398 - DNA, 3040 bp, Heterodera glycines
atgagtgaattaaaatacaacaaattatggtggaatggaccaaaatggcttaaactggaaaaggaaaattggccacctcacagcttttacagtcctgatcaagaagaggctccatatttagataatacagaggaaataattaacactcaaataaatttaataaaaaacgaatataacggaattatcgaatgggataaattcagttcatggcttaaaataactcgcatttgtcaaactttattaaaattcatatttttcaaattgcagaactctaaaaagtttaaagaaaaatttatttgctctaaattcaaaaatgcattacaattaaaaatcatggcacaaaaaatacttatacgaattattcagaaagaaatggaaccaaataaagaagaagaaagacagttaagaatttatctcgataatgatatgatactgaaatgtgaaggccgattaaaaaatgcacaaattcaaggtgttaatcctatttttctaccaagaaaacactatggaactcatttattaatcatggattatcacacacgaaatttacatgcaggtacaatgacaacattatcggaaataagaaaaacttattggataccaaagggaagaagaattgttgatcaaataaggaaacaatgctatcattgtaggagatataataccaaaccttttcaacaaccacaaatgccaccattacccaaatcacgagttgaaataacggaaccatttcagaacattggactagattatatgggaccaatacaaataaaaaatttcaatgaaaaatgctggataattttatttacatgcttaacaacacgaggtattcatctcgaattagtcacttccttatcagttcaacattttctcaatgcatttagaagatttatatcaagaagaggcacacccaaacatgtatggagtgataatgcagcacaaataaaacttgcatcaaaaattctaccagaagtgttaaaattaagagaaattctcaaagacgaatcaattaaaagttattttttaaatgaaaatataaattggacattttctatagaattagccccttggcaaaacggagcaattgaacgacttaatcagaatgtcaaaacagcaatgagaaaagtaatcggaaaaagatttattgagtttgattcttttcaaactctgacttgtgaaattgaagcgttagtaaactcacgaccaattacatttatatatgatgaaattaactcttatcaaattcttagaccaatcgacttcatacttccacataaaaatttatgtattcctccgattttggaaaatcaggaaactaaagacccaacatattacccaaaaaagacttcatacgaacaaacaattgaattatggaagaaaaccacgaaattattagatgactattggaaaatttggactgatgaatatataccaagtctaagagaacgttataaaatcgaaaacaaaaatccacgaaattgtatgaaatcttttccagaattgaatgaaattgtaataatacatgatcaaactcccagagcaatgtggaaaactggcattgtcaaaaatgtcataactggatcagatggtatcgtaagaggcgctaatatcgaacttccaaataaaacagtactaaatcgacccttaaaattaatttacccgttagaaattaattcaaatgatgataaagagcaagaaactctctctaatctaataattaatcaaaaacccaattatttcaacagaaaaaggaagatggataatcccttagtccctataaaaatgaatagactgtttcaaaactcgttaacaattatatcattattaacattaatttcattatgttcatcttattcatacgaatgtccaaaggaacctaaaatatggaaaacgagatatacaactctatgtatcgaaaacggttttacaatcagacaaaataaaataacaaaagaattttgctataaacaattggtatgcaaagacaaacatattattaaacgacgaccaccgtattgtggtaaaaaatgtaattgtcccgagggattcaaattttgtagtttcgcatcttataataaaatcaaaaatgaatcagttggaagaattaattaccaaaaaataatttcgttctacaaaccaaatatctgctcactaaataaaactgaaaagtgtccaaatatgcagagaaaattatttaattcaattgttcttcatgacaattcaattcatatggtgaaaactttaaatttacttttttcccaaattgactcgataaacaattttcgttgttttggggagggcaatctgacgattggtactccaatttactgtcgagaacatgactgttttaaaaataattcattcaaacaaatatatggaacgaaattttgcttttacgatccatacgaaaaaatttaccttgttaaatctgatgaagaattaattcaaatcaaagcatggggaactattgaaaaaatattttacttgccaaataatttaaatcaaccattcattgaaaatagacggaataaaagagaagaaaactcttcaatcactgaagaatcaaccattgagtgtttaaaaggaggcattattattaaagcaataaatgatatacaagaattacaaatttccattgaaaattatacaattataaaaaagaaccctcaaaaagaggaaataatttatttacccccaaaacttacatcctttgaatataaacctgtcattaaatttataagtaatccagataaaactaatgagaaacaaatcacatgtcaatcatctccccgtatgtgaattaattaactgtcgattttgtatggaatatattaaaaaaccacaatgtgtagaccagattccactgggcattaatgcttgtaattataatgataaatttatatggtatttcatttaagcctcccaaattattccaaataactcccccgttttatcccttgggattttaccaattatttttaattgtttttaaaagaaaaacccaaaagaaaaccaaattaaaatttcagaaccaaggtaa

SEQ ID NO: 83399 - DNA, 1514 bp, Heterodera glycines
gagcacacttgctgtgaatacgtatcggccttgtccagcattgaacacgaggcgccatcgcctggaggtgtacccgggttcgtaagtttcttcaaataactcatttttaatggatcaaaatattaaaaaaaaatcaataatttttaaagttttttcataaattttgtaaattcgaattctaaatgatcaattatttctattaaaaaaatttgtaaacacagaattaaactatcaacttctgatccaaaagatttaaaacttaaggcatgagggcaacgactgttttgtgtacaaattgcctgacgctggcactgacaaacaaacaaggccattattggatgagcagtacgagcagttcacggtgctgaacaatgttgaccatgtgccggtacagttggacggcgatgatcagcagcacggacagcaacagtttggctatcggctaaggctgtttctattgcgcaacaaaagcccaccagttttgctggtgaagagaatccatagggccaagtaattgaaattcattttacaaatttataaattatgcacatttgatttcagggaaggctttgaagtaaccatctgccgaccacgttgtagcaatttggaagaagctgaaactgttaagcgagaaaaaggatggggtaaaacgagagcgaatcggttgataagtgcaagaagaaaggaagaagaagaaaaggaatcaaagatacaaaaagaaaaagagcagaaaagagaggaagagacaaataagaaaagaggaaaggacagaagagaaaggaaaaaggaagaagcaaatgtgagagagattcacataaaaataataaacgaaaatgaagagaaagaaaacaacggaacggaaaaaggaggaaagggagagaaagaggaaaaaacaaaaggattaaaaaccggaagaaatacagaaggagaaggaaaagacaaaagtcacactgggagaaacacagttgaagagggaaaagacaattctggaaaaaacacagccgaagaaggaaaagacaaaattggcactggaagaaatacaactgaagaaggaaaagacaaaattggcattgggaaaaacacagccgaactgggaaaagaccaaattggcaacggaagaaacacagccgaagaaggaaaaggcaattctggaagaaatacaactgaagaaggaaaagacaaaattggcactggaagaaatacaattgaagaagaaaaagacaaaattggcaccagaagaaatacagccgaagaaagaaaagacaaaattggcactggaagaaatacagccgaagaaggaaaagacaattctgaaagaaatacaactgaagaaggaaaagacaaaattggcactggaagaaatacaactgaagaaggaaaagacaaaattggcattgggaaaaacacagccgaactgggaaaagaccaaattggcaacggaagaaacacagccgaagaaggaaaaggcaattctggaagaaatacaactgaagaaggaaaagacaaaattggca

SEQ ID NO: 83400 - DNA, 926 bp, Heterodera glycines
atgtcaattgaagtatttaaattctattactaccagaaaaaaatcttcgtagagggaacgaaaggtaggcacaaatgcaatttcttaatttgatattaatttataaaaaataaataaattattgtcatgaaaaagtttaaactgaatgaggatcggtgctatgtcgatacttaaaaaccatcataatgggcgatacttaaaaaaccatcataataaaatttgggcgatacttaaaaaaccatcataatgggcgatacttaaaaaaccatcataatgaaatttgggtgatacttaaaaaaccatcataataagaaatcgatatacctttaattaattacaggttcctttaattaattatatgattacaatttgaaattacatgagttaattacaattttaaaccaattatcccttttatttttattattttcctcaaattcacacattttttatttggaaactttaattttaaaaaatatttcagccttgcttaagggcaaacaacaagcatttttacatgatttaatagccggaaatacgtcattaaaatatgaattagatttaattgccggaaatacgtcattaaaatatgaattaataaatgttaatataaaagcaatgtaaatttattatttggcaattcatttaataattaacattcctgttatttcataaaattttcaacaaagcctattaaattttacaaattcaatcgaaaatgatacggtaaaggtagaggcaaatgcttttattatttatttacaaaaacaatggattgataagtacgatgaaagtaacttatggaactttcaccggttggcaagaacgcggagtataaatccagcggaaagttttcattcatctatgaaaaggtgaagatatttttaaaattgcacaaatttaaatttatatagagcccatctgta

SEQ ID NO: 83401 - DNA, 847 bp, Heterodera glycines
atgatttttgctttcattttttcttttatttcttccaaattcaacaccttcgcttttgccttattttggtgttttctcgttaataaagtaagtacctttttaatttaaaaaattaaaaaatatttttaaatttttatttttatttttattttctccctttttcatacgttgtctgatgatggtcagtcgaatctgctgacgaacccaaaagaaattgtcacatttttgatggacgaccaattcccgaagtttcgtgatcagaccaaccaatattgggccgacaccgttctcagttatctgaacgccctttacccgaggccggcaaaaaattttaaaaaacataaattaattgttgtattaattaattattccgttttattgccttaggcatcgctttttggtcattgttggttcgggtgccgtggcgtataataatcggttggccattacttttcaagaagggaataagtgagaaaattgagaattttaaaacgaaatttaattatttttattttatgccacatgtgaccgtttacatggcattcggagctgaccaatttgagggcagcaacaattgttacggggacataaacagcaaattcaacaggtaaagcgaaggcacacggaaatagtgggataagaaatgcgaacaaaaccatgcgccgatcagctgctacccggacatcaaccaaatcctcggatacattggcgaaacatgcggctatcccaagtcagaattaatattgtagaattagttaattcatccgaattatcaaacattttgtaggaattttttggcaatttttgctacatgtatcataatttgttgtcatggatttacatttaa

SEQ ID NO: 83402 - DNA, 497 bp, Heterodera glycines
atgccaaaacttcaatttgactttttaaaaggttattattattattattacacacatcgcaatcaccagcagaacatttagtgccaatgccgtggccaaaattgcgataaaaatgccattcggctgccacagtccctcgtcaaagtgatcggtgtttggcaaaatgcaatttgagtccgaagaattgtatgagtaatgttgggccaaagctttgacgaaatttgctgtgctgtttctgttagaataaatttaactcgcaaagcagtgaataataaattcaaaaataaaataaaaataattttaaaataaaaaatcagcggtaatagccaaatggatcattaaaataaatcatttttaatatcaatttttatcttattttagttgctcgtcttgactttttggttgctttactttttctggagcagtgcgatgatcacttgccattgccttttccccacttcacaattccgcttgatcacttcccttcggacggctga

SEQ ID NO: 83403 - DNA, 417 bp, Heterodera glycines
atgattatttttgtcataattatcattgtaccaccgattatcaatgggatgaacgatcatcatctcttatcacgaattgagaacaaacgcgatcaagaacacatgcagaatttaaataaactaattaaggctgaccaagataaattcaacgctgttcaaagtcaatcaaagcgaaaggacaagcactctattgaatgtgatcaatccaaaaatattacccaaaatgatggacaggaactgatcagtgaagaaacaagggaatgggcgaagcaattaattaagttcatcgacaaattgatcgccaaaggccgcattgacttggaggaaaacgaccaaagtgatcaaaagtcgtatgccatagattttagagagacgaaaaaggaattggtcaaaaaattgagaaatcccaaaactgag

SEQ ID NO: 83404 - DNA, 1163 bp, Heterodera glycines
atggtttcagaacttctgctgacccactacgaccccacacttgcgatcgtcgtagcggcagacgcgtcaaaagatggcatcggcgccacaatcagccacatttttccggacaaaaaggaaaaagtcatcgagcacgcctcaacagttctgaccaacgcgcagcagaactacagccaaattgagaaagaagctctggcgcttgtgttcgcagtccaaaaattccaccggatgcttttcggacggaaattcacactgctcacggaccacaagccattgctggccatcttcggctccaagaaatgcatccccatttatgccgccagccgactccaaagatgggccctaatcatggccaattacgattttgaaatacggtacatcaacaccgcatcatttggccaggctgacgttctctcgcgcctcatcgccaattatccccgaccagaggaggatattttgatcgccaacatctgcaccgaaactgagtgctacataagcaccattctgcaaaccaaaacggaacaacttcccgtcactgcagacgaaatcgcagaggcgacaccgaaagatgagattttaaagaaaattttggcattcacccaatcgaattggccaaagaaatgcagcgaccccgacatcgcaccgtattttccaaaaagggaaaacattttggaaatcgagggctgtttgctctaccaaaatcgcgttgttgttccccaatcgctccgcaaccgaatgctgaagtccctgcacatggcacaccccggaattgtgcgcatgaaggcactcgcccgccaacacgtctattggccgggcatggactcggaaattgaacggattgtccgtcaatgtgaagaatgccaaaaggctcaaaaagcaccgataaaggcaccgcttaccccttggactccaaccgacaaggtgttccaacgggtacacatcgattttgcggaccatgccaagacggtcacgtctatttcattttggtggactcattctccaaatggccggaggtctaccaaatgaattcaatgacggccgcggcaaccgtcttcacactccgttcaatcatccaccgactcggaattcctgaagaaattgtttcggataacggaactcaatttcgttcgtcagaatttgcggcactctgtaaggagttcgga

SEQ ID NO: 83405 - DNA, 2070 bp, Heterodera glycines
atggataaaattctgaggggcattgctaatgtaccagtttatatagacgacattttgattcatacagagactttggaggagcatttggagagtttgagtagtgtctttgttcgcctacagaaaaatggcctcaagctaaaagctgagaagtgtaagctattccaaaggaaatgtgtttatttgggacatatcctatcagaaataggttatcagccatcgctcaataaccgagaagttatcgagaaatttcctcagccgaaaaatgttaaagaagtgaaaagatttttggggatggtatcttttttcagaaaatttattccaaactttgcgacaatcgcccacccattaaatagcctcactagaggaaaccaattaaaaattgagtggggacaggctgaagagagtgctatgagtgagctgaaaaagcacttattgaagtcgccgtgcctaagggcaccaaattacaatttggccttttaccttttcacggatgcctcggcagttgcctacggagcggccctcatgcaatcagttgatgggaaagaactatatgcaattgcatattggtcccgtacactttcggcaaccgaaagcaaattaccagcaacacacggagaattggcagccattgtgaatgcaattcaaaattttaggccaattttgtatggggcagaattaataatcttaactgatcataggccactcacatttcttttccaaaaggccagcattaaccccaaaataaatcgatggctaatggcattacaggagttcgaaccaaaagtggtctatttggagggcagggctaacaaagtggctgatgcactatcaagggtgccgataaaatgggaaagtatcgagataaaatttaaagaagaaatcccatatttcttgacgctggaggaatttaatttggaccgagaaaaggtggaaaaggaaacaaaaaatgacaaaacattgtcaaaaataatggccaaaataaaggacaattgggtggaaccaatagaaaatgaattggaaccctttttcaaaaacagagatagcctttatttggaagggaatttgataaggaaacatccccaaggacaaatcgttataccggacgtgttaaaagtgccaattttaaaattagttcataaagcacattttgggatggtgaaaggaaaagctaaagctcggcgattcgtatggtggccaaaaatttccgaagatattgaggaatttacgggagaatgtgaaatctgtcaaagaaatgcccccgccccgccacgttcatgtcccgagtataaatggcctgaggcaaagtatcccttcgagagggtccatgttgacttggccggtccgatttggggaaccaactttttgataacagtcgatgcctattctaaatttcctttcgtccatcaaatgaattcgacaaattcatcggcactaattactgcatatcgtgaaatatttgccgtttttggttcacctcggactttggtatcggataatgggccacaatttgtgtcggctgagtttaatatatttttgtccgaagaaggaattaaccatctcacatcacccccataccacccaccatcaaacggggaggccgaacgttttgttaggacattcaaagaggggatcaaaaaactgttggattcgggtaaaacactgcaactcgcccaatttatccttctacaggaataccgctccaccccatgccaaatgttgggaggcgaaaccccggcgcaaaagttcttaaaaagagaaatgaggacagaaatggataagataaaaattatgccgccaatgggaaagaacagaaaaggatcattgtcagaaaatcctaaggcacttgagccaatggcacatgtgccgacaaaagaggtacaatccagaaatgagttttatccaggagatgcggtgtgggtccgagaccaggcgacgaagaaatggataccgtccatccttttgcagccaatgggggagcgcttatggaaagcggaaatggaagggggcggagaaagagtcgcgcatagcgaccttataaaaaggcgaaagttggtttctcgccacatatga

SEQ ID NO: 83406 - DNA, 280 bp, Heterodera glycines
atgtctcatacgctgcctatggtggtaagttcttttgcaccatttttatcgaatctttacggattattttctgggaatttaatgaaaatgcgagtgtaaaataacactcaacttttattttattgtgtaatttctgaaaatccggctgcatttcaactcaaatattcctcttctttttcagcctctgcttttcttgtgttggtttacgttacggaatggaagcgtttcgcccgttatattcccggactccgttcgcagatcaaatcggacgaatgaatga

SEQ ID NO: 83407 - DNA, 119 bp, Heterodera glycines
aggggcgttggcgagaatgagtttcaagtggacagcattttggcacggcgcgtgttacgggatgggcgcatggagtatttgctgaagtggaagggctgttccgatagtgagaacagctg

SEQ ID NO: 83408 - DNA, 506 bp, Heterodera glycines
gccgtggtctgggtgaaaaggaagatgagagtaagaaaaccggaaacgcaggggctcggctggcgtgtggaatcattggacttgcaaaaccatgactcgccagcgacggagacgaacagtcgaaatgacgacaccgtggaaagaagagaaaagggaaaaccgacttaggacactccatttataattgtttaatcagaccaatcttccgttttttgctttgataaatgtttcacctattttgttttattttttctcaaataacgcccttgacttgacctggccaagaattttttgataatatttaattttctctcgacacttctataaaatttcgtctttaaattacctacgtaaaaattattatttttggatagatttaaatttttgacaatattggcgttttattttaaaaaaatataaaaatatctgtgcgtactcatttgtcagtacgttttctgagtgcacaaaaaaattcattaaaaaatttcagagcataacagaataaa

SEQ ID NO: 83409 - DNA, 503 bp, Heterodera glycines
atgtctgcatcaaatacaacgtctacaactgattttgaaacattccttctgttcctttgcggtgtcgttgagctgctcatccattttgttggcattccgttgtccattgtcaatttaattttggtggcacgcacttcggtcattcatccgaacatgaaattcatcctccttttccagagttttgccgttcttctggtaaaatattcgggattttttatataatatatgcccgcatttttttttaattttagcgcggtttttgtcgttttgtcatttgtctgttcaaattcatcctttgggatccgatcagtgccgaaatgggcttgtttttcccagccatcttaaaaatcggctatttcggcatttacagtcgtaattatgtgccccatattctcatcattgagcgcattttggcaactgtttttgtccgaacttatgagcagcatcggggctttttgttcacaattatttggcttccatttgcggtaaaatttaaattttga

SEQ ID NO: 83410 - DNA, 917 bp, Heterodera glycines
  unsure (1)..(917): unsure at all n locations
atgtcttcaaaatcggttaatgtaaaagtggtaatgatggacgcaggtgagaatgataaaaaaaaaaagaatttactttggttaatttgttaagaattggaatttgccattccgccatcgacagttggcaagcagttgttcgaccaagtggtcaagacaatcaatttgcgcgaaatttggtattttgggctccaatacacagacaccaagggcatttcttcatggctgaagctgaacaaggtgggttggagttggagcgggtcccacatcattcccactcaccgccgccaggcccgtaaccagaaaaaaaaatttcgggggtggcacccgaagagcctttgtttgctcttttggccaaaaaatttttcaattgacataaattttcagcgccatggacaaaaaatggaaaacctcccngcaacatttattgtataattcttgctgaatttttcagaaagtactgaaacaggacatcaaaaaggagcagactttgcagttcaaattccgtgcaaaattttaccctgagggtaaaaaaattgaaatttaagtcaaaattttacacaattttttttatagatgttgctgaagaaatcatccaggatgtgaccctcgtaggttgattatatgtaaaaaaacataatcatataaaaaagagttttaatttgaggcctctgaatttgtttacatgaccgtaaacaattgcatgacaaattgacagcttcattaatttcatagatgtaacaaaatcaaaaaattttgcctatcattcgaaagcgccaatggttttctataatgtgagcctgttaaatttgcaaaagcttcgtcaaattacacaaatttatggccataaacatgcgaaaaatcgtatttttaatgttttgggctaacaaagaaaggtccccagattcaagaataaa

SEQ ID NO: 83411 - DNA, 594 bp, Heterodera glycines
atgactacctccgatgagaaacaacttcaagtggttgtggctagcaatgaaaagaaacaaattaagaaatcggaagttgactttcccgtggtattgaagcgtggggtgcagggacgtggtctgtgtttttctgatggcattttaaatttattttcttatttccagtgaaatggtactcgcccgaggatgcctatgggttcatccatcgttacgacgtcgacgaagacattttcgtccacggctcctccatcgtccgtttcaacattcgcaacaaaaaccagcatcccgtccttagcattcagcaagaggttttaactttgaatcaacaaattgtcattttgaaagaccaccattttcccattctgtatagattcgatttattcatttggttaaccgtttcgttaacttcttccgtcgttcaggtggaattcgatgtgatcaaagtccgcaagggtctcgaggcgcgttgtgtctctggcccgggtggccgacttgtcggacgcttcttcaatattcctcgtcgaagtgtctcgggtgctaagaagcaagtttcgaaaaaaaacattaaaagggtcccccgtaatactgccgatg

SEQ ID NO: 83412 - DNA, 314 bp, Heterodera glycines
atggggtcatgggaaaatttgatgattgaagaaaaaattgacaaaaagataaaatcaactgttgtcaaagtaaaagctttacctaaagcaattaaatttggtaattggtggtaattattggaggtaaataataagaaaaaaactagaaaatttctatataattcagcgtgaaaattttgttatggactaaattaatgtgtaattttttcctttaaatttttattattacgtacataattaatcataaagcacatattttgcttgttttaattcctattaatttctgaaatataagattaatttttggaaataaa

SEQ ID NO: 83413 - DNA, 675 bp, Heterodera glycines
atggctcggtgccacctcatgctgtgctgcctcccgtttgtgcctgcggcgtgttcggcaccgtgagtcctggtggtgctgccagccggctgtctcctcatggccatgtttcatctgttcggcgccgcccatttcccagagtcgcccaagcaactgtacatcggcaacggtgccaaggaggaggccaaccagtccgcaatgttttaccatggctccagcgcaaaccttggtagttttttatttgaaaatctaattatggcaattagagcttactcttacactaatttatattaatattcttttatatttagccgaactctttgacgaatttgagcatgaacgtctaattgtgcaccatgagaaagtgggatggaccgagttttggacaagccatcgattgaggtggagtccattaaaaaacaatggctttttgtttaggcattctaggttaactttaaacgtttagggtttcatggaaaattaccaatttttaaacttgatgaaattttgaagctaatagctatcgaaatcaagaagtttaaactttgctgatttgagcaaagttaggacattatttgtttaaaaaatgccaaattagtggattttacgaaacaacctaccattaaatatattgccgtaagcttgaaaaaaattcataaattgatcaattaaata

SEQ ID NO: 83414 - DNA, 148 bp, Heterodera glycines
atgaccgcactgaccgccccgttgtgtttggtggcaccgtgtctgatcgaaagttggggacggcgtccattgttcctgctgatcactgctctgtcaacgcttgagctaacgctgcttacggttgctcagctactgtatgacgtactcg

SEQ ID NO: 83415 - DNA, 276 bp, Heterodera glycines
atggactcaaatctccggaattctaaacactgggactcaacacaccaactttcaatgacattccaatcactgaaaatcaacccaacagcatttcaatctctgggactcaattatcagactttccaatcgctgggactcaacccaccagcatttcaatctctgggactcaaatctccggcattccaaacaatggactcaaatctccggcattctaaacactgggactcaacccaccaactttcaatgacattccaatcgctgggactcaacccacca

SEQ ID NO: 83416 - DNA, 370 bp, Heterodera glycines
aatcgaacgctaacggacgacctaatggaaaaaaatccccgaaggagagaatttaattaaatccattccttcgggggaccgtgccgggtgccgcggggtaagcagtgctggttcgtttcatcacggcaccgaaccttttggctagtcagcaatcgttgcttaacttgccagatcggacgggtgcgcatgattccactgttccaagcaccccaccaaaagcaaaacgatataaccaaaatataaggaaaaattttttaaaaaattttttctccatcttcctttttgatactaaagcatcagagtgctaaaattaagttgtaaataaaatttggtgcgctttagagcactttctgaaaaaaatatttagaaa

SEQ ID NO: 83417 - DNA, 1377 bp, Heterodera glycines
gaaaagaagaggcaagaagaagagaaagaaaaaaggaaaaaggaagaacatgaggaacataagaagcgaagggaacaggaaaagaagagggaagaggaggacgaactaaagaagagggaagaggaggagaaagaaaaaaggcgaaaggaagaacttgaggaacaaaagaagcgaagggaacaggaaaagaagagggaagaggaggacgaacaaaagaagagggaagaggaggagaaagaaaaaaggcgaaaggaagaacttgaggaacaaaagaagcgaagggaacaggaagaggagaagcagaggaaggaagaggaggaggaaaagaaaaagagggaagagagagaggcgaacgaactgcctaccgaagaggacgacgaggaggagatggaagccgaactgttgcgcaggatggaggagcgcaacgaagaggaggcggcggttgcctctttgggactccaaacgaaagctgacctaaggcagccacaggtgacaccatttgtgtctttgattattcaaaacaataaacaaaaaccccattcttaaggacaccaatcagccgcaaatcgatgctatcgggcacgatattggttggaaggttttggaaagaccttccgaaaaagaggtgaaattggaaaaagtaacggaaatggtggaggaggaaaaggagaaaaatatggaagaaaaggtagaagaatgtgccgtagaaaaacaaataaaacgtgaacaggtggaggaggagacagtttcacgagaaaaggacaaaacagccaatgaagagccaccagtggacaaaagtgtcggctttaaattcgaaactgttgaaagacgtgcatcgaatgaggtaacaataccccatcattcagcatttccctcattgtctttgttcagtctgtggacagtcacatggctggcgtgggcaatggttttgtggaggtcgatgctgagcatttgcgacaacagaaacgtgaacaagacgcgttggaacggctggcggaagaaagacggagaacggaagagacagtgaaacgaatggacgagacagtcgacgcggtggccacaaattcggcactgctgcagcaccaaaaccaagaatcgacagcattaattatgcagcaaattgcctctcccaatttggcacaacagcaactcacaattgacttattccaacgggccaaccaacagcaaaacgcacaccaaataacgacgaccacgaacggtacttttccacaacaacgggaaggcgttgttgtcgagtgcgactattattatccaacaaacatggcaatgagtggccaagcccaaaaccagcagcaaccgcagcgagaagcagttgttcagacagttcctgtgaacgcacccattaccattcagtaa

SEQ ID NO: 83418 - DNA, 1773 bp, Heterodera glycines
atgttcaacggaattgacatgagggagcagaagcggatgatgaagatgatcaaatcgggcattggctttggcctttcgatgtacgaccgggtgaaacggcgttcttcgcaacgccctgacgatgagcagaagaaaaagacggcattagaagttttgaacacgaagcacgcgaaaaaggtaattacacaaaatgacgatcaatttacctatttactagtaagagacaattacaaatattggtgttttagagaaaagaattctctcgtgttcggctgagttcgacctcaaccgattcggaaggaaatgaatacgcccaagcaacaacaacccagctaaaaatggcggagaggtctccaaaaccaaagtcggcagaagaggacgaaagtgacacctccgatgaagagaacggagagcaaaacgcggaggaaaacgatgacgcaatgacgaggacagaaaaaccgaaaacacacttggacacttcgggcgatatgagcacgaaaagcagtgccgacgagaaattagaaaagacaactgctattttgaccatcagacggcccgaaatagcgccccgaaaaccattcatggacgaccgaccaacaaaagaggagggggcgaactcctcgccttcttctgttgaggaggaatcagccaatgggtccgaatcggagagcgaagccgaggacggcgaattggacgcgggagacagggcaatcaaaaaagtgaccaacactagcaatgagaaacccattaatcaaaatgtactttagcttaaaaatgtgttgtcgcgataccgaaaaagttccgaatcatcggcggacgaagccaaacaatttaacgaagtgcgtctgtcgcttgaataaataaaatgtttaattaagaaactgacgaaggtcatttcaatagcgactgaggggtgccaaacccgttcgtcagattctcactctgaaaaaagtgattcatcatcggacagttcgtcgtcatccgaaagtgtcactgacagtgagccaaagaaagagcgaccaaaattgagtgccggaatgtcgaaaaaattaccatcacaggtcgaacccattttttcaaacttatactatatttttttaactgaatttagaaaaaggtgaagcatctttcgatggaagatgtcttcggggctgactcatccgaagaatcgtctggtgaacgcgctattcctcttcctcctcctcctcttcgtcagaacaaagtcgagctttcttcgtccataaccaaacacaaaggcgtcgtcaatgagacaattaaaaagggaattgttgtaccaaaaataaaagttggaaataaacacgaagaagccatcaaaattcggaccgaaaaggctcaaaacaaatcccttctcacgaccaatgagcaagggaaacggactcgcgtctcttcggtgtcgtcggtctcttcggtcgaacagaaacgctttaaaaaagtaaaggttggctttttcaactgggaaaggggcattaattatattttggtatgtacgtttgaatttagagcaaaccaaataccgaaaaagaaacggtgacttcgccgccagcaacaacaacaacaacgacgacatctgtgagggacagaagcaaatcagacgcaactgcactcaaaacggcacacttccaacaaaagcaaatgacaagcaacaaaagcggaaccattgacacagtggagagagtggtcgagaaaacggcagaattggacaagaagatgaagcagcaaaagccgtcgaaaacaacagttgggactacgaaa

SEQ ID NO: 83419 - DNA, 1847 bp, Heterodera glycines
atggatgaggcgaagaatatggcgctgttgttctttgttgaccacctaatgcaaaaggggggccagcggactatccacgacttgagctgtacgtgcagacaaatcggggcaaagggcgcaaatcgaagcgcgacacaatgccaatttgaaagattggcattccctccggtcattgcactcgcccccctccccaaggccaatttggtgcacgcggattcaccgatgaaatgcgtcaggcggtcggcaccacccaagagggcctctacgagttcctcagccagtacccgtccctgttcaccctccaagacggggacaaggtccagctgaagggctacggagatggcgacgagggccgcacgcatttgtcgcacattcctccgtccggccgccaacgcgactacgtcgcggaggcagtgcaattttttgtggccaaattggagaagttcggccccgaaatgcaggtctggcaaagcaaaagagcaaatccatccgaattcgagtcgatgcttttgtcgccttaggtaaaatcgctgctcggccatcgttctcaagctgcccccgaagtccggctcgtttccggacgccatctgaaggaatttgccgactttttggccaaccaaaccaaccatttcacggtggagggcgaccgggtgaagttgaagcacatgccggaaccgaatggaacggatgccaaacaatttttggacgaggagggccgcccattagtcggccatcgggcgaaattggcggccgtggactttatgagaggggtgcttgaacaggtcgaattcgggggaggcaaaagcgacgcaaataacgggcaatcatcggcagaacgaagaaatgcccatccctttggacattttctaccgccgtttctgcgaccgtttcccgcacagtattcgccaggaagtggccaccaaccccaaggagttgctgctgttcctcaagctgaaccggcacgtgttcttcatccgctccaacaaggcatctcttttcgcacttctctcatttttaatctgtggacctttcgtttgagtatttaaattgcctttttctttggcgttccgtctcaaccgttccatttcttcgcctttttcaggtacaactcgtccgtaatcggcctggcgatgaacatggttccgagagtggtcgttcgaccggcgaagacggcgggtcgtccgatcgaagtgccacaagcccagcggagaacggaggcggctgtgcgccgccgagggcaccgacggacggaatgtctcccgagacgaacgctcttttcccgctgaaccgcgacaatttgcaccgcgtacaaattgtacaaacgctgcagcaggcacaggaagcggtgcgttgcctgcgcgtcgacctcgactccgtcccgtcttccgccttcctcgccctcgacttcaaattgctctctttcggctccgttccgtccgctgaccttccgctcgtcgttctcgccgttgtcgcgtcgccgctgcgtctcgtcgtttttgacctcgcccaatcggataaggttctgtcggagagcggactgcgcacccttttggaggacgacagcgtgctgaaagttacgcacgacgttcaacgaattgcgccccttttggccaaccgatgggacattcgaattggccgactgtttgacactcaggctggtcattcaattcattcactcattagtcctttttgggttccgaacatgctccaaaatcctttgcctaattaccctaattgttttgcctttgatcctccgctaatttatccccctttttgcccttctcagatcgcccattcggtcattcagcacgacaaattcagtaaacccctcggcgacttgcgtgcca

SEQ ID NO: 83420 - DNA, 1501 bp, Heterodera glycines
atgtcccaggcattgaccgatgcgctcatcgctggaccagttaatctcaaacagaaaacgctggtatgtgttggaaatgaaggcccgcccatcagggaattgtgatccccaggattctattacctgggattaatttttcaattaaatcttgctgaacaactttttccaggtgtccaaagttgagcgttcagaaacgaccggcaaactgactgtccatatgacggacgaaagcaaattggaggatgtagacaaactgatttgggcaattggacgtgaccctttgacagctgagctgaacttggccgatgttggggtcaagctaatagctggcgactacatcaaagtggacgattaccaaaacacgaccaaggagggcatttacgcggttggcgacgtctgcacaccgaaattcgaactgacgccaggtacaacaataaggggaaaatttgaggagatgcaggccaaaaatccagggaaaccgaatcaccgaatctgaaaaaaccgaatggcagaagtgaacatggatactgtcctttcggatattgaatttgagtcattaaaattgtcggatattctatgccagacatggcattgttctcaattccctctattcattgtcagttgcaattgccgctggtcgccgtttggcccatcgtttgttcaacaaggaagcggagaaccgtctcacctacgaaaacattcccactgttgtgtttagtcatccgccgcttgccacaacgggcctcagtgaaagtgacgaatttgaaaatttataaaagggttaatgaaagcagtctctttaccacagggcctcactttactagcatagatattagttgtttgtgttttctgattttttccaaaattttagaggaggcagtggagcgcttcgggcgtgaccaggtgaagacgtacaatgccggcttcacgaacatgtactttgccatgactcaacacaaagagaaaacccacatggttgtttccacaatcgaattcattcgaataataattttggcgttttttcccttcagaaaatcgtgtgccacggaaaggatgagaaggtttgtgcaaatggcccaaattttttcgtgacatagtcaagaattttccctttaaggtgattggattgcacattttgggcatgggtgcggacgaaatgttgcaaggcttcgctgtctgtgtgaaggcgggtcttaccaagaaagactttgacaattgtgtcgccattcacccaaccgcctcggaggaacttgtgacaatgcgctgacaatcggttgacttatttttgtttgtttttggtggtgaactgctctaatgaatttctcttatcacatggacacatagttaggttaatgaatttgcatatttattgtttaattctttgtgacaaaatgaaacactgaaatgatttaaattaaaattattttttttgaatttttgtgatgttgcgttccttaattaatcaagagattgtttcagaaacgtttattgaattacaaaa

SEQ ID NO: 83421 - DNA, 271 bp, Heterodera glycines
atgtccattcaacgtcaaatgaaggaggactgggacaatcgcgaactgaacagcattgtgagattcatcggaatggaatttcggcccgaatttcatgaaatttgccgttcttcagatatccgacaacatccgccaaatttccgagtttttgagtcatttcgacgagacctgcaaggcaaaattggccacgctgaatgacaccatcacatcgatggagcgaaaggtggaatttctcgagtcgacggtgaccagaggagaaacgctgaattga

SEQ ID NO: 83422 - DNA, 3060 bp, Heterodera glycines
atggtgaaattctcatgtccgagccgggcttcccgtgccattccctgtcccaggagaattacacatgttccggctgcattcagttgcacgactcgtgcgcatggtgcatggactttgtgagttatttatttctttcgactcatacaattttatcaaacaattttatttaattttgtttttcaattttcccccttttccgcagagtttcaacaatttggcccaatattcgcgctgcgattccgcccaaattctgctcgagcacggctgtgcccctgaccaaattgtgaacccgcaaagttcgctgcgcaatttgctcaacgaaccgttcactgacgggacggaggagggcgaacacacagtccaactgaggccacaggaggtggagattcggataagaccaagtgagtcccgctgttttgggttattttttcttatctttgagcatttttattttttgccctccgtttcagagtctaaggcccgtttcaatgtccgatttcgccaaccacacgattatccggtggatctgtactatctgatggatttgtcatactcaatgaaggacgacaaggagaagctgtctcaactgggcgacctgctcggtatgcattttcacgtttttcataatatacgacaaaaaattgttttctttgcatttcctattacagctgaacggatgcgttcaatcaccaaaaactttcggctaggctttggctctttcattgacaaaaaagtgatgccatttgtcgacccgcgccgggagaaacaggtttcaacccccggggcaatcggtgccttttttggggacgaattgtgtcaaaacattgtctttttggcgggttttcaatccatttttgtattttgattggtactggatttacggcttttatgaaaataggagcagccgtgcgccgagggctgtgcgcccacctacggcttccggcaccaaatgagtttgacatcgaacacggccaaatttgccaaagaggtggacaaggcgcagatttcgggcaatttggacgcgcccgagggcggattcgacgcggttatgcaggtggatacttgattagccaacattatttggattaaagccaaggagagggtccagggattgaggaatggggctgaaaatgaccatgactaatggtcaaaccgtgaaagtcatgaatttttcgatcacgaaatgaacgaacacgggttttgattttttaaattttcaaaagtttggggcatttttacaaaaaatcatttaaatattgaaaaacctcttccaattcaccttttcacttctaggccatctcttgcaacagttccattggatggcgagagaggtcacgaaaaatgatcgttttctccaccgatgccgggttccattttgccggcgacggacgcgtaaaaaagggggagggcgtggcaatttacggggacactgataatgcccgtttaactgttaaagttggccggaatcacaacgccaaacgatggacagtgccatttggactcggatggttattatacggtgagcaaaaagaaaaaggcggagccgacccgggattttgtgtttggctagggaatgccatccataggaaatggttttttgtatgctctccatgcaaaactcactctcgagaaatttattcaacaaaaaggtagtatttaaaatttgaggaaaaatgcacaatttgttgtttttgtctgaatttgtggcgagaaaatgaacaaaaaagtgccttttgcgtttgccttacaattagcccaattcccttaaaacttctgcccgtcctccctccattctcgtgccatttgatggatatgccgtggcaaccctccgttgttttgtttattgtcattctttgcagaagtcgatagaacaagactatccgtccattgcactgctccatcagaaaatcaaagagaaaaaggcaataaaaataaagagattaaaggtttcccaatcccccgaatttgtcaggtgaatgttatttttgccgtcactcggagcaaccagcgactctaccaacaggtgagggagagagagagagagagcgtgccctcgcacaaatcaatcagacaaaagccttccattgtttttcccgatcgcttacttattgattggttcattgatttttcggcgtctcttttccccattcatttctcttccgtttcagttgaccgacgcgttgcctgacgtcagcacagcggtcggtgtgttggccaacgactcgtccaacattgtgacattgattgaggaggaatacgggaaaatcgcagaaaaaatcattatggtgagtcatctcgcatgagaccgaaacttctaccaaaaaacattgttttttcgagtccatggcgaaaataaaaaaaagcgtttcctttgctactttacatggatttcgggtgtacgatcagcgatggaataataaaatattccaaaatcctcctcccccccccccccaggtggacaatgccaacgcgtcgatgggccttcgcttgtcctaccggtccacgtgcgtggacggtcgaacgctgcaggacacgaacacgtgtgacggggtcaaagtgggcgacacggttgcgtttgaagtgacgctggaggcgctgcactgtgtgccgcaaagggacttcgtcctgcacattgggccctccgggctggaggaggtgctcacgctgtacgtgcacgtcatctgtgactgcgactgtgaggacgaggtggaagcacgcactttaataacaccacatcatcccatggcatttcaaaaagttgctcattgacagattgtttacaatgcgcccgaatgcaacggacatggcaatttggtgtgcggcatttgccaatgtgccgaaggctatgtgggcacccattgcgagtgcgaaagtggcggcgagtcggcggtggcgttggaagcgaagtgcaaaaaggacaacgacaggtgggtgtgctggtttggtttaccgcctgtggttgaatcgaactgctcgaacttgattggattatcattttagatgggccctggatttaaggtttaaggcattctatgcctaatttgaaataacgcatgcgaa

SEQ ID NO: 83423 - DNA, 1276 bp, Heterodera glycines
atgggtgccggctttgaggatggccgcgtgggctcggcacggaagaaaacgccggaggaattggcggccgaaatggcggcggaagaggactccatcattggccaactgggcctaacggaacaagtggaggtctctcttccatggaaattttttgaaatttgccgcaaatggagtgtgtggggggctgtattagagcggacaggggaggaaattttcgaagaattttgtgtatatattcgctcaaaaaagcccgaatttgtaacccgaaaatgggtcatttttggcgaaaatttgtaaaaaaaaaagtacatttttcactcaatgcctatatttttctgaaaaaatataacatcgggaaaagaatttgtggtcggtctcgaaatttcaatgcatttttcaaaaatcggcataacaatttggacacaattttcatttttttggatgcgaacgaaagacacataaggagaacaaaaagcgggagggaaatgactaaattaaatgggagtaaatttctctctcatttttgaaaaatcgaaaaaatgggaaaccccgtgaaaatttattaggggggaggggggggggggaccggctctattccagtttacgcgtccaatgagtgaccaccctcacttttttagctcataacttttttgttacttgctcaaaccaaacatttttgctatcaatcgaaagcttaaagtttagggaatttataaatacaagaaaagagcaaatatttgcattaagaaaaaaaaattggaatgagagatcccgaaattcataatttttcgcatatattcatgaataatttttgtctgttgcctttatcccagaattttcttttaaaaacttcccttttaagcaaaaaaacctatttcggaaacaaaattgcctaaaaattaaactaatacggtaatttgcataaattatgcactttattgtagttcaaaattcaaaattgttaattagactcatctctgtcgttgccccgggcggcttcgcatcaaacgcgaaaaattcggtggcgatgaaaaaatcgcaagaaaatggtggaaacacgccactttttcaatcaaaacggtatttaaattactaaaaaaactaattataaaaaaaacaattaaaaaatatatatttcagacaaagttcggtcgacgcaaagaaaagcgaagggcgaaggacgggaaaatcgtttaaggtcaatcggatgaaaaataagcaattaataattaattggcccattagccattactgagggttaattaacccaaataaa

SEQ ID NO: 83424 - DNA, 394 bp, Heterodera glycines
atgagtgccgcccgtcgcaaccgccaaccggtgagcgcgccgactccgttgatttagccggaaatgttggccggcgtttctcttcgcccgaccggcgtcaatttgacggtggacagggtgggcaattttaattaaaatttttatataatttcatttctctatcattacaatacacaaatcttaatcgttttaaggcagcggggcagcgccgcgcggatggtgcaattgagaagggcgaagagcccgtgtacgatgaggtgccgcttgacaccgtggtccaaatgcgtgatgaagaaaatggggaggaggatgaggaagaagatgacagttatttttagtgattcggcaagcgatcaaccaccatttaaccaattgatcgatttttcactttaaa

SEQ ID NO: 83425 - DNA, 687 bp, Heterodera glycines
atggtcaccaaggatggaatcaccttatggtgcacacgaatagaaaaggctcagtttgtcccttttgatgttgtttacgcgcttcccggtcattgtttctttcgcgtgaaaaataaggcacgtgtgttcagtgttccatatagcaaactgccgtcctcagacaagtgtgcacagccgccaccacccccatcatcaaaacatcaacggacaccggacgacgaggaggagaagaatttgaggcgtaaggcaaaagtgacgcttgacttagtggaagctggtctaatggaagacgcaatacaggatgggacgcgctggaagaaagccaaaacctcgatcaatgtgctgggcaatctgcttttgccggaatcattaacagatgcctcaccaacttttcagcaacaacaacaacacttacagcatcagctatcgtaaaaagaggaggagaagagggaggaatgcacaaacaacagcagtgctggagcaacaactgaatctgctcccgatggtgatgtaatgaacgatttcgtcaatagcattcaagcggcgacaagcaatatgcaatagcaaaaaaaagcttaaacgatggactcgctctgccctatatataaaagttgttgattgctcaatttgtggttctccatactattattcacattttaaaaatgttaaattctcaatcgttcagta

SEQ ID NO: 83426 - DNA, 171 bp, Heterodera glycines
  unsure (1)..(171): unsure at all n locations
atggagcggtataaacggaaacaacaacaacaacaacaacaagctaaagttagtcaactaataaaagaaaatgccaactggctttgcgcactgtcgaaggcaaaatgcgtgaaacgatgcgggagactgatcagaaaggcgaacactgataagctgctgtcacttngtgaa

SEQ ID NO: 83427 - DNA, 254 bp, Heterodera glycines
caaaaccatccaaaaaattgtcgctacacaacgccaacacttggacaaacaaagaaacaaagtcatcgaccaaatccacaaatcctcaagtttcctttatccgagtgcctcgaaggatcgaaatttaagacccccccaccctacttatttcagcggaagatgagcgtgaagaagaacgcctttttgagatttaatcaatttgctcaggaggcatggaatctaatcgtgaacctcgctttggacttagacagagg

SEQ ID NO: 83428 - DNA, 516 bp, Heterodera glycines
aacattccaatggttacgcatatcctctccagcatcgaagaatcagcacaacatagggacaaaaaggcggagaaacagcgccacttcgaggttaaagaaacattcggatttgttggtggataaataaatttaagattctcatcggcgatccgaagtataatccgaaaattttagcggtattttttatcactaatgttcatttcatttttaaaatttaaaaaacggactaaaataaaacggacgtcaatttcagggaaaagaacaattgctttctctgatttataatttgggtggccaggaacgcttcgtggacttgttagaactacgaaaattgtatgaacataattatttcaaggaattaaacaaagcggtgagaataacgaaggagtgggagtgatttgactgatccgaagattacaggcactgaaagagtttttcccaacgggacagttgaaaggcatcatggacaagtatctgtaccaggacattgaattggcaactgaccaaaacaaaaat

SEQ ID NO: 83429 - DNA, 492 bp, Heterodera glycines
atgaaaaaacatttgacgcaaaaatttgaggcccatcttggcgttatgtatttaatgcaaaagaattggcactgtgacaaaattgctgaccaattaactgaatataaactagggttgagcggtaccggtaccggtactggccggtaattaccggtttttttggtaccggtaccggttttttcaaaaatgaaagtaccgttaccggtttgttgtttgtactggcccggattgttcattcaattcccgccacatctgtgtcatcggaaaggctgttctcgaaagcggggctcatttatggcaactcattaagaaatcggtatttttgatttctgatttctgtaaaaccaaggaatttaagcctgagcggagacatcaaagcaaatatggaccagttgtttttggcaccatctactgagcccgatgcagaagaaaaagaattagaaattgattatttggaaataaatgatgatgatttttgttaaaagtaataaa

SEQ ID NO: 83430 - DNA, 882 bp, Heterodera glycines
atgagtgagaaattctgcgcatatgggctgacttttgttcgtcgccgtttctctactgctaattgcgcccggctgcgatggcatgcaaattttcgtgaagacattgacgggcaaaacgatcactttggaggtggagagctcggacactgtggacaatgtgaagacgaagatccaagacaaggagggcgttccgccggatcagcaacggctgatcttcgccggcaaacagctcgaggacggacgaacgttggccgactacaacatacagaaggagtccacgctccacttggtcctccgtctccggggcggaaatgggaagagaaacacgggtaagaacaagaaaagcaacaaaaagcttgatcagaattgatcagcagcgaacgcaccatcacatgattgattggcacagtgattttccaccaccaaattcacaacacttttctcttttccgggttatctttgatttccattttcggttattgttttctgtttttctcctctatcttttgtaaaattctgttactttgatccttagttttatcatttatcatcgcatatatagaagttatcatagtccatatttctgtccctttttatttatttttttgactataaaacttttggacatttcgtgccaatatttttttgtgctaatcacttgctgaggatttaattattctttgccctggcctttcaccacctcattaagtgtcgaatggagaagcacagcttcgaaaagtcctcgtgcaaatattccctgctgtccatcgtcagtttcatcgctaggaaagtattccaaactgacgatgatcagtttgatcagcgaattgctcgtcgatggtttaagcgcgagttcgtagaggctaaacttaactaaataaa

SEQ ID NO: 83431 - DNA, 413 bp, Heterodera glycines
atgtttgatggacatttcccctcttttgtacatgctcatctcgacctcaaattggcactgctttcgctccgtttcgatgcgctggtgtgcaaatttttcaagggaaaaaagcggattgttgcgcaagtttcatttttttcaaataagccggtcaaacctttctaagctcgaaaattatagattgaattcgagttcaaaaatagaaaaatggaaacatttttccttgaattgaagaaaatttttatttatgaaattgtatatttcaaacaagaaatcaattagtgtaattttttaaaaaatgataccatttccatcccaaaattttccaaacttaaaaaattctctcaggcaatctctgtgtttggccggttaaaatctttaaaattcatcactttgaccatgaatagaataaa

SEQ ID NO: 83432 - DNA, 245 bp, Heterodera glycines
gatggtcccacacatgaggaggatgactcggagctgttcggacggcgagtgtccaaattcttgcgcagtttaagctctacacgccgtaggcgccaagcatgcattggtattgagcagctgatgatggactttgacgaagaggaagaaaggaacgccaacgggacggctaattgaccaattaatgactaattaacccgaccatcctccttttaattcctttttgaccattataaagtaaacgcaaa

SEQ ID NO: 83433 - DNA, 252 bp, Heterodera glycines
atgaaggtgcgattcaactgtccatggcatcggagcggttacacgccaaattttttcggttttaaagtgaaaagaaaactgaaaatgcgaactgttgaacggttgagtcagacagaaggaagtcggcacattttgatgagacgcgtcctctcagagaaacattttgtcgcatggaattggccatcaaagaaaccgcggaatgatcgactgaattaccctctctgatcgttgacattttgttgatagaataaa

SEQ ID NO: 83434 - DNA, 127 bp, Heterodera glycines
atgcttgtgatcagcgggtggcagacgctggtacaagggcgacaggacggagaggagtcagtctggtcaactgatcgctgtccaccgccgcggagcggatcttcacaagcaacaagggatcagcctg

SEQ ID NO: 83435 - DNA, 189 bp, Heterodera glycines; identical to SEQ ID NO: 63372

SEQ ID NO: 83436 - DNA, 101 bp, Heterodera glycines
gtcgggaccaaacagatgcaaattcggcccggcaaaaattttggcaaaatagaaattgggacaaacagtagacaagcaggggaatgatgttttattccgac

SEQ ID NO: 83437 - DNA, 2145 bp, Heterodera glycines
  unsure (1)..(2145): unsure at all n locations
cagcgccaaaaattgagtgaagtatataaaaagatatttgagaaagagatgattgctatgctgcatagagagttcactggcgactttcgggaactgatgtaatttttttaaacataattttctcattaaatcatgcatattttaaataaatttataaaattttaagtttttatctgatgcaaacgcccattgtttatgatacaaaccaaatgcataatgcattgagcggcttcaacatcaataagtaaaaagcactgatttgtgaggtgtttaggagattaaccttaattccgccaaggtttaggaaaaaatatataaattcattagatttgctcaaaaaacaatcaaaataaaaatatttcatggtatcatttaacaaattttagtgttctctatcaaaaaatccaatttaatttattgtaataatatatcaaaaatttgaatcagaattagtttggccacaacttatttgttctttaaaattttaacaaagaattttgggctattgaatgaaaatcattaattttgacaataaaatatgcataatcatggcaaaaacgtgtggttcatccgtttaatgcttaattaaatgcttcagtactttttttcagaagcaaattaatatttttaagaacttgaaacccttttaacacttaaaaaattctgacccaaaatttattggaattttttgacgagaacttttttttttatacatttgtgaaatcatattatgtttaaaaaaatgctatcgaatgataccattaatattatttttgttgaatttaagccaagttatgaatttttatgtacaatatttatatttttttgaccccttggcagatttaggaaacgtcaaagcacgaagcacggaaacaaagtcacacaaaaaccaaaaaattttttggaacgaaaaagaaatgaaattaataatttttcatgaaacccaaaaactaatttaaaatgaactaaaatttaattaatattttatcaccgaaaaggaaatgaaaaatttttacggaccaaagcgaaaaacatgaaaaaaaaagtcaaatggtggctaaaattgaaagtctacttttttttgcttaaaagcctacccttgttggacaatttatagagatacaaaataaaaaatgagccctaattactgcgcggaccatttcaggccggtgctagccgaaattttgataacacgcacaaatggacaaattgctgaactaattgatacatataatcatgtgtttgatggccttgagaatgacattaaagcaaaaacaagcggcccatttcaaaatttgttgctctcattgctcagacattctcgtgatgagactgagctggtcgacgagcaattggctaaggaagtaattagcgaaataaataaaatgtttatcttgaaatgtgcccaaatggcacaccatgcaacatggatggtacggaattcggattttgacatttttnnnatcnnattcccaatttccaaaaaaattttnccatcnattaactatttccnaaaattttnnnnccttnncntcatctctnccacccaaccatttttcaantatttttcntnntttantnaatttttttanttnatatacaaatatnaaataatttnatttnctttttaccaataatttcttttaatttgaaaatatattttattaaaaaattatttaataattttcgttactatttgtttaggatgctatgaagctgatcaaagaaggcgaaggccaaaaaagcattaacgaatcagtgttcaacgaagtgattgctacaagaaacttagtccaggtatataaaaaaaattattttaaataaaaataaaattcccatttaaaatatttaaaaatgatgagtcatttcgttaagctccgactcacattcgacttttatcatgaagttgcagaccaagacattgagacgggaattaaacaggaatttggcggtgacgacgaagcggggtaattaggataacgatccgagatctaattaggctttaaatttataataatttagcttgtttgtttacattttttatttagctttttggcactgattaaatgtgttcgcaatagctctgaatattttgcggatttgttacaaaaatcaattaaacggaatttgcacatcaaaatattt

SEQ ID NO: 83438 - DNA, 461 bp, Heterodera glycines
atgtcaatgttttcgaaatgaagttctttaacctgcgagaacattgaagcaattctcttcaaaaccacaaaattctttttataatttaaaattttaatgaaattttgaaaaaaccaaaataaaagtgaaaatctaaaaattaaaaaaaaattaatcgaaaaattcctaaatgaatttttttttcagctcttccccattcaccatgggcatttttggtccatcttttgctgtgccgaaatgcgctgccaaaccttcttcgaccacttcacaattggattggctttaggggggtcaccctccccccgggggccaagccgaggcttcttccttcctcagggcgggggaggacaaattgtggtggcgcggcaccaccacaaatttggcaattgaaaatggacttaccaaagtagaaattgttgctaaacaattgaaaaaaaagaaaaatgaatttttgattttga

SEQ ID NO: 83439 - DNA, 275 bp, Heterodera glycines
  unsure (1)..(275): unsure at all n locations
ctcttccncattcaccatgggcatttttggtccatcttttgctgtgccgaaatgcgctgccaaaccttcttcgaccacttcacaattggattggctttaggggggtcaccctccccccgggggccaagccgaagcttcttccttcctcagggcgggggaggacaaattgtggtggcgcggcaccaccacaaatttggcaattgaaaatggacttaccaaagtagaaattgttgctaaacaattgaaaaaaaagaaaaatgaatttttgattttga

SEQ ID NO: 83440 - DNA, 1431 bp, Heterodera glycines
atgccatttcggacgggggaatggccaagcccaggaaattggttttggccaaatcccaccgaagacggtggtgggggccaaggggtgggtgccgtcgtaattggatttatggggtggccaaagaatggcgcccccggagggatggatggaaggggacggattagtgaatgctggacgggaatatggactcatcctcctcttttcatgcatatatgtttagtgcattcattcccctgtacttcgtacaattttttggtaaattttttgaaattaaaattttttttttgaaatttcattggaaaaaaataaagttttaaaagaatgaaaatggcctatattatgaaaagcttagttttttgtattaagaattttttggaaataaaaattttactttttaactcgaatttaactagttaaaagaaattaaataaataattttaatttattgttttaaaaattcaatatatcttttcatatttcctacaatgtgtatttatattgaaattaaaatgaaataataagatataaataatttcatcatcaaaataagaaattaatatatttttataaatattaattttaattaaatttaaattttctatcacttatattttctttatgaaatttataaatgaaataaataatataaataattcaccattaaaaaagaaaattaaattcttttttatttaatttttttatctttttaaaatttttattaaaattaaaactaaaatttttaccacatacattcatgttgtttatgaaatcgtacataaataaagaacatataaatttttatcattaaaagaagaaattattatttttttatatatatatatatatatataatctctttaaaaatattattttatcaaatttaaagttatataaattttcttttatgaactcttaagcaaaataataatatataaataattccagcatttatttgtgctgtccttctatggtcattcgatcctcattatttcaattggaccaaccacagccaaaacattggcacaacaaccgaaccaaatctttgtcccccctcctcagagagtgccattgaaaggaaaaacctaattaggcgctcatctggccccatgttttgggcgacatatttggggggcaaaaagccaatatttgcgattcatgccattcttagaattcactactcccctgccaacagatgggaaattcgggaattttatacatttttaagtagttatgactaatttcttaccatgaacttaattttttttaaatttatgcgaaagtaattttaattctatcaaaatggaaaaatttaaaaatttctttaaaatatgaaaattaatttaaaattcgagttttaatttttgtatctttataataacgaaaacctgttaattgaaaaagattttttaagctttagcattcttaaataaa

SEQ ID NO: 83441 - DNA, 960 bp, Heterodera glycines
atgaccacaataaaaacaatttcaaccacaactcccaaaccaaaagtggcggaaacaaaggccaaaaaggcattgccaaacaaaaatgcaatactttcaaagatttctaaaaaaaattcgaaaaattctgggagggaaccaatgaaaactgaaacaattgaaattaaaaatgaaagcggagaaaaagactcacaatttcaaaaattgtcagaagtcgatgaaaaagaaagtgatgaagtaatttttcaaaaggcgaaagacaatttagaaaatgcaattaagtcagatgagtaagaaaatatgagaaattctctggaaaacgaataatccaagaaaattgccaacaatcaaaatccatttaaatggccttttggcaaaccttggttgactcttgcgcaagtgtttcttactgcagagaaaaaacagctcaaaaagcggggttaaaaatcgagccattagaaactgacaaaacaaatttggccgcggcgaatgactcaaaaattctaattttgggaaaaacaaaagcaaatattcgaattgaagatccactcacaggaaaaagtggagaatgggaagcaactttattggtatcagtggacaaacattgtcccggtccacttttaattggattacccattttaactgaattaaagggagttattgcatttggagaaagaaaagtgaaaattggcgaaatttggacaaacatcatttcggtaattggcacagaatcagagaaacccatgagagtgactatgaaaaatacagaaattttggaaccaagaacggaaacaattttgacagcaaatgtaaacgggaatttcaaaaatgatcagaattttttggtggaaggaattgcacatcaatatcccggagtaattgtcggaaggactttggtttcacccgggacagcaaaaatgttacaattcaaattttaaacgctggaaaagcaccaataaa

SEQ ID NO: 83442 - DNA, 1341 bp, Heterodera glycines
  unsure (1)..(1341): unsure at all n locations
atgaatttatttaaagtaatatttattattccattatttcttttcataatttctgttttttacaaaaatgcaaaagctgagaaattgaaattgcgcgtcatttacggacaattggatgcaaattggaaggtccaattggatttgatgattgtttcccattaccacgaatatggtaattaccataccaaagaaatggtacaccgtaacattgaaaatggaaagaattttgaagtaaatttggagaacggggaacagacggagaagctgacactcggcttcggattctcaatacaattaagcagcagcagaagaagccaatttgagactgtgagacttttaaaaagataattggggaagataaatggaagtaattaactgattaatttattggcaagcaagaaaaaattaattgtcccggtcaaactagtacagctagatttgatttacattcctaaatacgaaataatgagcttttgtaatcctcttatgccatcctcgccctctccccgcttcatttttggcactttttccaaagtttagttgggaaatgcgagtgacaccgaatcatcggatgatgcgtcgcctttccatcagcccacttcaatagggacacaattgaatgctgaacgtttcagaaaggttgtccgggttgatctgtacaggccgaactttgcgaaacggcaccgaatcgaattgggcaatgtcgaagtgccaatgccgccaaatgggacggcactgttttggaatcgcagagtgatttttgaggcgaacaaagacacgggcaattatcatgcctttttgtatgcaaatgttggcaaaaatggtcggagcaatcgcaactctanaaaaatgtttatgggctatgcaccgctattgagaattgggcagcacggggaaggaggagaagcaccgacaatagcagcagcagaacaacaacacggggtaattagggggtaattaagggaagcaagttggagagagcccaattaggaatttaatgggatttgccgaaagtctaattgaattgtaaatcatttagacctctgaataccaagtgacaattcctgtcaaatttggcgaattcttcaaacataaattgtggaatctgaaagtgtttatttaccaatttaaagaggtaataaaatagcaaaataattcaattaaaaaagattaattcagctgccaagcgcaggccaaaaccgaaacgcaacagaaaatgaccaaaatgaggaagaaacgtgcccaatttgcttagattctctccagttggagaatcgtcaaataatcaaattgcatggaaaaaggacgaattatgaggcgaatttttttgcaattttttga

SEQ ID NO: 83443 - DNA, 243 bp, Heterodera glycines
atgtacgtcaatccaaccgcgcaactgtttaaaatggcaaattcggaaggaaatgatcgcttcagccatggccaagcactgcacgcatttgccaacatccgacgcaaaatggagcaagccgaaagggcagtgaagcggagtttggccacgatggaagtgccattgttaatggacaaattgtttggcgaaacgttttttgaagtcggatttaacggatttggcgagaagcaaagcattgaaaat

SEQ ID NO: 83444 - DNA, 1462 bp, Heterodera glycines
atgggctcgggagaaaacgtggcctcagcgaaagtccgcattgatgtacgtgtcgtacaaaactacatgaacataagcgaagaagaaagaaacaaaattcgcaacgaggcatgcggcaatgcaaaagcaacaaaaaaagtaggcgtaaagattacaacgaaaaaccatttcacatattacaggcgctttatcgagcgcaaacaaagcgcttccttcatgaacgtccgcactcttcaaggactggcacaaaacgattgtcgtgcgctgtggatcactctccgagcaagaagcgccgcaccggaatcgccattctatgacgaactgcttatgcgctacttggacgatgatctggccatattcgcatcaccgcgacaacttcagttactgaagaaatcagctgtcattgtgtcggatgggacgttcaaacaggcgccaaaaggaatttaccaagtatagttatcatcctatttttttcaattttttaaattagatttatcatgtcttcggctttgtagcggcgactcatgcggtaccgctgtgcacggcactgatgcgtgggaaaagtcgtgtcatttaccgacgcttctggtcaacgttgagacaggaacttgaggacacagaaggagagctaatggttgctatttctgtgaaatttatatatttttcgtgctttagataaaccaagccaattttgattttgagcccgcctcaacgcgtgaacaagaaggccgcgcatttcaagcacttcttcgcaaaattggcgccctacaatttgcacccccaaaccacgtcaaccgttcattgcacttgatacagcaattgatcaacgaaagcgagttggagttggttattcgattgtcgttgttggacatattagaatattatgtttgccttatttttttcttaaaaactaaacttaggtcactacttgggtacgcaacagcattggctccgagtttttctctctttttgatgttccggttcatcggacaatcaatcatgcggagtcttatcacggccgacaacgttggttttatcaaccacatcaattactcggtcgttggcttgtgaatttccaggttaagaatttatttttttcaaatttgactgttttgcttaggaggttaatcatgcagaagaagaatcagctgtgtcaattgaagagggacgacagccaccatctcaacagttggcagtcaccgcagaaatagatgccagcatcgcgcgtgagaaggctgacattttggcattcttggacagcgattacgaagatgagcaatttacggagacaatgtcacgctactatggccgtattggacatttgattgggttcaatgtgcctccaagattagaaatagaagagcagatggaggaggcagcagcaatggaagaagcggaagcgagtctcaatgagagtggaatttatgttgtgccaaatgatgaaaacctcgatccttgttga

SEQ ID NO: 83445 - DNA, 713 bp, Heterodera glycines
atggtcaaggtaaaagcctttggcggacgaaaagcctgacaaatctctttaagactgcgataatgacctttcaaagaattcttagggacctaaaaatacataaaaattctttatttgggctgttattaagataaatttttgcgtttgcagggcctatttatttttaaatgtttttgaggatttgcgaaaaaaatgcttacgttaaattatgttttgggtttttattttgttttaaaaacacttaaaaatattttaaaataaatataaatacaaaaacattcctcttaaaattgtcatttttgcaaaaataaaacaaacatctacaagaacttgccttttttttgccccgtccgtacttgttttttgagaggcccatcagcagaagaattttcggaataccggagcaaatgatttttggcaaaatattttaattttaaattttatatttttagtacgatattatacagtagcgaatataattgcttccgcaaagcttatgaattaatcaaattctcaattttttcagatgacggcatccgccagccgaatggcattctcgtcagacgctgcccggcacacaaaggccaccatgtcggcacgcccgggagacccgaacacggctgagcatttgtcgagggtattgaaatttgcaatggtcattatgtcaattttagtgatcgaaaattgcaaaagaaattaaatttctcaataaa

SEQ ID NO: 83446 - DNA, 533 bp, Heterodera glycines
atggccggaaatggaaatgaatcaatgagaaccgaggttgacgaaaattctgttaatttcatgaatttgtttgaaaatctggaattgacggattctgaaaaattggctagtctaagggaaattgagaaaatatttgcggacacctcaccgccgccagctggtccatcgccaattgaaagctcagttttggggtttgtgttcatctcacaccccatactgtgggcactggtacaaccggacattttgggcgaacaaaatgagctattggaccggaaaaatttaagcctagaatcggatcaattggtcttccaaagtactccaagttatgtgacgactattacactggaccctaacaataactggccacatttcacacaaatttcgttgattggaataaacaatctctattaggaactcgggtcaaaacaattgatttgtagcaaatgacttctcctccaaaactgggaccatcagtgagtcaaattgtcccttcgagctgctgtggaataattagggaagtgaaccaaaataaa

SEQ ID NO: 83447 - DNA, 440 bp, Heterodera glycines
atgactggtgatgattttttgaccattctgatcaatttggcctccgtcagttcccccaacacttttgtgagtccgtcgtttgaatttggcaaaatgatggaaaggtgcgcattccctcccacaaattccatccccaacagtttgaactgaattttgtttattttgtataattagttcaatttttatataaattttacattagtttcttccaggtaaacaaatttattagtttggcgcatcatttccaactaaaagtgaatcactcattttaaattgtaaaatatggctttggttttgaaaaaagccaatttttggatgttattaaaatttgaaagttcgtttcttatatttttaatcgtatttttcttatagaatttggataaaattataaaaatattctttaaaacaatttctcgtataattcatgaaagagaaataaa

SEQ ID NO: 83448 - DNA, 321 bp, Heterodera glycines
atgaacagcgaaccatggcttatgcccgagaaatcggcactgttcggatcgaacgcacttttgagcccaatggcatattcatggaataaagggcaaaaaatttatacaattctgcggtactaattggcactgccggccccataaaaaaccttttcttctcttaaattagcctaaaatccctaatttggtcatttttttagacaaaatctgtgcactttatgccaaaaggaattaaatcaaggcgatacattgactaaagatccgtccccgcgaaaagccacccccgcccacggggctcgaaccctaaaataaacaaataaa

SEQ ID NO: 83449 - DNA, 58 bp, Heterodera glycines
ggattgctggggtcgtgggttcgagtcccaccgggcgagttaccttttatggtctaca

SEQ ID NO: 83450 - DNA, 995 bp, Heterodera glycines
atgcttggcccggcactgttcaacatacattttccgcttttgtcaaacgtggaatttgcgaaggatattggtaaaaaaaagagattaaaaccaagtttaaactctttcaacaacgactgccaactttttaaaataattaatttaaataaattaaaataaaaatttaaaatgatttttcttatatttgcagtgcattcaaaatgaaacatatttttttaaaattttattctatttttcagttccaaccaatgtgttatcaaaagatgaagtgctcgctgtttatcagttcaaatccattccaaattgtcatgggatatccgacggatttttcccaatgcaatttccgacaaatgaacggtttatgaacacgggcacacttttgctggacattgaaaaagtgtcggaatttggacaagagcctgaagatagtagtcggtgcagcaaaaaaatgtacataaatggactgtcatggaaaataagggcagaaattcgaacgaaaatggaatccgatgatagaaaggtcggcatttatcttttgtgcgatgctccaaaagaaggtgcaaattaagggctaattaatattaattaaccaattaatttgcattgagcagaaaattggagttgcaaatgttcggtaaccattcgaattatctcacaaaagtgtggagtggcggatttaagaagagaagtttatgcatattttggaaacaatgaatatgatagctggggatgccgcgattttagatggagatacagatacctcgatttcattgaatttgctgtgggtggcatttaaatgtctttctctaattaaaatattaaaattaagaaactgggttgacccgaaaaatggcttgtacgacatgcgtggggcacaaagtgacattttccattgatgtcaccgtgaaagaagcacaaacgggcaaagaatgcttatattcataatcagtgatcccgaaaacccttcgaaaacatatgtattttcatgtgtttga

SEQ ID NO: 83451 - DNA, 1875 bp, Heterodera glycines
atggatttccatggaaaattaaagcagaaattacgaaaggcattgatgagaagaaatatttgggattttacttatggtgcgatgcaaaagaaggtccaattttaattactattttaaaaatataatcattattaaaataggaggaccatggaactgcgttatttcggcaacctatcgaattgtgtcagaaaagaccgaagcggagaattccattgggacattgtgtgaccgggttatcaacagatcaaacatcggccggggatttggatttttcattacttttgctgtgagtaataatttaacatatttacttaattggtataattatggttaatcaaggaattgatggactcgaacaagagcttttacaacaaagcagaggacaaattggcattggccattgatgtcataactgttgatgagccaaaaatggagaaattcatttccgatcccaacaaatccaacggcacactttcaatggaaattgaaaaagtgtcggaatttgcgcgtgaaataattgggagtcaacgtaaaagcgaaactgtgcacatcaaaggattgccatggaaaatatggacacaaataaatccgaaaattggaagcactgacaaaaatgagaaatggttgagcatttatctttggtgcgatgctccaaaagaaggtgcaaaattactaataattaatatatatattaacaacaattaattaattgatattgagcagaaacttggagttgcaaatgttcggcaactcttcgaattgtctctctaaagagcggagtgtcggatttcggaatggaattcgatgaccatgttattgacaataaagagaacagctggggattcccgaatttcatttcatttgctgtgagtgacaattaaacattcccttaattgacccaattatttatgatcaattaaggaattgatggaccccagcaaaggcttttacgaccaaagcgaggacaaagtgacattggccattgatgtcacagtgaaagaagcaaaacggaagacgaaacataaatgcccaatatgatttggggaaaaatgcccattgaatatcctccatcctatgatgaacctgtttttttatttattaatttttcttgattatactttcaaaactgctgatatatgaattaattaattgtcggagctgttttagtagactctcatttttgagtaccgaatttcaatgataaacattttagtcataaacccaattcaaattttaccattttaggtcaatgtttacaattttttggacttggatttattgcattaattttgttaggatttacgtaaacttttttttaaattgaaaccattcctaattgactgatcattttttccttttatttaagcagaattttttgggaccagaaatttgggaaccgggaagtttgggctcattaaattaaaaattgaaaaactattactaatttcgctatgatttcattcttaaataacctaagctgcgcttaaaaatttatatttactacaaaattaaaaattaaaatatggaaaagtgacaattttattatttagtcaattcttacagctgtttaaacgtggtgttgagtgtcaattgtacataactccttaattggcataattattattaattaaggaattgatggaccaaagcaatggtttttataacagagaagaggacagagtgacattggccattgatgtcacagtgaaagatgataaaaaggagaaatgcatttctgatcccgacaaatccaatggaataatttcgatggaaattgaaaaattgtcggaatttgcgagagaaatcgacagaagtgaacgtaaaagcgaatctttcacttacataaatgggcttccatggaaaatattggcataa

SEQ ID NO: 83452 - DNA, 657 bp, Heterodera glycines
atggtaatttttgttgtgtttttaaaatttcatcctcttaagcttgtgccagcccataagctcattttgaaacacgcttccgacgtttttgaggcgatgttccgttttgatgccaaaaaggaaaaagcggaattcggtaaaaacattactgaatgacatttacaatttagtctctgcaaattaccctaattaattttcaatagtcctccgctaattgctctaataaattttcaattagccgccgctaattacactaataattttcaattagcctctgctgattgtcccgtggaggtccccgacgttgaagcagcagcattcaaagtgatgttgagcttcatttatacggaagagttgaatgaactgaacggagaaaatgcaatggctgtgctttacgccggtggatttaattttatgtgacaaaaataattaaattatttaattagccaataagtacaatatcccctctctggtcggctcatcttcgcaaattccaatttccgaattgcgcaatgttttcttcgcttttgctcaggcccgtcttctcgacttgaaagtgggtaggaaaaattgaaaaatgcgaaagaattaaaaatttgctaatttttaactattttgtcggtttacattttccagttaactaaaatacataataaa

SEQ ID NO: 83453 - DNA, 847 bp, Heterodera glycines
atgaaaatatgcctaattaaaaacaaaagttgtgagaaaaagcaagggttattctgttccaatttatccattgatctgtcaaattttttacaaaatcagaacatcaaattcaaaaaatcgcattttgaggtcaaaaaatatgcaaaattgcttcaaatgattaacttacaattttttcgttcaaaaataataaattatttttatctttcgtctctcatctctagggttataaattaatatgatttttaatatatttttctttgcgcatatgctattaaaaagcggctcagaaatagcatttctacgttaacattttttggttgttttggtgtttattctcctgatgagataacacaaaaaattattaaaaaaacaaagattcatttttagagaaagggaaaacattaaaatagtgtatgccagagatattttctgcttttccaaaaaatccaaccaaaaagggggaccaaaactaatttgtaagacaacattagtaccaaaaatatatatattctaaatttagtgtaaataaaggcaaaactttttttctaattattttgttgaaattataattttaaattaaaaaaataggaatgaaataaaagacaaaattgaaccttttttatagagggaagagagcgcaaacaaattatggaaaataaagttaaacgaattaatctatcttatttcttgtaaatatgaatgggattaggtatgtactaaatgattcatgaattttataagaccaaacttataaaattaatttaaaaaattaaaataaaatgattaattttagtgcaaaactttaataaattaaatttattaatataatccctataagcttcaa

SEQ ID NO: 83454 - DNA, 697 bp, Heterodera glycines
atgaaaatatgcctaattaaaaacaaaagttgtgagaaaaagcaagggttattctgttccaatttatccattgatctggtcaaattttttacaaaatcagaacatcaaattcaaaaaatcgcattttgaggtcaaaaaatatgcaaaattgcttcaaatgattaacttacaattttttcgttcaaaaataataaattatttttatctttcgtctctcatctctagcgttataaattaatatgatttttaatatatttttctttgcgcatatgctattaaaaagcggctcagaaatagcatttctacgttaaaatttttttggttgttttggtgtttattctcctgatgagataacacaaaaaattattaaaacaacaaagattcatttttagagaaagggaaaacattaaaatagtgtatgccagagatattttctgcttttccaaaaaatccaaccaaaaaggggaccaaaactaatttgtaagacaacattagtaccaaaaatatacatattctaaatttagtgtaaataaaggcacaactttttttctagttattttgttcaaattataattttaaattaaaaaaattaagaccaaacttataaaattaatttaaaaaattaaaataaaatgattaatttcagtgcaaaactttaataaattaaatttattaatataatccctataagcttcaa

SEQ ID NO: 83455 - DNA, 684 bp, Heterodera glycines
atgccttttccctctcttttggctttctgttttgcgtcgtttgtcgtcgtttttgccaaagtcgcgaaccccaacaacagcagcaacttttcattgaatgaagcagcagaagcattcggggtgcaaagcagcaaaaatgcgccgactcgcaaatcgttcatggacattttgcacagtgaggtgatcaaaaacggaaaacatggagagcaacagcagcagaagcaagaattggaggagatgctaagtgatgtgagtgaatatgaaaaggtgatcgaaacagcattgggggacaactcggcacaggtaatcgctccgaatagacggtattatattgacaagattttatccctattttatctatgcgaatgataaattattatcaatgttaaaagggtaattagtggtaagcctttaactctaaaatgattgagtgaaatttgtctttgaaagttaaaaatttcgggtttttgaacttcgagttttgcgtgaacaactgaaattcttggaaaatacaccccctaaagatttacagcccggccatgagccaggaatacgaagcaataaaagcactaaatgagaatgacaagccgatggccaatttactacacaaattgtacaacgaaatcacagaactaaagaattctattgacaaaggtaattagttaaaaaaattaaaataataaa

SEQ ID NO: 83456 - DNA, 1779 bp, Heterodera glycines
atgaagaagcaaaaggctaagcccgaagaaaagcctgaggcacctgccgaaggcgtagccgtagtgccggaagcgaagaaggcggaagagacaaaggaaaagctgaagcaggaagagaaaccaatggaagtgccaccatctccagcagaaaagaagagaaaagaggctgaggagaagaaggatcagaagtgtgccgaggctaaagccaagaaagacgcagaagagaaggctaaaaaggatgccgaggctaaagccaagaaagacgcagaagagaaggctcagaaggatgccgaggctaaagccaagaaagacgcagaagagaaggctaaaaaggatgccgaggctaaagccaagaaagacgcagaagcaaagaaaaaggaggaagaaatgaagaagcaaaaggctaagcccgaagaaaagcctgaggcacctgccgaaggcgtggccgtagtgccggaagcgaagaaggcggaagagacaaaggaaaggctgaagcaggaagagaaaccagtggaagtgccaccatctccagcagaaaagaagagaaaagaggctgaggagaagaaggctcagaaggatgccgaggctaaagccaagaaagacgcagaagagaaggctcagaaggatgccgaggctaaagccaagaaagacgcagaagagaaggctaaaaaggatgccgaggctaaagccaagaaagacgcagaagagaaggctaaaaaggatgccgaggctaaagccaagaaagacgcagaagcaaagcctaaaaaggatgccgaggctcaagccaagaaagtcgcagaagataaggctaaaaaggatgccgagactaaagccaagaaagacgcagaagagaagtctaaaaaggatgccgaggttaaagccatgaaagacgcagaagcaaagaaaaatgaggaagaaatgaagaagcaaaaggctaagcccgaagaaaagcctgaggcacctgccgaaggcgtagccgtagtgccggaagcgaagaaggcggaagagacaaaggaaaggctgaagcaggaagagaaaccagtggaagtgccaccatctccagcagaaaagaagagaaaagaggctgaggagaagaaggctcagaaggatgccgaggctaaagccaagaaagacgcagaagcaaagaaaaaggaggaagaaatgaagaagcagaaggctaagcccgaagaaaagcctgaggcacctgccgaaggcgtagccgtagtgccggaagcgaagaaggcggaagagacaaaggaaaggctgaagcaggaagagaaactggatgccgaggctaaagccaagaaagacgcagaagagaaggctaaaaaggatgccgaggttaaagccaagaaagacgcagaagcaaagaaaaaggaggaagaaatgaagaagcaaaaggctaagcccgaagaaaagcctgaggcacctgccgaaggcgtagccgtagtgccggaagcgaagaaggcggaagagacaaaggaaaggctgaagcaggaagagaaaccagtggaagtaccaccatctccagcagaaaagaagagaaaagaggctgaggagaagaaggctcagaaggatgccgaggctaaagccaagaaagacgcagaagagaaggctaaaaaggatgccgaggctaaagccaagaaaaaggatgccgaggctaaagccaagaaagacgcagaagagaaggctaaaacggatgccgaggctaaagccaagaaagacgcagaagagaaggctaaaacggatgccgaggttaaagagatgccgaggatctag

SEQ ID NO: 83457 - DNA, 479 bp, Heterodera glycines
atgaaaaatgaatttaaacaaaaaagaaaatattcatccaaagaatgggaacaaaattatgtcgaaatttgcaaaaaaattggagttagtgatttcactattatgaaatggaagaaacaatttggcatttgctgtaaaataacggaggatgaaaaaatggaaaaaatgaaaatttattgggaaataaaaagagaaaatccaaaaatgagtgacaatcaaattgctaaaacattgagaattagtctaaatagcatttataattggaagaaacaatttggagaagaaatggcagaagaagaagagtgatttagtgatttgttaggttttttatgataaatttgatttactgtttaatgcaattttcgcagttttctcgtttcatttgaaagatcataaaatgtaattcttttactaatacaatattttttcatcacccgagaactaattgcaattaagtatctttatttttaaatgtttaa

SEQ ID NO: 83458 - DNA, 621 bp, Heterodera glycines
atgattgaactgttgatcagcggtagcacgagcggttcagcagcaacaacagcagcgactggcaacaacaagtccaagcagtacaccaacagcagttggacgatgattaagccggatgaaaaaaggtaggaaaagtgcataaggacaatgtttagcgtttttatacttgaatggcaagcaaagtccttgaaaagtttggcgttaattaaaataaggtttgatcttttcaacaacaaaaaacggacttgatctgggtttaacatttgacatgcgtacagaatttctgatgaaaaaaatccaggaaattcaacaccaagctaatctcgagtagtttcttcaaataaaaatgtaattttattaaaattccaaaaaaaaactcgaaaaatcggcttattgatttcgaaatcttttaaattttctaatgaattaatttaataaaaatatttaaattttcaggattgaccgtcgcgcctctgatcggtcgtcgactcgtccgaacggttgttgcctcgcaacaacaccaattggttatgacgtgtttctgagttgctcaagctcttcagaattggactggatcacacagaaagcagtgcctgagctacagtatgcataaataataaa

SEQ ID NO: 83459 - DNA, 738 bp, Heterodera glycines
gtaatttgcttgaggcaattctgcaacggcactctgtccttatgctaacatcaattagccaagcattggactttgtggacgcgaaaatcattggcggcaagcgatggttgcacgcgttgctcacgcccgcgcagcgggtgccgttcattaagttacagacgcaacgatgcgcgatgcgttgcagtgagcggtggcattccgttgcgcgtctgtgccgcttacgcttgttaacgcatttgaaaaggtaattaattaattcatttaaaattaattaactatgcatttaaaaagattaatagtgagcgattaattaaatattattaaattacagtcattataatatggcatttaaattttaatagtgaattttaattaattataatggacacttaaagactcattagtccctaatcattaaaatattttaaagattttttcaataaaatttatttaaatgaattcaataattaaattataatcacttttaacagattcgcacttttgctgatgtttgaagcattaattgtgatgagttttggttttttactgtcgacaaatacgcttcctctggctgttcctatgtgggcaattgtgctaccacttttggcgctcaactatttgttacttcttggcctgatcatctactgtagatttaaggtatactgtatcatattgttggaatattgtaccggtacaggaaataccgtaatttcatagtacgcagaattgtaaattaaa

SEQ ID NO: 83460 - DNA, 481 bp, Heterodera glycines
atggtaataataatttaatggagtcttcgaattgatctctcaaaatttcggagcatttttagggggctctaagctagaaaccttctgacatgacatgaatagcttttatttaaaaaattattgattttctcatttaaatttttttaggtttttggtaaaaatcctaatccagttcacgcacgatccgggccaaagctttgggacccggatcaggagccctgaaaaacaggatttttcatcctgaaatccggtcctggtcaaattgtttattaaatttgtatacaatattagtctattcaaagtaataataataattattattattttttagttttttttttgaaattttgattttttattacaaaaatttaacttaaaagttcaaaattatatttctgttcttcactaaaggcgactacaacatgtattctcggctggacggatgttggattgaggaaatcgctggcattaaatgcggaaa

SEQ ID NO: 83461 - DNA, 515 bp, Heterodera glycines
atgagcagcagtcgaacgaattggcaactgctaatggtcgaagaggaggaggtcattaataaactaattagacgaataattaattaaatgctaaaaagtaacgaccaattttcagcaggaaatcgcacaaacattcacattgatcagcaacaatatgatgagaacagttacttgagcgtgaacagaacgcagaatatttttggatggagtgacgaggagggacgacgagcattgggtgaacagttggggaaaggcacccgcccacgggggggggggggaggggatggcacagaattccgagttgcgacttccgacatttttggggtcggaattccgacttccgaaaaattttagggcggcatcggaattccgacttccgaaaatttttggtgtctcggaattccatcacctattcattaacgtttttgtcttccctaaaaaccaatttgccgaagtgccaatatttggattttaaattttatgaattttgataattagccgcgtttttaaattta

SEQ ID NO: 83462 - DNA, 192 bp, Heterodera glycines
catcattaaagatactaacaaataagcttggatttatctgcaaatcattaggaaattaaaaatgcaattctttgttggctccaagctcccattggcctttctgctgctgcttttggcatgttttaagtgctagttttgaactgtttattttttaagttgtcttttgtgttttccaatgccaaaaaccaaaag

SEQ ID NO: 83463 - DNA, 397 bp, Heterodera glycines
atggctaaagctgaaaagcgagcgaagccgactcagagaggaaaatttgcgactgcgaaatgcgttggcattcgcaaaggcacgcgccgtccgttttctttttttcaacattttgtcgtttttaggttgaacttatcggccaaaaaaattacgagaattcttccggcgaatcggccaaaaatattcataaaaatggaaaattaatttctttttcagcaaaaattgacaatttgcaaaaaaatgcgaaaataattcaaaaagaaaacgaagaatttggaaggagaaggacaatttgaccattggtggaatgccaaaatgacaaccaacaacatcaaaatcgaaatgttctttatcttttgcgctttaaaaatttgaagaaaaaagtaagaaaaacgaa

SEQ ID NO: 83464 - DNA, 1470 bp, Heterodera glycines
atgcaaaaactgataatcgtaaatataattgctttcgctaatctcggtaccggaattaaactaaactctctgacgatcaccgaatgcgaatttaagtataaccctagaaaattcaatgccgcggttatcaaatgtacaactcctatcaaagccccggcattattatgggaatccggaaaaatgatatgtctggggacgaaaagtctgatagactgcgaaaatgctattaaaaaatttatagaaataattaagggctcggggtgtccgggggcttcttacaccggacacacggttgaaaatattgtttcgacctttaaattcggacatgaaattgaactgaacgagtttcgaaaaaatcgtcgtgccttttatgaacccgaaatattttgcggtttaaatttcaagcggggtaaaagcatgacagcgctaattttctggaccggtaaagtcgtaattacgggaacaaaaaacaattctggaattgatgaaatgtatcattatattcttccctatctgaaaatggctcaaaagaagttagggagacgataaaaaatttttcatttattgggacggtcccccaatttatagttctgttgggtatttattttgttatcgattacttcgcgcgcgccagcatcgcggcgcaccggcggggcggagaggaaatgcatggttttggcaaattttcaaaattcagaaaattcatcataaaaaaatcaggattgagaaaataatacagccccaaaaggtttgggatttaaatttgcaaaagaaaaaattgaatttcttacacctgtcacttttggtgacaggtggatgattgatgaccttcccgcggcgctgcgcggcgcgggtgaaaaaaacacccgcaacaatttggggaaattttaaatccacaaggcggcagagttcaaagaaaatcccataggctcaggatgtgagcgggcggcaacttcaaagggctgcacccctcccataggttttggctcttggcggcatcttcaaaaggttccacccctcacataggcacgggtttgtgcggtaaacacccgcaaccaacccgcaacctttaggggtcatatactactgatatttacatcgatttttatttaatttattgaaaacctattttgatttttttcgccctaaaagccgccgcttaatgattaggcaatactaaggcttgttatcgcatatggtcccaatgaaaaccaaaatgacaagatttgatcaatcatatagaattgcatgaaagacttcgaaggaattaataatgaatatcaatcgattcttactcgaaatcacataaatttattttaatgagagcgcaaatgtcttttttcgctttacggcgcaaatggcacggcgcaaatgttcgcggcgcaaaagtcggctaaccgactccaatccataaatttttgctttgtaattttaatctaaaggtcattatttcgttgttgaaacaataaa

SEQ ID NO: 83465 - DNA, 804 bp, Heterodera glycines
atgaaatttgcaaagaaaatgttaatgattcccgaggcggaatatttggctctacggagtgcgatgaatagtggtgattatctccaaaatgaaaaagcgagtttagacgcaaaaatttctcagaatttacaagaacccggcataagcgaggacctcaaggcgaagagacacgattggctctataaagaaaggcgtacggtaaaggggatacttgaaaatagaccacagaaggtagtgattgagaatcatgtacccggtccgaatgttgcaccatatctaggcctcaacactcaatccaaaccacaggagaccgatgaaccccggaaaataattattcctaggaaaagacttgaagagcaaactcctgatcctgaatcagataatgatacaataaatgagttaactccggagccccaaacaacatccacattaaaaacacccattccgatcaaaactattatacacccgacccttttaaacggtctttttaggtacgtgaaggaaaacaaagatttatttaaaattacggcggccggaaaggtacagtcgaacatgaatttgccgattgaaaacagtaattatagagatgttttgttgtatctcgcagggaagaaagatgaaacgccgcgcggtgcaaaatttctcaaagatcggttactgaaggatccaacagtaaaagacatggttgataaatcaaaggtcatttggggacgtggaaggaaaaaggcaataaaatctataaaaacacccggcatagtgcgagagaagaaacccttcaaaccactaatatgggcaagactgtag

SEQ ID NO: 83466 - DNA, 1257 bp, Heterodera glycines
atgtcacccgtactactgccagccaagctcattcttcaagaagtgcaaaacttaaacccaaaatgggacgacgaattgccagcaaacatcaacaaggactggctcaaattgatggcacagtggctcgacagaggcgaagcaatcacaatcgaatttccacggcacatccaagccatcgattcagtggaattccactgcttctgcgacgccagcaaatacggcatgggaattgccgtgtaccaaaaggccaaaacaataatcagaaaggatgaatgcaacctcatctacgcaaaaagccttgtcaaaccaatcaaagtggcagcgcacgacggtacaatcccaaagttggaactttaagcactgactctcggagtaaaagcagtcaaattcatccaagctcaaatcaaattcgccgatcatcaagtcatcatgtggacagacagtcaatgctcagtcgaacgacttcgagaaaacaagcgccaagatcgatttgtggcaaatcgattacaaaaaatccgagaagcgaattttcaagtccgacacgtcagaaccgactcaaacccggcggatatggcatccagaggcgcagatccccaatgccttcgaacatcactgctttggcgctttggcccgatttggctttcaaaagcagacaaatggccagaatccaacgtcatctaccgaccccgagatgaattcaaagaagtggaaaagccaccaatcgttgatattccagagcaaccaattcaagcagtgcacagcttcatcgcatcagtcatggacgactcagtttctcttgccggcagcaacgacgaaagccaacaaccacgcccaaagaagttcaaaattccgaaacgacgttcggcactgttacgacccatcggccagcagcaaagtccattgcaaggacaacacaaacgccgcaagcaactacaagactcaggcttacgcaagttatttcaagccatctcggaccaacaaggaagcagcaaggccaccacaaaggccatcgaggaaagccgagaaatgcagaaggcaccacgtcatgaacagatcgagcatgaacaacgaatggtgaagaaaagtcaacaagaagcaaatcgacatcttcaaccagaaaagcggcagcaaaaaattcaagaagtgccacattcaacaacagaagagcaacaacgagaaaccaaacgccaacaaatcgaaagacaacaaaacgacgaacaacatgccatcaatcaacaaacacgcagtaaggcttga

SEQ ID NO: 83467 - DNA, 487 bp, Heterodera glycines
caactttgggattgtaccgtcgtgcgctgccactttgattggtttgacaaggctttttgcgtagatgaggttgcattcatcctttctgattattgttttggccttttggtacacggcaattcccatgccgtatttgctggcgtcgcagaagcagtggaattccactgaatcgatggcttggatgtgccgtggaaattcgattgtgattgcttcgcctctgtcgagccactgtgccatcaatttgagccagtccttgttgatgtttgctggcaattcgtcgtcccattttgggtttaagttttgcacttcttgaagaatgagcttggctggcagtagtacgggtgacatgagtccgagcgggtcatagactttggcaatttgcgacagaattgtccgttttgtgatttttccttcgaagattggcaatttgaagatgagccgattgtgttttggtttccatcgaatgccgagcactttgttgtcttcg

SEQ ID NO: 83468 - DNA, 576 bp, Heterodera glycines
gtgagtgcgggtggtggtcggcagaatggtgagttttccgggcccttcagttcccagagtgtgctgccgtggttggaacaccaaaaaacatcgcgtccttcttcggtggtgattgggcttttgggccagcggatcaacttgattcctgggcgtggctgttgttgtggacgtgatctgtacactgtagttgttcggtagtccatgatccgtgacattggtgtcgtcgtggttgtccaggcattgggccgtgtggttgttttggttgaccaaattgttgagcgtgttttggttatggtcgccgttgttggatttgtagtcgttgtccacggtggatttgttggtgccggtggagtcgtttgcggcggatttgttggtgctggaggagtcgttgtttggctcagactccgattaagtgcgaggactttgtcaatgtatcgctggacgtatggactgtgttttgttgccgtcctcttgtcacgttccgtgaataggttgaggaagttggaaatgtagccgccgtgccatgttttgacttccgcaaatttcttttgtcgaattggttgtccttgtgccgaa

SEQ ID NO: 83469 - DNA, 2418 bp, Heterodera glycines
atgctgatcagcctcctttgccttctattcaccagttcggcacaaggacaaccaattcgacaaaagaaatttgcggaagtcaaaacatggcacggcggctacatttccaacttcctcaacctattcacggaacgtgacaagaggacggcaacaaaacacagtccatacgtccagcgatacattgacaaagtcctcgcacttaatcggagtctgagccaaacaacgactcctccagcaccaacaaatccgccgcaaacgactccaccggcaccaacaaatccaccgtggacaacgactacaaatccaacaacggcgaccataaccaaaacacgctcaacaatttggtcaaccaaaacaaccacacggcccaatgcctggacaaccacgacgacaccaatgtcacggatcatggactaccgaacaactacagtgtacagatcacgtccacaacaacagccacgcccaggaatcaagttgatccgctggcccaaaagcccaatcaccaccgaagaaggacgcgatgttttttggtgttccaaccacggcagcacactctgggaactgaagggcccggaaaactcaccattctgccgaccaccacccgcactcaccgcgcaatggacaccactgacaatcacgctgtacaccaagatccatcgaccggaaccaatcgcaacggcatggcactgcttcatcaaaacgacgacggaaaattattacacaaacatcgtcggcgataagttcgtcgaaatcaacaaagaatttccgttggtctccaaacgactctgccaacgaatggcacatcaacaagaatgcccactcgccaaaacggaaatgcaccacgtcggcaaccacatttgggcaacaaacgaccaacttcaagtggatttccctggaccaatcactggactcttcaaagggaagcaaaccagctcagtaacaaattgttttgcgcaaccagcaacactgttcgtcaaatggcacagtctccaactactgtcgccaatccatcgcgcagaccactgcaattacgcttccgagtattgccagctgcaagacaatagttcactcatctggacttcagcatgtccaaacgacaattgtttcatgtgcgatttccaagaagccgaagaaatccacggagaattcaccaagctcaacggtcaaacaacagcattttggatctcggatgatcgacaaaaggcactgaccttcaccgagacacatgccgtgcaagcatgcgacgggagacaaatcgtcttatcagagcagaacttcggcattccaaaagagcaattcgacatcatcatgagtgaccacacaagagcgaaacgcaacgtacaacccgaacaactcgcttcacagctttccgctgctcaacttgccacaacaatggcactctcacagctttacttaaaggaatgccagcgcaacgtgagcgtcagcaacccaacgcttcaggcacgaaaactcctcaagcgcgaaaatctgcaagcccgatggatcagcgaaacaacaatcgaagtgtttccctgcgttccaatctccctatccaacatcagctaccgaaaaacaaaggactgctacaagttcatccctgtcacaatccatctgccaaacacaacacaagacgcattcctcgacccggagatgcgcatcctctcactcatctcaaggagcgcaagttgctctcaatttcgctaccatcatctgcaagtgcaacaaaaacccaacttgtgggtgcgaatcgactcaaaaaatggaaacgtccaacgattggcacaaactgccatccatgagctctacgagacaatcctcaacaaaacggacaacgacttggatctccacccactgatcttccatcagtggcaactcgacaacgacaccgacttcgctacctttccacacatcgacgaattcgaggattcggaagagttcaaaaataagctggaacaacacacgacccaacgagccgaagcactcggagctttacccggcggaatcgaaggatggaccgtcagatggctccaagaacggctacaggaaataatccaatggtggatacgtctcgcctcggcatattccacattcctactttgccgtgacgtcatcctaccttgcctaatcgcttacttcctgaaccccattcgcatcacactcatgaccctgattggatttcgaccaaagaaacaaccaacgcctcaaatccaagcacaacacgaggacatgccattgaaggaaatgccaagcacaccaatccggcgtaaacgacgtcaattgcccgagcaatcgactccaccaatacgactggacacgacgacagcaacggcctcattccgaacaagagcaagagcacacagcgcaacggaagacacgcccttcggacgcttgcgaccgatgaaattggcggacgactga

SEQ ID NO: 83470 - DNA, 1703 bp, Heterodera glycines
atggcgaatgggaaaacagcgcagcggatacgggaggacgatgcgcgacggatggccttcatcacatctcaggcgcaacaagtgctcgtattttgggagtgtgaaatcaacgcggagaagcgcgacaacgacgaaatgaagcgcgcctttgcccagtacaaggacagcggccctatccgtttgaaggactgctaccatggaggacgtgtgggtccacaacgactacactacgaggtgccggaggggtggcggatgaaatattacgacgttcgttcgctctacccccacacgaatgctgtgacagcataccccgtgggtcacccaacacgagtgaacatcattggtgaggcagagcaggcggttgactggcgacgcgccgaccagttgccggtccgaggcattctcaaagtgttcgttgtgccgccccatcacgttgatgtgcctgttctgccagtgaaatttaatcagcggcttcttttcccactgtgtcgcatgtgtgctttgcaacatccgcatggagccgtcaatgaagactacgagtgcacacatcgcgaggatgatgagcgggggtgggtgtccactgtgacgtcaatcgagttggaagaggcgcttcgcaacggttaccggtgtacggcctactatcgctccgtggaatgggacgatacgcggtggagcgaccgcgtttttcgaggctacgttgcagaattcatggccatgaaaacgcatgccagcggcttcccggacgaaattggcacaaccgaggaagatcagcagcaattcatagaggaatgtgaggaaaaattcggaatccgaatcgagcgggaaaagatggtgcacaacaaggccaagcggaccatcgcaaaactgtgcaacaactccctgtgggggcgcttctctttgcgcaatgggttgtccaaaacgattgtgaccgactcgcccgcggaactgcgcgctctgcttgacaacccagcggtggaggtcagctccgttgacccgctcaccgacgaatgcgtactggtcacctatgcggccggaaacgaatgggtggaggaacacgaatgctcaaacattgtgctctctctttggacaacatcggtggcacgcctccacttgttgcggctaatgcagaaggttgcgtgcgcaccaaactcggtgctcatctacaccgatacggacagtgtgtgtttcgcccatcgtgaggcggacgggtgccctctggagacgggacctcacctaggcgacctttcggatgaatggccggaccacgagctcgtggaatttgtttccggtggatgcaaacagtacgctctgcggatgcggcaccgtcatagcggggaggagaaaacggtgctcaaagtacggggcataacactgagcgccgatgcctgtcagcttctccactttgccacatcaagaggagtgtcctacgctacgcaatgtgtcattcaaatgaggatgatgatgatgatgatgatgatgatgatgacgaagacatttgttcaattttgattgagtaccccaatttcctaaggcccaacattaaggacgggacggttatttatgttaagctgtcaaaacgctatcgccctattgtaactaagggggttgtgggaatgaatgcaattgtacatgattttggttttataaagacgtaatttatacggactgcactttttaaaaatgcataattaacaaatggaaga

SEQ ID NO: 83471 - DNA, 1003 bp, Heterodera glycines
attagcgacaaagcatcgcccggctcatctccgtcccgacatcaaacgccctcctcgccgacgccaccacctacggctgaaaccactcaaaaagctatagctggttcttccgcatccacttctcccgctgcgccgtccgctgttgatacaacaacggttactgctgctcgacccgcggcgcgtcgacgcggctttggcggcttcgccgccggctcgacagtgccaccgccgaccattgtccaggcgttgccggccccgccggcaaccaccgacccaactccccacgcgacaacgacggcgcctgctgctgtctttgccgctgcttcaaacgctgttcaacaaaatgtgttaacaccgccgggcatttttcaaccactgccaccgccgtccttggcaccttcgctcgtcatgccgaaattacaccagcaaacatcagcatcaatggcacagcaaagcccgggcaatacggtggcattgcctttacccgcttcagcaccggcagcggacacaacagcaacagtggcatcaccgaccacagcaattacgtcgatggcaccagcggaagtaccagagaaaccagtgattgcaccacaaccaccgaagaaggccaagaaggaaaagcgcaacattttggacagaattggggacaaggcacacattggcacgttcgatgcaagcaaaccggccactttcgccccattggacccacatgtggcgccgcgagacccaaatgcggtcgattccgatggtttgtactggcaatttagttggcccattatttgttgctctttcattcagatgagcaaggcgatacgctggccattggcgggcccgattcttggtatgcgttggcacttcgtgataccggcacggtgctgaagaaggacaccggtggcactggcaaaggcaaaaagcagggcaaagagagggacccgaacgcaccgaagcggcgccggacaaagaagccgaaactgtcctcgggacccaaggcaagggataaagc

SEQ ID NO: 83472 - DNA, 2043 bp, Heterodera glycines
  unsure (1)..(2043): unsure at all n locations
atgcgacggtgtgccgttaacaactgtttgatgggcattgccatctgtgacatatgcacaatgtccacctatttggtgtacattttgtacttcgaagtttatgcaaaagtatacgaaacgaatattaggtaaattcggaggggagggggataaattccgatgaattaaaattaaattttggaaatgaatcccgccccaattcgttcagccatttctgggccacttacctgcatttccatgccaccgtgtccatttgtctgcacacaatcactttgtacacgtgcgttacaatggcactcattcgttggcgcgtgatgagccaaccgtactcaatgattgttcagccggcaatggcctggtaacaataaaattgttagactctgaaaattaatttttttgaaatttccatttaattaatagtgcacggattaatgaattttcctatttattatttgttttattttaaaataattctattaatactgattgctaaatttttggaggaaaaatgttaaaatagaagagaaaaaaaagtgcgaccctggcagggatcgaacctgcaatcttcagctccgtaggctgacgcgttatccattgcgccacagggccgatgtcctagaatagaaatttgtcttatttcaatataatttttctttcaaaaattactacagaaaataacaaaaataaatcctaaaccgacatttaggaaaatctttgtgctcgtcactgtgctggtcgctctgttctgtgtgcccacttacctcgtccacgaagtggtcgaattccgttactctgacggcacagtttttttcaccgtggacatttcggaatgggcgcggacggaccgttgccactatttgaagacgaatttgtttattattggcattgtgcttaaggtgagaaaggcccaatggaaaattgaaaattcgctaccccaggcgattccctgctttttgcttctttggttcaccacggcactgatgttcaaactgagggaaaacaatgcaaaaagggcacttctgttgagggacaaaagcaaaaagatgcgaaactatgacagaacgacattcactctcattgtgatgctgggcgttttcttggtaatttgggatgaatttcaagaaaaaaacaaatcacatttggtaataatttagatgacggaattgccgcagggcattctgacaattctgaatggcattttcaccaacgatgtccattccgtgttttacatgaatttagccaatttgctggacattctttcgctgatcaattgctacgtgggctttatggcctattgttttttgtgctcaaaatacagacaaacatttgttatgatgatcctaacaacgtaaaatttaagttggcgtacatttttggtattctgtccattcagtttggactcctaccgaaaattgggttgctctgaaaagtgccggcagcaaaggcatcggcaacactcacagcacggcacccgaaataggcataacggactgctggggcgggcggggaacggcacggcccattccgcatcaaaagtgccgatcttcgaaccgacaacgattggatcggctcaaagcagcagcatacaatcaatagaagatccatcagcaggccaaattgggggtaaggaaatggcgggggnggggggggacaccgtcccggccaactcaattaaaacgcataaatttaattgttggcctatccataaaactaatgccgttttcttggttcaaatttataacttttaagggttgataagtcgtaacggccgaaataaaaatatcctcctaaattcgaatttaaaaattttttataatcatttaagaaagagaaaagaaaatggaattggtagtgacgatggatgggcgactaccggacgaacaaattggccaaatgacggacacccatctgtaaaagtcaaaaaacaccaagggaaagaaacgtactactgtaaaaactgaaccatccattaaaatatatatgggacaattattttaattatttatcatttaaaagatttattatttattcgtttattcgaaa

SEQ ID NO: 83473 - DNA, 229 bp, Heterodera glycines
  unsure (1)..(229): unsure at all n locations
atgcctaaactcagcagcttcggcctttgctgcctttccaataaaaatgaaacggacaatgtgaaatttttgacgcacggaggggacaaatcgtgcggcggcgaggacatttataaattatcaataaaaacagaattttttggcatttcgaaaacggacagcggatttagtggaatggaaaatgaagagaaaaagcagcaacaaaatgaaaaacaaatggaacatccan

SEQ ID NO: 83474 - DNA, 2776 bp, Heterodera glycines; identical to SEQ ID NO: 18796

SEQ ID NO: 83475 - DNA, 742 bp, Heterodera glycines
taatcagggcttatttgtggaattatgcaattcaatccgtgatactgtaatccccgagataccggacactccaacgcctgatcaatggaattataatgggaatttggcaaatacaactgatcgttgttacagtaatcagggcttatttgtggaattatgcaattcaatccgtgatactgtaatccccgagataccggacactccaacacctgataaatggaattatgatgggaatttggcaaatacaactgatcgttgttacagtaatcagggcttatttgtggaattatgcaattcaatccgtgatactgtaatccccgagataccggacactccaacgcctaatcaatggaattataatgggaatttggcaaatacaactgatcgttgttacagtaatcagggcttatttgtggaattatgcaattcaatccgtgatactgtaatccccgagataccggacactccaacacctgataaatggaattatgatgggaatttggcaaatacaactgatcgttgttacagtaatcagggcttatttgtggaattatgcaattcaatccgtgatactgtaatccccgagataccggacactccaacgcctgatcaatggaattataatgggaatttggcaaatacaactgatcgttgttacagtaatcagggcttatttgtggaattatgcaattcaatccgtgatactgtaatcccccgagataccggacactccaacgcctga

SEQ ID NO: 83476 - DNA, 1358 bp, Heterodera glycines
tttatgattcggtgatttgcgccaaccaatacggtgtttccgccgcacattacagtaaccaaacaacactggatggaacaatgttgacaaacaggtacggtagtaatagtatgggcattactgtatttaaatgtagctcaattttaggtattcaacagaaaaattgtggttccaacgtgtgaatttcacccacaattcggaggccgtcatttgggtacattcgcctgaccatgccgtactggacggtactcagtttgccgagattggatggcacattgacaattgttcaattgtcgagaatcaaggcccaattttggacacacatcgagatttggtaaaaacgaataaataaaattcaatcaaaatttgaatttttgaaacacaatttttaaatttaaaaatcggtgcgtacagaaacggccacaaaactataaaaattcgaaatttacgaaatataaaagttagaggttcaaatttttaaacccataaaccttaagtgctcttatgatcacttttttgatgtgttatatctgcaaaataatcttataataaatttaaatatatatatatatatatatatatatatataaacttaaaattaaaattaaatcaattttgtttttcacagttcgccagtgccaatgtgttccactggaatttttggtcaaatacatttgccaacaattcaaatggcggtgtccaagtccatctgccggatccgtgggatttacaaaatcggcgccatcattctttttggatgaccgaaaatcgttttgaggtggaaaatatttttacaaatattagattttaaaaaatcattttataattttttaaatttttcatttaaatttgcttaaagttacaacaaaaaaaaactcataaaaattggaattttgtatcttacgaaaattgtacccttagtattcaaaaaaaaattgccttcttataaaaatttttctgtaaaaaaaatatttactacaaaagccattttgctgaaaatttttgctcttttaaatgggcttaatgattttccgggaaattttttaatcctcttaagttttttgcagaatcggtacgacttttttttcagaccttatgaattttttaagcgataacctatcattgtggcacttctgtataatatggtcttacatttgtaggacgcagaaattattttattatttcgcatttctaaatatttttaaaaatattttttaattttatttttacaaattaaattttgtcacatattaattaattactttttttccattcatttagcgcaattatgatttcatggtgcagttgtcaggatattttacgtttgcaaatatttcttccaacaatttcacggataa

SEQ ID NO: 83477 - DNA, 697 bp, Heterodera glycines
atgcgaaataataaaataatttctgcgtcctacaaatgtaagaccatattatacagaagtgccacaatgataggttatcgcttaaaaaattcataaggtctgaaaaaaaagtcgtaccgattctgcaaaaaacttaagaggattaaaaaatttcccggaaaatcattaagcccatttaaaagagcaaaaattttcagcaaaatggcttttgtagtaaatattttttttacagaaaaatttttataagaaggcaatttttttttgaatactaagggtacaattttcgtaagatacaaaattccaatttttatgagtttttttttgttgtaactttaagcaaatttaaatgaaaaatttaaaaaattataaaatgattttttaaaatctaatatttgtaaaaatattttccacctcaaaacgattttcggtcatccaaaaagaatgatggcgccgattttgtaaatcccacggatccggcagatggacttggacaccgccatttgaattgttggcaaatgtatttgaccaaaaattccagtggaacacattggcactggcgaactgtgaaaaacaaaattgatttaattttaattttaagtttatatatatatatatatatatatatatatatttaaatttattataagattattttgcagatataacacatcaaaaaagtgatcataagagcacttaa

SEQ ID NO: 83478 - DNA, 491 bp, Heterodera glycines
atgttaaaggacaaattcgcgataagtctggtaactaaaaaacattataaaaatttaaaaatattttcgatgtataaaaaattaaaatttaattttaacttaactctgtaattagaatttataatcaaattcttcttttcatattaaatttcaagcaaaattttagtcttatatttcataatttgattttgcttaatgatttattgacaatgcaaatgaacagtgttatatgcttcatgttattgtaatatgaatattgtcaattttaataatataattataatttattttaaaatcaaaaattaaatatttttcagaatttatttttacaaaatttcaacatttattaaaatgtaaaagcactgaatcgccaaaaaatttatagcgcttgctgcataacgcacggatacatgagatttgtaatccaaagcttaaaaatctttagttctgattgcaaatatatttaatcatggaaaacttataaaaataaa

SEQ ID NO: 83479 - DNA, 792 bp, Heterodera glycines
atgaaggtaatattgccgatggtatcatacctttctgaaattttgaaaaaaagtcataaaacatgcttcgtgagtttttcggggttccgcgatttgaattgcacgaaatgagggccagatttgtgattaacgaccccgaaaagccctagaagcatattttatgctttttcaaaattaaagaattttttagaaaaggtatgtgatgcaatcgacaatattaccaaaatgaaaatttgtttctgagggtttcgggatcgctaatcctgcaccattttgacaaattcaaagcccccccccccattttgaaaaattcctcttggcctcaaaaaactacaaactgacaatgagctaaaagtctcacatcttcgagccatgattaaatattctatagaaaattaaaaagaagttgcggaaaaaaagctcatgagtaaaaaatgacaaacattattcttttaaaaataccgcttttttaggctaggaaaatcgtagcttttgctgatttagaatctatttgtatcaatctttgtaaaattcatttttctgattttgtaagagttcactacgagtccacattcaacagcatcagagacgacatggcgatgcttgttcgtgaacagcaaaatcgagaaacaaaattaatgggccacttgcgaaatgtgcgtaagtaaaacgacggagttctaaattgaactaccaaaaggtgtggctcggaggttcttgtagaatttttactaagaaaatgtatgacaccatttaaaaaaaacaaaatgaacagtaaaaaatactaataaa

SEQ ID NO: 83480 - DNA, 899 bp, Heterodera glycines
atgcagctgatcattctgatcagcactacggctgaacgctcggcagcaggtgagtggagagagtggagaggagaatgtaaaatgaatgtttcccccattttagtcgatggtttttattggccaacaacaacaaaaacaacagcagcagaaaacagcaacaacaacttctgggccaacaattacaataacaacaacaacaacaacaacgacttcaatgttggcgatcaacaacagcaacaacaattcggagcagtacaacagccagcaagcggtggaggaggaggcaaggaaaacggggacaaagaaggagaccgggaaacggggttgtgctgtctgtgtgcaagtcccgtcattacggaatccataatccgtattatgcagattttctaaattacggaagtccctaattacggggtccaaaaaagcgtaattctctgaataaaaataaataaaatttaacatataaatttattgattaacaacatttttggcaaatatgtattgtaaattcatttttaatggtttttctaatttcttaaaataattgtccatttgtttcttttgcacagtttttggaattattttttgtctatatttatgtccttaattggcatttttcagattcctccttcaacactctgtcctccctgttgtttgcgtccgccggccttggcacagtgcctgccgccagcgctgtcgtcgctccgggcgctcccattggcattgtgccgttgtcgcgcggcgtcggcggcggcactgatctcagcccgatatttggcaattttgaccggaacggacgcaataatttcaattttggtggtgctactggtgcggaggagaccaccgacgacactggcgaacagttcacacctttcccgacactaatcccggccgacaaa

SEQ ID NO: 83481 - DNA, 628 bp, Heterodera glycines
atgtcatcggcatcaatggttggcggtgccggctcattttatgtgggggacggagatggcggtgcgtacgaatatccgttagttgacgagaccgacgcatttggaggagcaccggggcgacggcaccagcagggacaaacttttggggggtcagtgttatgggagaacagcagagttgccaagttggccaagaaaaactgggatttttgaacaagttttcgggctcattgcccggcacttttgggttcactcattttattttgaatttaaatgaacattttgccaaattttttaaaattctaaaatgccgagggtggactgaggagcgggagaggagttgatgctttgtcaaatattttggtatttatttgaaaattttgttttttcagttacatgcgaggaagtgccgaaatgcgtgggggacagatgccgtcgccgtcctatcccaattttggcggctttggaggaggaggaggaagaggaggagcatatgggggaggagggagggaagagtcaccggaagagtgggaggatgaaatggtcggaggaggagaaggagggacagaaatgggacaaatcgaaaggggcggcggaatgccattttggatgggtggcacaatggcggcag

SEQ ID NO: 83482 - DNA, 956 bp, Heterodera glycines
atgtgcacgcatttgttgctgaaggatcagctcaaagtgagcgcctgcgttgccgacattgcctactcactgaagcgcgacgcgaaccctccacaaattgtcacagttgccaccggactgttctgtgaactgagcaaaaaggtcggtttttgtccgaaccttccgacacttacgccctgagacatttgcctgtaaaaccaattttttgaaatattgcagcacaacgccctgtacaacaacgtgccggccatcattgacagactgttgacaaatgaggaggcgctggagccggacggcgaggcccaagtggaggaaattctgcaatttctgctccaactggttgacaacgaccagcagaagcgggagaaattggtggacaaattggtggaacggcatggcgatcggttggccggctggcgatgtgtgacccaagtgttgaaggccaaggaggcggcggccgagagggagcaacaacaaattcagttgcagcagcagcaacagggtgagtctgtgtgctgttgcggattggccagtggagttttggtggcacgcttttttggcacaatttgacccggccgagccccctactgtttcatgtataatattattgcagcagcagctcaaaaggccggtagcagtcgtgccggagggagcagaggccgccctacaggcaaaacgccgaagcgatgctaatgcggcggagagccagggaacccatgcagatgatttatttcttttcttgaaccatttttagctttcgatctctatattcgtttattatatgcaaatatatgtattgttttccttttcggaacaatgaattaaacttattattacgaaatatgtattgggcatgggcacaagcattatatcaaaaaccaagttataaaaaacaaaattgaactatgtaccttttttctgctccgaaatgaagtttttttaatgagactaataaa

SEQ ID NO: 83483 - DNA, 155 bp, Heterodera glycines
aaaataattgatcccaaatggctgctttaatgatgctaacatttttactaatgagttcatttgttgcccaaatggcaaacgctttgaaaatattagtcgtccaacaaaattacatgttctttcgaagtcattttggattcggtttaaacttggcc

SEQ ID NO: 83484 - DNA, 117 bp, Heterodera glycines
atgttgcgcaactccgtcttgtttgtgttcactgagattctcctccattgcttcgactgtcagcagttggaccaaacgatgagtgatcagcgggacatgctttttgcccatttgctg

SEQ ID NO: 83485 - DNA, 1881 bp, Heterodera glycines
atgcgcttcacaagtgtcttctgtttgttttttgcaatggcccttggcttaatccaattggaccgaggttagcctggaaaaatttttaaaaaatttgtaaaaaaaaaattgttttttttttttgttttctagccaatggtatggatgttgatgtttgcgagaaaaaggaggactgtaagtaacgttgtttctgtaatcaattttcattattagaagaattttcgatgggctaatatttagaaaattctcatgaattttttttttaattaaattttcggggtaaacccaggtcccaggcctctctcctttacaataggaaaaaaacatcagaagaacaaaaaaaatttttaaaatttctgttgtcccaaaattggtttttgtctgattttaaataaattaattgttgagggacgaatcttctcgaaaaaaattgcaaaaataaaaaaaagcagggtaggtcgggaactcgcatttttgaaaatgcggaacatgaattctggttctggattgggaaatcgccaaaaacgggaaaatgggaaaatccacgtagcaaatacggaatccgggacgaaaaaactgacaaattccgatagaaatccgggaccagaaaatcgggaaattctgacagaaaaatccgggttccagggggtgaaaatagtgaaatcctaatataaatccgggaccagagacgtcaaaagcgtgaaatcctactagaaattctggatgctggactaacaaataagttacatgaaaaaatcgaaaattatatcgggagcaatggataaatgcgagggtaacggaagggtatcggaattccaaattccaaaaaaaattctttttttttaagttttaaattttcatttccttccatttgctatgggcctggatcagggctgcacgaaaacttgtaaaaaaaaatttcgtatacgaaaacgaaacacgaaacgaaaaataaaattttgaaaaccgaaaatgaaaacgaaacgaaaattttaaactcaaaaacgaaaacgaaacaaaaattttttgacggacgaaaacgaaacacgaaaacgaaactcaaaatgtgccgaaaatttatgacgaaacgaaaacgacaagaaaatttcgtgcaaccctggcttggattggaatccattttaatccaatctttaatctccgatataaattggacagcagaaaataaatcatatgcaaatcggcgaccgacacattcattttctctccattgagaaatgggagagacgacagacacaaagccaatgattaaaaacggatttttaaatgaaaaaaaaggatttatcgattggttttatccgattgtatccgagcaaaatttctttcattccgtgcacctgcactctttttaaaaagataaaaagttacagaatttaggatcctaattcctcatgaaactgttctacaaaattttaaagtgaacaaaaaaatgaatatgctttaccaatctcgtcggaattttattttttccccacaaaaaattcaaatagtttattaaattttttttgtcttagtgctccgatattctaactaatctcatcaaaaacgaaatttaaaatttacgattatctatataaaaataaaaattaaattaacattataattattgtctaaaattcactaaaaaatatattttcttaataatttttcatcaaatttttgttaaggtcaaacaatgaaaatcaccaaaaacaaattggaggaggatgctgacaacttggataattacctaaattcatcgcaatccgggcaattagcagcaaaaattaaagaagcaattagtgcaattaatggcattttggacgaatatgggtaaaattaagatataaaaaatatttatttttaataataattcaaaataaa

SEQ ID NO: 83486 - DNA, 740 bp, Heterodera glycines
atgcatcttttcgcaaaagcattgtgtttgctgcatcatcatctgctgtcgtcaatgatccgtaattaattattttaatttgatttgatccgtccgaaaatttccgatcagaagaaaaacataaacaccaagatttgctggctaaaagggattataaaaattcacttttaaatcacctataatccgctgatgaacgcaaattattatttaaaaattttgcccagggtcccttggcttcgggttggtgccacaggtgaaaaaaaaatagcattttagtagatttgtcgccaaaaatgccaattttggtgccattttagtgtcaattattttaaaatttaacaaaaaatactcgtttttccctaaaagttttcatttttcttctagtaggggggggggagggggagtgcagaaaattctaccctcgttttttaaagaaaatctcgaaatttttgttgggtcaatcaatgtattaattttaatttaattgtaattgaattaaaacaaaattaacaatttatttcttcagcaagaatttggggagtgaaagtgaggagacattgtgccaacagtatcatgaatatgcgccgccggatccggcaccgccaacttccggacaatatgtcaacttggccggcggggatgggcctacaaaacggcggagaccaatggcacaaaaaccgatggccaagtgcgggaataaattaatgaaatccgttttttatttcccaatagtaaagtaa

SEQ ID NO: 83487 - DNA, 1608 bp, Heterodera glycines
  unsure (1)..(1608): unsure at all n locations
aataatgttttcttggctaggcaaaaacaccactaagaaaaaggaccaagatgttctggaaactgtcagcgagggcctgaagaaaatctacaagcagaagctgtatccattggaggatttttatcggtttcacgagttccattcgcccgctttgggttttgtttaaatacgcattattccatctttttgcattaccatttcagatgatcccgactttaatgccaaaccgatgattttgttggtcggacagtattcaactgggaaaacgacgtcttttattttaaactgattatgacaatcaaaagatttaagattcattcgctatctgttggaacagaactttcctggaattagaattggtccagagccgaccaccgatcgtttcatcgtaagaccagcataacataaaacatttacttcgacattaaatgattttaggtggtgatgtacggcgaaggttttgaactttgcccgtttctgttcatttgagcaactttagaagaagctgttattcctggcaatgcgcttgtcgtcgactccactaaacaattcagagcactgacaaagtatttgtttaatactttatcattagaatggttttaatggcgtttcagatttggaaatgctttcttaaaccgttttcaatgttcgatgctgaagaatgaagtgctaaatggtgtgacaataatcgacacccccggaattttgagtggcgaaaaacagcggtttctataagacattttttccatttacttttttctttaagaattgatcgtggctatgatttttctggcgtccttgagtggttcgctgaacgagtgggtttttaaatatttgttaacattggagttcggtattcggaacgtgatttttcaaggtggatcgtattattttgcttttcgacgcacataaattggatatttccgacgagttcaaacgctgtattgaggcactttcaggcatcattttgctatattttgttgcttaactcaaccaaatccagggaatgaagacaaaattcgaattgtgttaaacaagtcggacatggtcgaccatcagcaactgatgcgtgtttacggcgcactgatgtggtccctcggaaaagtgaacactacaggaagtttgttgtttactttcttttcaaggtgttcaaaacgcctgaagttgcgcgtgtttacattggcactttttgggaccatccattgcactatgacataaatcgacggcttttccaagatgaacaacacgacttattcgtcgatttacaggcatacaagagttgaatttaaaaatttcaaattattttagtctttgcctcggaatgcggttcttagaaaattgaacgaccttataaagcgagcgcgacttgccaaagtgcatgcctttattattgccgagctgcggaaacagtgatattacttcaataaaaggtcattcgttttatgtaattttgtatctagaatgccttncatgattggaaaagaaaagaagaagaangaacttattcagaaattggacaaaatatttgaacagcttcaggttgttgggcgattaatctaccctttgngaatatcaatttgttaccacttaagtcttaaaaacccttat

SEQ ID NO: 83488 - DNA, 129 bp, Heterodera glycines
gacattactttcgtgttccatcaaaagtcccatgatggtgagacaaacagatcaaattcaccgccagcagacaacgggaaaggacggagagatggggcggaagaagaggacagagaaagcgagggatga

SEQ ID NO: 83489 - DNA, 1817 bp, Heterodera glycines
atggctttacttcgttctcacttaaaaaatcaccatcaaccaaaattgaaagaattggaagaaaaagataaggctgcagaaagcctcaaaaataaggaagcgaacccgagacaaccgacgttaaaacgaatttttgcgacttcaagtccagtgattaaaaaaatagcgagggctgaatctgctaactcgtcgcaattaaccatcgaaaaaaccttttgtaggaatttaattttaaatgaatttacataacattttcagctcaatggacacccgacggagaaatgactaagaaaattgacaaggcaattaacgatttggtatgtactgctggattgcttgtggaagaacctgggctaaaaaatttattaagaatattggttcctcactataaaactaggtattaatttgataaataaaactttcgatgatcaacttttttcaggggcagaaaatatttcacaaatgatgttttacagtacagctattccttgatgttgcaaaatgttaaaaggcgaattgaaagcaccgattacattacaattgccgttgattcgtggtcctctgacacaactttttccaacatggtttcaaaagttaatttttgggtaaagcttaaaatgtatgtctgtgtttttaagactttgaacgcttatcaaattactgataaaaaattacacttgattctacgtgatgacgaaggtgcgatgaaattggcgaccaatttgctcggttataattccatgcaatgttttgcccacaaaattcaattggtaaataaaatacatttaattttgtgtatatttggctattttaaggctgttggagatggcttaaagctccttggtgggattttcgatgtaaaggaacgaatgaaaaaagcaatccgtcgcataagaaaatcgcgcataattgctgacgatttcaaagcattgcaaattgaaaatgatcttccactaaaaactttacaaaaagtaataaaattcaaataaataacaatgcaaaatctatgattaaggatgtcgaagtgcgttggaattcaacttatttaatggtcagccgttttcttgaaaacaaataggccattgaaatgatgccagcccaagatgccaaattcccttgttttaccagtatcgagtggacaatgatgagaacgttatgcaaaatactccaaccaatttaacgcgcaacaatgcacattcagaatcggaaaagcggtatttccggtgttcttccgttatacaaagttttgaaacaaaatttgacacactggacggctgtggatgattttccagaaattagaaaaagaattgccgaatctttagaggaaagaatgaaaggtattttgtattaattctggaaaattccgtaatttttaagtatagattgggagcggaataaggacttgttattggctacaattctcgaccctgcatacaaagtgcaatattttgaccacatttacatggaaattttcaaggatatgttattgcaagaggtggaacgtgtggccataagtggtattgatgaacaacaagaaacaaccgatgggacgacaaatttggagttcactgaagaaaacgacgacccttttaaagcattccttatcgaacagtccaccagtaattttgtatttcgaagcattccatcacctacgccgtcgctaattgataccaaagcaaaagctgcaggggtaatgtcaattatttattttttgtcttatcgtttattcaaaaatttagcaagttgccgattatttgaactcggccttattcgagggcacatcggctgttttttggcgtcaaccaaccatttggtaa

SEQ ID NO: 83490 - DNA, 653 bp, Heterodera glycines
gaagaacaccggaaataccgcttttccgattctgaatgtgcattgttgcgcgttaaattggttggagtattttgcataacgttctcatcattgtccactcgatactggtaaaacaagggaatttggcatcttgggctggcatcatttcaatggcctatttgttttcaagaaaacggctgaccattaaataagttgaattccaacgcacttcgacatccttaatcatagattttgcattgttatttatttgaattttattactttttgtaaagtttttagtggaagatcattttcaatttgcaatgctttgaaatcgtcagcaattatgcgcgattttcttatgcgacggattgcttttttcattcgttcctttacatcgaaaatcccaccaaggagctttaagccatctccaacagccttaaaatagccaaatatacacaaaattaaatgtattttatttaccaattgaattttgtgggcaaaacattgcatggaattataaccgagcaaattggtcgccaatttcatcgcaccttcgtcatcacgtagaatcaagtgtaattttttatcagtaatttgataagcgttcaaagtcttaaaaacacagacatacattttaagctttacccaaaaattaacttttgaaaccatgt

SEQ ID NO: 83491 - DNA, 1461 bp, Heterodera glycines
ttgacttcgttcatcgacgggtcagcaatttacggctccacccaatgcgaagcggccgccctccgagcatttgaaggaggtcggctgaacacgaccaatttgggctcagtgaacacgttcgttttgagttgtcttttgtttcttgcatattcacgtgccactattttccagcgaggcactgccccagggggaccaagaacaggactgcaggggaaaggtcggtaagggggtgagggatttggaatagtttaaaaaattcgacattttatttttaatcggctgactaagtttaaagtagggtttcccccgacccagccccgaagcggcgaatctcgactttttaagaaaatttactcccgaccaaggggttgctccccgacattttttaaattttctccagccacccttgaaacaaatttgtcgtggcatttcctccccgatccttgatttttctctccccgagggtcggggagcaacccatcctagttcaaaggatgccaagaattgtttcagccccttttcccgtgttttttggccggcgatgagcgcaactcgcaccagcccggccttaccagcatgcacaatgtgttcctccgggaacacaaccgaatcgcgcgacaattgcaggttaattaatgcacacaaaataagagacaagagagtacggtactcagtcggagcacagcatgccaaataaagggtgacgtaatttatttgagaaatacgctactataccgtatctacctcaaccaaacacagaagatgaactcggcatggaatgacgagaagctgtaccaagagacgaggcgcatcatcggcgccatcttccagcacattgtcttccgcgagtatctgcccaagctgatcggccaacgcgaaggtctgtaaattattgtattgtaaaatgtatactgtattatattgattataccgtagtttctaacctcaaggcttaattggccaatttgattaaaccgcttaaacccttccagtggaccggcacgacttagccccgctaagtgccggctattttgcccgctatgatccgacttgcgacgcgtccatttcccatccgtttgccaccgctgtaatgttcagaaaatgccaaatttgactgctctaaatcattccaaaggcatttcgcttcgggcacacactgatcagacaaatgttcccccgactgaatccgtccaatttcgccaatttcactgatccggtggatttggtggagcacttcaacaacatggaatcggtgtacgatcagagaaggggtctgcataaagtcgagactattcgagaatgggcctaagtgttggtttggcaggtggcatcgacaccattctgatgggtttgttgggtgcgcgggcgatggcatttgaccggcacattacggacgcggtgcgcaaccacctgttcggcttccgtggccagcccctgtccggacttgacctgatcgcactg

SEQ ID NO: 83492 - DNA, 377 bp, Heterodera glycines
atgcgtttagagcagttggaagagatccgtaaggtcaggctgggctccctcttttgtcaggttggcattggcacttttctccccttttccatcgttttttttgtccaatttcggcgcccctttgtttcagaatgtcaaatcgttgtccaaaatccaaccggatgtgttctccgtgcccgaccttttggccaacagtcaaattccatgcgccgattttccacgaatgaatttggccaaatggatggaacgacgtttggcaccatttgaactttaaaatttttattttcccgttctttcagccgtttgttcgattggcaacgcccaagtgccccgaggggccaccaaattgaggtggaattgttttgtaggaagtcata

SEQ ID NO: 83493 - DNA, 294 bp, Heterodera glycines
atggaagcgcaaaatgtgcggatcaaattggaagccgaactgagaacggctcaactgggaatggtgcagcaaagtcgacggataatgaatttgtacgagggattagtcggacaactgaagtgaggaggcccaatttccctcttaaactacattaatttttttatcagaattctgttgcgaaaattgcaaacgcccggtgaaagtacggagacgaaacgccaacaggcgaacgatttgatcaaaaggattgaaggcacaaagttagttagtgccgaggcaccaatgattaattaa

SEQ ID NO: 83494 - DNA, 613 bp, Heterodera glycines
atgactaataaactcatacgtaagcctgcgcacccaaagcaccgacgcgcccaatgccgcgacttttttggtacggatacatttgtaatttaatttgcttacaattagtttttgcatcatttaggaaaaggattttgcttgcgaggttagtgatttcagttcaatttcaacagattatgaagacttgtccctctcccattttgtttgtttccaggcaataagtgtcgctttaaccacggtctgaacccaatcgttgtcgacgactcggagcgtttcaaagtgcctgcgacggtcaacccgaatccgccgccgcccggaatggaggagaaaggtggcgaacgaagcgcgaggggcgaaaccaaacgaagcgtaggggcagggggtggcctttcattcattcccccgtccccactgaatccatttgcataaagcttcagtagttggcgcttagatttcatcaattttagcttaactaattttcatttttcagccaaaacgacgagttttgtcgatttgttgctgactcccgccgtgggaagagaaactgtcactgatcggccgatgttcgtcccattttattaactttcacatgatttagcaagcgaacattaaa

SEQ ID NO: 83495 - DNA, 111 bp, Heterodera glycines
  unsure (1)..(111): unsure at all n locations
atgcaaattgacagatattatgaggactacgcgtccatcactgtcaaccaagcagttaacgacatcaacgccatggancaagacgggcgttttgcagaatctgaagattgc

SEQ ID NO: 83496 - DNA, 1177 bp, Heterodera glycines
  unsure (1)..(1177): unsure at all n locations
atgnatccggatcanaagcagcagcaggatgaaaaaaagacagcagcggcaactggggactcaaacagccgctaccaccagggatgggccgctttgcctgaatacaatgtatgtcgtctaatgttcatctggaatcatatactttcacgtcaaatctaatgatttttatgctcacatttcccgggtcatctatgttacaaaatctatgatttttccaaccggtccctcttaatgatttttccactgtcactttccctggtcatctatgttactaagtctatgatttttccaaccggtcccttttcccgtttcatctggaatcatatactttcacgtcaaacctaatgatttttccactgtcactttccctggtcatcgatgtcacgtgaaatctcatgattttccaaccggtccccgtttcccatgtaatctggaaatcatataattccgcgtcaaatctaatgatttttccatggtcccatttcccgtgacatcgatatcacgtgaaaactcatggttttaccaaccggtccctaatcatatactatttcacgtcaaatctaatgattttcactgtcagatttctcgggtcatttattttatgtgagatctcattatttttctaaccttccatcaatgtcacgtcaaatctaatgattttcacaactggtccttttttccgcgtcatctatgttaaatgaaatctcaattatttttctaaccgattcaatcaatgtcacgtccccgtgtcatctatgttagatgaaaatctcatggtttctcaaaccggtgtcatctatgcttattttagccgccttttatctgcgtggacgcgtccttccaacggcatttgcatcggcactccaacaaaatattgaacagaatccaacaattacatttcctgcacacaattattgtcacgtcgacgccgacttcggcgacgccaactgagtccaaggaggctggcgctgaactgtcacataaagatgacaaaaaagagtcagcaaaagttgctgccaacaacagcagcagtagcagtggctacgagttgaaagtggaattgcccgacgcgttggacaaatggcaaattatgccgaattgggacagggattgtgatcgcgatctgttgatcggtgtacacaaacatggtaaataatgccaaataatcaatcagtca

SEQ ID NO: 83497 - DNA, 1257 bp, Heterodera glycines
atggacctgaacaatcgctttaaacacctaattaatgtgctgcaaagagttgccgtcgagtcatcagcaaaagcaacggcaaaagccccaccgcccgaaacaccaccatcagtggtgtaagtgttgctggggtgtcgttagagcccggacgggattggaattttgtaggattttcccgtggtccccgtcccgattttttttttgaagaaatgcctggattggaatcatgaaaaattggggtttgaattagggttaagccccgactccgagcccccgacccgacccgagacgttttttggacctattccccgacccgacccccgacatgtcgtcccccgaggtccccgacccccgactttttgccccccgaccccccgacactaattcgggggattgtggactcggagcgttttaaaaaattcatctacgaaggcggaaaaatattgaaaatttttgagattttgaacaaattttcttaataaaattcattaaaaattacaaaaaactttccggcggctcctatcggcacccggcggcccctcaaaaccatggtttcgatcggtaatttttcaaaatatgaacaccaaggccgaaaaataagattttagggtcaaaaataataacattagcaacattttttcaaatcagtaaatttttacaatttatttgatcaaaattcccattataaactaaggacaaaacgaggttaaaacgaagattttggacccaaaaataagattaaaaaaacggctttttacattgtaaaaacagggctgctaactgaaaattttcaaaacctgcatttagccaacaagaagcatcatttggggtcaaaatcagcactttggaaattttagtcaaaaaggaaaaacatgctttttttgtgacgcgctttttccgaaaaaaatttttgtacacaggtgccggcgggagaattttttgaaaatttgagttcattttgctcacagattttcaccaaaaatgaccaatttttgcgcaattttgagaaaatttttaagaacaattttgcggactggctgtgccgataggtgccgccggaaaaaaaaattgaaaattgggagtttttgatagcattttttacataaaaaaaatttttaaaactataaatatatttaagaaatttgaacaattttcgtcgctaccccaaaatcagaacattcttataaataacgtactcttgttggcgctaaatcagatgattaaagtgaaaaaaggaagatttacgagcatttaaaa

SEQ ID NO: 83498 - DNA, 2604 bp, Heterodera glycines
  unsure (1)..(2604): unsure at all n locations
ggaaacaaattttaaattcttaaatcatttgccaagttttagcatgaattggaccaaattatgactattccaggttcattttaattaaaaacaatntaattcgatatttttaataaatagatttttttatagcatataaatattaagttttatgaaaaactttctgtttttattatttttttggcatttttatttttgtaaaaaactttttttttgtgttagcttttttttaaactttggcacataatataattaaattttatatattttaaatatgaatatgtctgaaaaaagtaattaaagttattaaattaaattccaagtttggctcaaacagtcgtggaccgaccgtaaacttgcatgggacccggacgattacggtggcgtatcggtactttatgtgccatacgaaatgatttgggttaagcaaaacaaaaacaaaaataaataaatttaaaattaattcctttttcaggtgcctgacattgtgcttatcaatgtaatttttttaaaattatcctctttagtaaataaaaaaatgtttgttcgcattttattaaattttaattttaccaaaattattaattgtttttaataattttaaaagattattttgtaaatttaaataatttaaaaatttaattttaatttttaagattatttttgtaatttttaataaatttaaaaattagtttttttaaaattatcttaaatgtttattaaattatagaatgcaaaagggaccttcaatatcacaattgacacgaaggtacgtaaatctctaataaaaattaaaactcgaaatctcgccagatagagactttctgagatttgatacaccaaaaacttgagataattctcgactcgagatcgagacctaacaatctcgaatagccctattgaatttccaattgttggcacccgagcaaataaattttggcacaatgtttattgtaatttttaaattttttaggcaactttgcatccaaatggacgcgttgtatgggaaccgccagccatttataagtcactttgccaggcaaaaacgttttcaaaaaataaactaattattaattttttgttttttgtttagattgacatccaatggtatcggttttaaattatttaaaaaattagatattaaattctcattaaattaggttcccatttgatgaacagaattgtcttctcaaagtcagtcaattttatattattaaatatttgacaaaatatacaatttgaaaaagctatcaaattatttattaattttaaaataattcatggattttttatacaaattattttaaaataaattttaatatcaaaaataggatgactaattatttgcacatgcatgcaaaataattgggaaatatgcataaaaatcgaagttaattcggttttgctcctatatctcagaatttaaaatcaacaaaaaggcgcgcgtaaagcacaatctatgggaatgaagcttttgctccattcccactgcataaattagcggaacgatcaaaaaagccgccttcaattctctccgttttacgcttaaataatcggtggtgtttaatgatgatccctattccttctcgttttactatttttaccatccccgatttaccaaaagtctagtttggatttaaaaaaattatgaaaagaatttccgaaaaatgcgttctcaaagttagctgattgacccatagggatgtagaggagagtctcgattctcgatccgggaaatttctcgggtttttcgcttctcggtctcgtgttttttgcctcggaaaccgagcaattttttttttaatttaaaaaatacatttaaattaatttcattaagatttctcgattctcgagtcgagaaatctctagagttttttgggtctcggttctcgtatcgtttctcgtgatcatttctcggtctcgattctcggtaaaaatcatttctcgcacacccaaacgtacccatgaaactttagaatgacaccaattatatgtcaaaaaaaatgtgaaaattcagaaattttttgtaccgattataatcgaaggatgcttataattatgagatgacctaatatatccaaaataaaattggatgcagcaatattcattcttatgtaaaaatgacataaaattcgtgaaatttttttatcaatgccaccaaaatagcggtgagcgctaaatggctttaccgcatgcacttttgttgattttttaaaattttgagctataggaaggagcacaatcgaaaggtaccaaaattttccaaattatgtttaaaacttgtcaaattagttaaaattaagttaaaaatctcgaatgactaaatatggatggaattaatatcgaaataggcacaaattttcatttttaaattttgccaaattttaatttaacctttaaaaatagtttggctcatggacctacccttccgggctgcttcatctttcgctaatggatgctgttaatgagactcaaatggaggtgaccaatgaacggggcgagttggaacagcttgcgctggtcgaggatggcattgatttggacgattattatccatccgtggaatgggacataatgtacggtattttgttttggcattctgac

SEQ ID NO: 83499 - DNA, 2185 bp, Heterodera glycines
atggccattcatcctcacttttggcctggggtcgtcgttcgacccctcgggggtcgtttggacgggtggtggaaaagtggtcggtcgaagagcgtccatttcgttgaaagcaaaacttggatgctttttatattacgggtggtgcccggggcaaaggaagcgaatgaggggggagagaaagaaatcactgataatggggacaaaaattgtcggaagacaattaattagttcattgataagtgagtgagtgaatgaacatgacccccccccccggactaattgggtaattgagaattaatatgatagagaataaaaaagaaaaacaataaataaacgaaattaataaatctgtttaattctcgatttggaaaaggcaatggaacaatttgggttaatcgttcgttaataactcaaagaattaaattgcagaaaattgtccgaatggcaaggccgtcgcaacgcattgatcatcaacggatttgtcaatgtttttgcggctctgctggagtatttgtccaagtcaatggcttcccccgagtttctgattttcggaaggctcattctcggcgcaaatatgggcctttctgtaggaataaaaaaaaacaaaatttaaattcgcttaatccgtttggcttttcgtttagacaggcctcgtgccgatgtatctaatggaaatcactccgacaaaatatcgcggcgctgccggcacatttcacatggttctgcaattgccattagcacttaacgaaggtcatttattctttaggttgcggttgccttctccgattggttttcgcttttactcggactgccggaagtgggcaaaacattcaaacaattttattttatttaaagttacttaattgactcattaaggtgttgggcagtgccgacaattggccattggcttttgctttccccggctttcccgcctttttgctttgtttggttttgcctttctgtccggagagtcccaaatacacacttttcgcaagagggtaattagtgctaatttatttatcattttaaatgaaaaattttgaaattttagtgagcatgctaaagccatggaggacttgaagaaattggtggacgaagacgaggctgaatttatgtacgaatcgctgcaaagcgaagcagcactcatgcaagtgggcaatttattattaattgacataaatatggcaataattaaaataataaattaattcatggttaattagtatatatatacaaatgtgccttttaaatgacattaattatcatattaataaatattctttttttgaggatggctcctgctgcactttccgccaaattttcttcgaacgccaattccgcctgccccttctgatcaccatcgtggtgatggtcacccaacagttcaccggctgttccgccgtgttcgcctattccactgatatgttcatcgacgccgggctcgacccgtaagtccattttaattattattataataaataatttttaaattatttggcatttttcagacgaaccgcgcgcttcagcactttggccgttggcgttgcttattttctgttcgcgtgcagtgcgcccattctgatcgaacaagttggacgccgtattttgctgattgtacgtgcccaatttatgattcattttattatttattactatgttttttaagggtcaattggcaatgtgttcggtttctttgttctttttgagcatttttgtcgcacttcaacacgccgtttgggtaaagcaatgtttttaaggatataaccgaaatggttatgaaattaaaattcaattaaagaaaaaaggaaataatatccaaacgtataggcgaataaaataacattttaaacttttaactatttttattttagaaatcataattatttcaaatattttaaatttatttccaactcaaattgtttttcttcccaatttcagcaaaacttcgccagttacgccaccatcgccgctctgatcgtttatatgtgtgcctatggcgtcggttgtgccattccgtggctaatttccagtgaaattttccccaccaaatttcgcgctgctgctgtgactggtgaaaatattatatatttttttaaattttattttttaatttaattaagtcgctgttacggtcgcttggtcattgtcttttgtcgtctccacgtgctatttgccattccaacaa

SEQ ID NO: 83500 - DNA, 384 bp, Heterodera glycines
atggcaccgatggcaatgctggagaccacaaaggaccagtacaggttcatctccgtcagattcagtcccggccctccgccgttcctccgaatgtaagtcatgttaatccattgggtgagcagttctgttatatggaaaaagcgcttaatttaatggtttttgaaattgaacttctcctaaccctgctcggggttgatgatgccaaagctgtagaattgggtgctggccccaaggcaaacggtggcgacggaaacgaaataagtgggcgtgaacattttaatataaaagtgtcaaaataaagctaaaaatataaattgaaataaaattgttagcatcaaagatcagcagacgatcagccaaaacatttggggagaaaagagaaaa

SEQ ID NO: 83501 - DNA, 304 bp, Heterodera glycines
atgacctatgaaaacggaaaagtgagcaaagttcgttttgatagttttgtgctttttaattcacaaaaaaggtaataattaattaaaaagataattttttttgcattttaattcttagattgtcatgtgccaaatttaaaactaaatctcattctttattctttcgttttaacataaattccaactcttgtatttttggtaactcggaattcctatattcatttaaaacaattttttgtcttgtttttagtgtcgttgttttttgtattatttttatatattaaattataaaattaacaaaaaa

SEQ ID NO: 83502 - DNA, 450 bp, Heterodera glycines
atggtctgtccgtcgtttgcactgcgcccgccgattttcttttcaccactgttgccgacccaaaacggcacttggaagcaagccaactgttgggctctgcactcccggcacgttcgctagccaatgctttcactttttttggcattttcatctaatcacttttgtttttgtttgtcttttagtccactgcaagcaccgatttgatcgctaacactttggctgatcaactccgtgccttcatgtccgattttggctgtcccaatgggttggccaaaatgggcttcgatcggcgtgacacggactcgttggcaaatgccgcgctcaactctttccgatcaaacccaatctcgccccgggaaaccaacttcgactcaatcgcgagcatttacgaacagtctctcaacgtgtactgatcaattattgggctgataaaaaaaaatactcaataaa

SEQ ID NO: 83503 - DNA, 884 bp, Heterodera glycines
atgacctattggcattttggattaattattctgccaggcgctgccatcatcgacattcccgagaagcagtgcaaggcgggcattcgcctccgctgcataaaaccgtttttggccatcattgacccgttgaatgtgaagagtatgccacggtgttaattaagcattttgttgcttaattggccattttttatcatttagaaatgtggccgtttacagcggcttcgacgttttatgccacgcgctcgaatcgtacacggcgaagccgtacaaaatggtcagttattccattgtaatacaataccctaaccgtagccaaagagaactgctgctgaatatgtggggaacatcaacaaactttggtaaaattgaaaaatattgagatagagaagaaacttgttcgaaaggaagattaattggaccaattgaggtgatgctcctattgtatttgatcgagcaaattggggaactcgagaggacagagtcggtggttcagctggtagaacattgatccagaaagcacagagactccggttcaaagccggaccgtccaatatttcattcaaaaacttctccagctcgttcatatattatcttagtgtttaatttataataaataggcaccgccttccaattgttttttaagatcatcttaaaaacaatgcggggttttttaaaccaactttgaacctgaatttctttctttttatccacagtcatggtcaattgtttagttttttcagctgatcattttaattttgatcactttttggctattttgtgcagcgatcgcctcgccctctccgccccgacgctcgtcccctctaccaagggtccaacccggtcagcgatgtgtgggttcgtgaagcattgcgcgtcatcgagaa

SEQ ID NO: 83504 - DNA, 699 bp, Heterodera glycines
atggcatcaatagcaaactcaacaaagctcacaattggctcatttaaaactgtgccactgatgatttctccttttgttacgcgatttggtgtcggtggtttctgtgctccaaatttggcaattgccaatttgacagtgaggaaaagcttcgcgagctgcgcttttcccccgggtaattattgtaattagtgaatgcaaaacgatggactgacatttgtaatgcatattaataattaatttttaataatgattaatttaatttaataattttttcagctgaatgtgaagacgttgactacgcttttgaaatgatgagctcaactttgcgctgtggcaacggcgtgaccagcgaaattggcttcgatgtgcaaaatttgggctccaaaaatgcactaattgtaacagacaaaaatgtcaccaaaacgagggcatttaagtaaatattttttatgataaaaatatatttttaattttatatattatataaccaaattatcatccaatattaattagttgcgtgtagttactctcggcaaattaatgattaattaataagcttgtccattaattagggaagtcgccgcttcgttcgcccgtctccgtttgtctttcgctgtgtttgatgaagtcaaatgcgaaccatcgcaacaaagtgatttcatgcgtgtttaactgtttttctgatgccaacccattaaa

SEQ ID NO: 83505 - DNA, 66 bp, Heterodera glycines
atgaattttctttgcttttatttttgtgttctttttacttttcttgtttttatggtgttttatgag

SEQ ID NO: 83506 - DNA, 1288 bp, Heterodera glycines
atgcttcgaaaaatttttgtctattttttaattttgattattacttttttggggcaaattgcaatgaaaaatgaagcgttttcaataacttatgctggcgaagtgacacctcctggcaattataaaattgttatttgggatgaaataagcaaaaatactgcagcaaaatgttacttcattttgaaaaatataacgacaaaagtaataaataatatttctataataaacattctttaaagtatggatataataaatttaattttattgtaatatctaattaattaatcaaccaattaattttaaaggcctataaatttaattacatcacgcaaagatacgctgttaaggaaattaaagtgccatttttcaaatatgagaatggaattgttttggagaatttaagcgattgttttgttcatttttacacaatccaaacaaatggagatggcgaatttgagatcaaaatgtcaagcaatgttcaagacttaattaatgttcacatatttccacttgacaaacaagtggtaaattaaaatttaattatttataaaaaataaaagtaaattttaatttaagaatttgatttcttccacaaacgaatcaggcaccattctacaaaacaaaatgaaaagagagaaatggaagcatttgtatggccacaaagaagttctattcatgttccattttttggaatatcagcaaagagtaaacgaatggttggacaattggctaatacaaaatgccgtgccaacggaggaagaagcatttttcatcaaagcattttttcgttatgtcaccgaaatatttgtagaacgattcaccaaattgtcaacaatttaccgaaatcaattgaatgtgttgggatattacggaacaacattgcttaattaccttctcactaatggtgaaatgaatttggcccaaaaattggcccaaatcaatggcatgccaaatttagtcaaatatttttgccaatttttgggctatggtttaatgaaagatgcagacccaagcgaaaatgatatcaaaattgagctgccagcagaatggaaaatattctgcaaaaaatacatggacaaaaatgtacgagcaaaatcgttgtttatttcggaatttcgggctgaaaccgagtgaaatttctcagattttttgatgtcgaaatcaaaaaagagttttaggaaagaaaaaagctttgcaaaaaattcgaaattggaaatgtttgtactagcacttgtattcctcgttgtacctgtacacttattttttatgcaaaatttagaaaaataaa

SEQ ID NO: 83507 - DNA, 749 bp, Heterodera glycines
agattagaagaggtacaacagtgattagaagaggtacaacagtgattagaagaggtacaacagtgattagaataggtacaaaagtgattaaaagaggtacaacagtgattaaaagaggtacaaaagtgattagaagaagtacaaaagcgattagaaaaggtacaacagtgattaaaagaggtacaaaagtgattagaagaggtacaacagtgattagaagaggtacaaaagtgattaaaagaggtacaacagtgattaaaagaggtacaaaagtgattagaaaggtacaacagtgattagaagaggtacaaaagtgattagaagaggtacaacagtgattagaagaggtacaaaagtgattagaagaagtacaaaagcgattagaaaaggtacaacagtgattaaaagaagtacaaaagcgattagaaaaggtacaacagtgattagaagaggtacaaaagtgattaaaagaggtacaacagtgattagaaaaggtacaacagtgattaaaagaggtacaaaagtgattagaagaggtacaacagtgattagaagaggtacaaaagtgattaaaagaggtacaacagtgattaaaagaggtacaaaagtgattagaaaggtacaacagtgattagaagaggtacaaaagtctaacttgttatgagatgtacaaaaataatttcataattttaaatataattttatagaattaggtttatttaaaaattttaaaaaaacaaaataataaa

SEQ ID NO: 83508 - DNA, 1177 bp, Heterodera glycines
atgccaaaaaagaaggaaagtgaaaaggaaattaaaaggaggcaagcgacccggtggtcaagtggttagtgtgcttgcctttggtcatggggtgttgtgggttcgagtcccatttcttctgattattttaaagcaaatattatattgaaattattctaatttttgttttttaaatttattttttttattaattaactttatgttattttaaattaatgataatgattttttgaattaataaaataataaatatttttaattaatagaataataaagtctaaattaaatattaaaattaattgaataaaaattaaaaataaacaaatattaataaaaatttaaataatttataaatctcaaaatgagttaattttaggattagacgaatccgggtatttgggcaaaactgggtccggatatttccgggtccagcaaagccgggtccgggtccaagtttttaaaccgggtacgggaggaacagaaagtggaagaggaacagaaagtggaaaggaacagaaagtggaagagaaagtggaagaggaacaaaagtggaagaggaacagaacgtggaagagaaacagaacgtggaagagaaagtgtaagaggaacagaaagtggaagagaaagtggaagaggaacagaaagcggaagagaagaagaggaacagaaagtgtaagaggaacagaaatggaagaggaacagaaagcggaagagaagaagaggaacagaaagtggaagagaaacagaaagtggaagagaaacagaaagtggaagaggaacagaaagcggaagagaaagtggaagaggaacagaaagtggaagaggaacagaaagtggaagaggaccagaaagtggaagagaaacagaacgtggaagagaaagtgtaagcggaacagaaagcggaagagaaagtggaagaggaacagaaagcggaagagaaagtggaagaggaacagaaaatggaagagaaagtgtaagaggaacagaaagcggaagagaaagtggaagaggaacagaaagcggaagagaagaagaggaacagaaagtggaagagaaacagaaagtggaagagaaacagaaagtggaagagaaagtggaagaggaacagaaagtggaagagaaagtggaagaggaacagaacgttgaagagaaacagaacgtggaagagaaagtgtaa

SEQ ID NO: 83509 - DNA, 377 bp, Heterodera glycines
  unsure (1)..(377): unsure at all n locations
gcctgccggttctcggcacagcaaagcactaatacggtgtttgactcacttcaaaaaataattcattacccaaaagttttttacaaccacatattgccaatctaatttcttgcagattgaaagccatccattgcataccggttctcggcacagcaaagcactaatagggtgtttgactcacttcaaaaaataattcattacccaaaagttttttacaaccacttattgccaatctaatttcttgcagatttaaagctatccattgcctgccggttctcggcacagcaaagcactaatagggtgtttgactcacttcaaaaaataattccatacccaaaagttttttacaaccacatattngccatctaatttcttgc

SEQ ID NO: 83510 - DNA, 535 bp, Heterodera glycines
atggttttagtcttggaaaaacattttggtatcttattgttatgcaggaggcgggagttagtagattgaaaatgccaattgcataaaattactaatttgccatttctatcgattatttttacttttcgaaccttatattaattaattttctttaaaaattatttggccttataatatataaaattaattatataaataatttataatgaaagctaaggtaatatttcatagttttagtaaatgttttttttattactttttgataatcagcagcttaatgttttaggttgaacctttataatatttaagtaattttaagatttcttattttcagattacagaattaacaacaatttttctcggcgcaaataacacacaaattgaaattttacttgaattaaaatattttgcttttattattataaataattttgagataaactcactacctgtctgtatttgcgcacttgcgccttcattaaacacgaactttagcattgtaaattaatttacaattaattttaaaaccaaaaaa

SEQ ID NO: 83511 - DNA, 1444 bp, Heterodera glycines
atggaagaaggacaaatggaaaccggagaaaatgctgcagttaaactcgtggatcaaaagaagtcggctaaaaagaaagtgcgtataaaacgaagaatttaatcgctatcggttatcacttaacaggtttatgtgccggggaattagccgaattttgaaggcgagcgaagaattggtatacgatgagaaggcgtatttgttgtttcacacattcgaaacgagtgagtggtcacttttggggtgtgccctaagcctagtatttgtgcaattcgttcattttcgtatttattttagactatccgtgtttaagttttgatgttttgcccgactctttgggcgacaatcgctccgattttccaatgaccgcttggcttgctgctggtactcaggttcattttgtgaaatgtttaattccaaaaatcttttttaggctgaccgagcaaaggacaacgaattgctggtgcttagactgtcgaatttgcacgcaaatgaaaagacattggaaaatgcaaagaaaatggcccaaggaaagggcgacgagtcggagagcagcagcagcgaagacgacgaggaggaggaggagacggagggcggcgcaaagagtgcgcggatgcacgcggcagtgatccctcaccacgggggcatcaatcggatgaaggcgagcggagggactgacagaacgggcgaaaaagacggcgggggggggggggggggtaaaatggcacatttttgccactaaccttagaaaataaattctaatggagtcgaaggtgataccgaaaaagtttgtagattttttgcgggagaatatctccttccttctttgcatggcatctgtaaaggagtccaatttttgcaatttatccggtcgtgagttacaataaattggtcacagtcaaaactcaatccggtaatctccgactttttttttgtcagtgccaaacaattggggctagcaatgtgtgcgccgtgtggaatgaccagcagaaagtgcagttgtggaacttggacccggccattgaaacagtgaaatccattggtacggaaagtccgtcgaaagtgcaaaaaatggagaaagacgcggtcaaacaaaatttgttgtttacctttgccggacactccgccgagggatttgcactcgcatggtctccgattcgtctcggcacacttgcttcaggggacctccgcaacaaagtgagtgatcggttggcttttcagaaattatggcaaacatttcgagaatttcatttcgccggcaaaacacaaaaagaaaactgaataatgttgtttgcagatatttctttggagaatgtcggagggcggccaatggttggtcgaccaacgtcctttggcagaacaccaaagttctgtcgaagatttgggtaattcgccatcggtggccaagcaaaagaattcgtttattcctctctttctgctaatttag

SEQ ID NO: 83512 - DNA, 91 bp, Heterodera glycines
ttgattgttttgaaaacgtggaagccgtccaacgcagtggaaaatgccaacccagggcactgtttgtgccaatgaacttccttcacttctg

SEQ ID NO: 83513 - DNA, 446 bp, Heterodera glycines
atgagttggcttaaaatcatcgaggaggaggaggagcgggcgagggaattgcaaaatgatcaaatggaactggaacaagtgaaaggtttatttagttatttttagacattaaaaacagttttttaaatttagacaacattgagttgccaaagcacccgcaaccacaaaacaagtgcagttgcaatgaaaagcagaagagtgtgccgttgattgattttctctgcaaacactacaaatgttcaatgaatgagcttcacgttctgctgcagacgctgagcaaacgtagagaaatttcggaaatgttgcgttccaatcttcatttacgcaccaatcatctgcgccctgcctggaaaaacattcgcgtccattgcaacgaactaacaattcatccagctcaaactgcatatgctatgcgcggttatcttggcattacggtttgtctttga

SEQ ID NO: 83514 - DNA, 1135 bp, Heterodera glycines
atggcagacaattttcaaaaatttgatgaaaaacacttacaactcagacacccgtttacgctgacaatctcagggagcacggggagtggaaaatcggaatgggtgctacgaatgctgaggaatgtgaatgcgctagtttcggaacccatctcggagattttctactgttatggggagttgaatccaaatataatacagcttcagaaaagtggacacatcggcggttgtagggttattgtacatgctggaagcccaaccgaagagcaggttaatcggcgcgcaaaagagtgtgatggaaaactgttgatggtgttggatgatctcatggttggattgggccaacaatttcttgacactgtgttcacccggggatcgcacaattggggggtcagcgttgtgttggtcactcaacatttgttcgcaaaagaactgcgggttgcgcgcaacaactcccactatttggtgctgatgcgtaacccggcgggcgcgctccaagtgcggacgctcgcctctcagctatttccaacgaaaagcaactatttcacggaagcataccgggatgcaactgaaaagcaatttggctacctactaatcgacatgcagcccgagagtccggaattgttgcgcctgaaaacgaatatatatggagagcagggtggtcttcccccattggtttatgttgcaaaatgaagcatgtcaaaagaagaagactaacagataaacatactatgaatgttagcccgctgatgttgaaaaatgctgacttcttacaccactttcgctcaaaatatcgctcaaaaagcagacagcgcaaaatgatagagaacgctttggatgagcagttgctctgttttgtggagatgggtttcaatgtgttgaagggtcgtgttccgttagggaagcgacaaattcaacggttgggtgcattgaagcaccagttgaggcgcttagcacgcgcacgttgcgcaaaaaccgcgcgcagagtactattattgaatcgtcaagaccaacaagtacaacaacaacaccaaaccggtgctggctttccggtggtagccagtatgctgacgagcattctcttaccaatgttaatggacaaattactgccaaaaactaattgataaatagataaaaa

SEQ ID NO: 83515 - DNA, 908 bp, Heterodera glycines
atgcgtcacgcaatgcgaatgtttctcgtcccggaggacgtctttcagtcggtatttgttcaaccccaagcagcagcagcagaatcagacggtgccgacggtacaccaattgggcttttgcgctcacgcatccaacaaattgagcgtagcagggagctgaacgaagagcagaaggccgcgcaataccatcaggaattcaaacggctcaacaaactggtgcgcgagcaggaggagcagccgatcaatgttcgacttcagcacgaaaaggagaaagaaaaaaattcagcaacgccgccgccgccgccgccgcaaacgatcgatcattcaacgccaaaaagattggagaaaaacattgtaccatcagcgtttgggttgaggaggcagagacaccactacacacaaaaggcgggggcattatcaaatcgcagacctgcccaaaaacaacaaagaaaagcagcagcagcagcagaaacaccaaacagcagtggaaatggagaaacggaaaaagaagagggtgatgtagatgatggggaacagtgggacgatgcacaatcatcatcgtccacggcgtcaacaggtggtgccgcagcaaaaagagtgctcagagcaagagatggggaagcaggaaaaggaggaggaggagaaacggctgatcgccttcaaacaaaacacaactaccagatgaccaaaaatgcactgatcacacacattcgaaaaaaggggcacagtctgggagtcagtgatcagggaaaggttttgcgcgcagatgggtccgagtttaaaacgagcaacgtggaggcaattgtcagccatttgttgaacagggacaagcgaagcgaattcaaagggccgcctgtgggctataaggaatttgctgaaaaggcaagagaggatccgttgctaaaaaa

SEQ ID NO: 83516 - DNA, 1613 bp, Heterodera glycines
atgtctgacaatccgaaagaagctaataaagaaatggaaaaagcgatgtaaatattctaaatttgtattcccatgctaatcattttccgttttcagcttcatcgctgccgactgttggttggaggtgttcgatttgcttccgccatctcaacttggcctcggaattgcgatgatcagtcaccgatttgactatttcgttgacgaacatttcaaaacgcgcaaatggaaattgggcaaaatgaaaattcgacgcaaaattggacagaatggcgcaaatgaaatgaaaattgtcaattccgatggaaaagaattgccaatcccacaaaatccgttgccgaacaaagtcatcggattcggaagcatttttatcctgtaaaaaaaaaatgaatttttgtaatgatttgtgccaatcacaatttcatttaattttcagcttcatcgaccaaaatgtgctcacttttcttggccattttcaccgttttttcgccatttgtgcaacgtcattgaccattggcactgaaaatgttcgaatttcggagttccttctgctcaccatttggccaatgctcaagcacaccattcgcgacatgattttgaaccccatcactcttcgtcaaatccgccaattggtcccgtcaatgctcaacgattgcccagcccttcgtattgttggtttggctggtgtcggaattttgcccgaatttccgcccgacgacagtgccaatgcgtcggatggccaagcggtggccaaatggctgttctcgcctcgtcccgacaatttgatgaaggtgctgtatgtcagaattgagaattcagcggtggaccagtggttatctatggtggagcgaatcaaagcggtattattgattgactactaatatttctttttattttattttaattttttgtcttcgttttaggccttttccgctgcttcttctcctgtttatttcgccatttctgttttaattccgccgtcctcttcactttctttcgctgtgccatttaaactgaccaacgaattctccggggagacattggcacttttacaaaaagatgcaaattgttttgtgttcatccgttgtccaattttgcccgatgagagacagcagacgattaaggaattgggtgaacgatggaaccgaattgacatttggatcggagacgacggattcggcgatgggtgattaatagagatcggaattttaggcaccaaaatttttaaaataagcacgaaaaaagtaagtaaaggtataaaaaatgaacaaaaaggcagcaaaaactaacattttttggacatttaaaaaattattttattaatgatttttagggagcaaaacaaaaacaacaacttagttttgtcattttaatgattataattaaacatattataaattcgaataacgaaaatttttaattttaaaatttttatctataaaaaaaaattgattttgcgaaattttttgtacaaaattttcaattcttaggggtgcatttctgaaattttttcgagtcatttcttaggggtttcccaattttgtttcatttttaatggaatttttcggtaaaaaaaagccaaaaaacgcatttaaatcccgaaaaggcataataaa

SEQ ID NO: 83517 - DNA, 639 bp, Heterodera glycines
atgactttatactcctccgttatctttttgctgccagttcaatttctgctcgttgtcatcggcgctgtgttcatcatcctcagccaatgctgtggtggcggttcgaagaagaaaaaggtgccagtttttgacccctccctattcacaaatgaaacgctccctttttttcagaaagccggagcagcaccgacgccaacgccatcaatatcggcgagcgtaggatcggaagcgccgtcgtcactgaaaacgcaagagaaaagcgcaagcgccagctcaaaaacaggtggacgaaacaacgaacgatttagggatgagaagaaaaaaatttgtcaactttaagcaccaccagcgaagaaaggcgccgttgcacaaaaaaaaggaccgactgaagcaaaggcagggaaagcgaccgatgaaaagacagtgaccacaaaaaagaaagaaaagtcgagcaaatcagcgaaaggaaaaccgacgagcaaaccaaagccagagcgaactgagccttcagttaaagaagattctaagccggttgcagcggagaaaggagttgaagtgccgcattccatgatgtcgaaaggagactcagttgtcgatgaggaagacgaggtgggctacaccaccaccactgatgtgtaa

SEQ ID NO: 83518 - DNA, 751 bp, Heterodera glycines
atgcccaaaaagtacaaaaaagcgaaaaaggacaaagttggtcctgcccttcctcctgctcctcccccgtctgtcgaaccaccggccgcggccattcagtacgaggatttgacctctgatgaggatttggactcaaaagacgccggaggcaccgccacttctcaccttgttgatcagcagatggagtcgcttttggcactttcacccgaaaacagcggcgttttgctggcactttctcccgattcggttgatcgcctacttgaagaccaaaatgccggagaggtgaaacaaaatccagaaaaaataatgaaaataattgttaagtctgtgccaataacagcggagtccaatgaaaaggccctcgagtcgacagttttgaatgaggaagacgaatttgtccaagcaaattcgggcgaaaatgacaaaacgaatttggaaattgtcaaaattgtgagtccgcttgaaaccatgggggcgctaattggggtcatttcccaaaaggatgatgaatcggtcgagaaagggcctcaaggttcttctgaaaaggcaaatgccggagagatggaagtggaaggaaatgaaaaggccctcgggtcatcagttctgagtgtggaagtccaaatggacccaaaaccaatggcaaattctgaccaagtcgagaatgagaatgagaaagcggataaaggcgagaatgagcaattttcaaaggaaaattctcgcgaatcagatgaagaggaaaatttcggtggtg

SEQ ID NO: 83519 - DNA, 591 bp, Heterodera glycines
atggctaaggagaaaatttccactaaaaaaaggacccttcgtcttacaacccctttggcgaaggagcgcctacagcgattgcgttttgaaccttttcctgaccaatacgacttaattggattatcgaaaaaaatttatgacgcactacgcggtgcattctttactgatttaccccatgtaaaagtcgtcacttttaaattattggacgcttccgcgcccgcgagcaaagaaatttgggctctaagctcctgggacaaaatcccgtaaattatgagtttatatctaattttttttttaataataaaataaatcaggattgtgatcgagattcacccggagcagggtgattgtgaacagcttgttgcgatgctggcacatgaaatgtgccacggagtgacaagcaaagaatcgcgcgaaaatcgtccgtattcggcgaaagaaaaggccgagcggttcgaccaatgggtgggaataaatcttacaaaaacaaaaaaaaaattcataaaattattttaaaggccaaattggtgcaccaaacactcgggatcgatccctggcgcaaatgcgacaaaccgtaaattaaattattaa

SEQ ID NO: 83520 - DNA, 2392 bp, Heterodera glycines
atgaatttcctaggctttactctgacaaatgcgggttataaaccatcattgagcagaattgaaattgttcaaaatgaaccaatccccagaaatgtaaaagaagttaaacgtttcttagggaaagccgggttttaccgtcggcatatcgaaaatttttctactattgcagaaccactcttaagtctctcgaggcaatcagtcaagtttgaatggtgagaagcacaacaaaattcatttgacaaattaaaagaattattaggacaaactccaaatttaatttttccaaattataacgagccttttcatatctttacggatgcatctacaacgggattaggaggagtcctaatgcaacaaaacaaaaagttgggaacattttcggcaatttcttactgtagtcgcaccctatcggcacctgagagacgatggccagcagtccaaatagaaatgtgtgcaattatttatgatcttagggaatttcgcccttttatttttatgagtgatatagaattgcacactgaccataagcctttggcatttttactcaaaaaatcagaaacacaccctcatttggctcgatggctaattgagcttcaaaattatcagataaaaattgtacacgttgctggaaaacagaattctttagctgatgcactttctcgtgcagctgaagattcgcccatccaagaaatcgagaacctttcagaaatggaggacataattgagttcccggtgtgtctttccctacgagcacaccctcgtttggtattggatgaatttgtcaacacgatgaccctcagacacgaggatggtaattcctatcaaattgatttgagtaaagaacagaaaaatgatccagaaatattggcattcattgaatttttaacaaatggcaatatgccaccagacttttcggaaaatgaaaaagaccgattttcagccctgtgtttaaatttagtttacgaatcagaggtactttattttaaaacaccctcatcaagtacacgaatttttgtaccaatttcgttaagggccttaattttcgaatcgttccatacatctccattgggaggaggtcacatgaacataaaaaagacactacggaaatgcaaaaaatatttttggcccaaaatgcattctgatatcgtctcatggacacgtcaatgtattacatgccaacttaggcataatcccacccctgcatatcgtgctgaaatgcaactcgcacctagcaataccctttttgcgaaagtcggcttagatttggcaggtccatttccaaccacatcgcgtggaaacaaacatattttgaatataatttgttggttttcgaaatatgtaatatctgttccaattccggatgccaaagcaaagactattgcaaaagcttttctttcaaattgttacttaaaatttggaggttgtactgagctcattagtgacaatgccactgcttttacctcagaattttttaaggaattttgtagtatgttatacataaacaaaacttatgcaattccccactggtcacagggtaatgcggtaacagaaaggtcatttcgtacatttcataatattttatcaaaatacattaccaaagaggaccctgattttgacgagtttttagactttgcatccttttgttataacacttcttgtcattcatccacatccgaatccccgttttttccttgtttttggtcgggacccaattttctgtgtagaccaaatattggatgctcgcattcacagtcaagtccaacaagcggaggaaaccgatttcaaacaaaaattagtcagctcattaagaaaagcatggaaaagtgcagccgatgccaatgaagcagctcagcagaaaataaaagagcaatatgaccgaacagttagacaacctcaaatttgtgtaggagaccgagttttattaagaaattatgcaggtaaagttggaacttctaagaaatttcatctgccttggaagggcatttttagagtgatagaaattgatggcatatatgccactatcgttagctgcatttcgccacaacaaaacccgaaaagagttcacttaaatcaaattaaaaaatgtttcgaaaactttggtcctaattgcaccttgccaaaattaccaatcgacgaggaagagagtcttgataaaatgcatgcaacaaatttggacaatttccctggtcacaatcattttcccaggactaacagacaacctagtaaaaatcctgaacaggaaaatgattcgcaaaatttggccgaaaaaacggattgccaagaagaagatggaaataattcattagacgaatcaattaagcccaaaaagagaccggagtatgccttgagagaccgaaaacgcctaaatcttccatcacgctttagagaataa

SEQ ID NO: 83521 - DNA, 2680 bp, Heterodera glycines
  unsure (1)..(2680): unsure at all n locations
atggcaggggaagtaaacacgaatatgggagttttaaatgctaaaattgatacacttgctgaaattgtcaaacccaaaataacaccaaaccaaacttctcatgttcgttttaattcttgcaataatgccaatttaagccaagacaacgaggaatatcttgatccgtttgcggaagacagttttgaacttggcagagttaacactttaaccggaatgattggtcacttagaggtatttggtgaagattcggtgatcgcttttgatgaatgggctgagtggtttactgattatgttggagctgtaggacgaaattggaatgaggatgagaaagttgctcgatttaaaatgtcattaattgggacaccaagacaactttttaaacaattaatccaagcggaggcagctgcccttaactcagcgatcactgggattaggcaaaaattggactcaccccaaagacggcaacttactaaaaggacattggcactttgcaaacagagagaaaacgaaactgtttcagaattccttaagcgccttaccccgcttgttgaaatgacaaacccaacattgaatgataatcaaagaaaagagaggacttgtgaagaatttttggatagaattaaacccaatattggatttttgcttcgtttagtcggtctcaattcgaccaaagacttagaccgaataaaggcacaggccgaggagcttgaggctctgctcttaactgaaaaaggacaaatctcggataatttggcacacactgttcatgcacttagtggacaacggttcggaaaccgacagactgaacaaaacagagaatccaattatcggggaccaccttttgtttcggaagctaatgcgacaccactcaatgaccgttttgccccgcgtaatttcgacaataacaacagaaataacaacggcaataataataaccgaacacaattcaggcgtaaccagagaccgaacgacagaaggccaaattctcaacaaatccaaagccagcggaggtggagtaacagaccaatttgtaatttctgtggcaaacttggacatattgcaaacttttgtcgcaacagacggtctcaatttatcaacaatagacctgacccacaaccaaacagaggcagaaatgggcgcaatgctaattatggcactgtcaattcagttgatgctatcccatcaaatgtttctgtcctcgattctgaccaattataccaacagcccttgggcaattcagtcaaaagagaagatgctaatgcattgaatgcaattacaactgttaaaagtaaaccaaaaatcgagcccaaaggagttatgaatgactcagaaaactgcgaaattccagtcattgattcaaaaaatatcaaaccaccttcaccccaattaaaagcttcaagctgggagggtattggaccaaaactcacgaaatttttaatgctccttttctttattgttatcatcaaatgtgtaccggtctcagtagaggcatcatttgatgtcccaattccaaaaaacccaatgatgtgccaaactcaaattgaaggaacggtttggtctcttccatcacctactcaatgtcccactcctcttttcaatcaaccgaagggctcacgaaaacaaaccatttggctttataaaccaaatgcctttcagtatgaggtagaagcttgggcgtgccgaaaagttcgtaaaaatattcaaaaacacacttccctcacaaatattcccataattgagaaactagactccgaaatgttaagcatggacagagaagaatgccaacagatgattaaccaccaaaagtgcagttttggcacacttaaacaggaaggtgaactatttcacactgacaataaaatcgatatgtctcctcgggtttggctcttcggatcattcagttggatgaaggcaagcagtgaaaattgctacctatttaaaacgagaataattaataagttcgggagcccatcaattcaaaactcaattggagactccaatcactgctcatttgagaaaggtcaatgtttcttagaagacaaaacattactcctttggaattcctcaatttcgaaaaaatgtgagtatttgccgctaggtccattcaaaggacaaatgcttggcactatatttattgcagacaatgacccaattcttttaacttttgaggaaaaaccaaaaattataaaagcatgtaatacaaatttaactctctctcaccaaggttatgcctttatcaacaaaacgacaaaacgaaaacgcaccagacgagcccaagaaagcattgtgaccgactcacagcttcagacagaactttcctatttgagttggcaaatgactgaagctcttcgcttttcatttgtccaagctttctttgctatctgtgagcacatacatgagatgaaattatgggccttgtcgtccgccttgtcagaaccaacaattcttgctcgaatcttgttcaacacatcccttgtctatgccaaaaatttaggaccaggaataatcaaagtttggccatgtgtcgaacttaaaaaagacgattttaattttgttcctcttgnggatgccagtcaagaaaataaatgttttgaaaatgtgccaatagcattcaagtctgatggggttgaacatatggcattcatagctgctanaaacatggaagtagtggcacactcgc

SEQ ID NO: 83522 - DNA, 644 bp, Heterodera glycines
gagttaaatttgtattacatgcttttataatttttggtttttcctcaaaagttaaaagaattgggtcattgtctgcaataaatatagtgccaagcatttgtcctttgaatggacctagcggcaaatactcacattttttcgaaattgaggaattccaaaggagtaatgttttgtcttctaagaaacattgacctttctcaaatgagcagtgattggagtctccaattgagttttgaattgatgggctcccgaacttattaattattctcgttttaaataggtagcaattttcactgcttgccttcatccaactgaatgatccgaagagccaaacccgaggagacatatcgattttattgtcagtgtgaaatagttcaccttcctgtttaagtgtgccaaaactgcacttttggtggttaatcatctgttggcattcttctctgtccatgcttaacatttcggagtctagtttctcaattatgggaatatttgtgagggaagtgtgtttttgaatatttttacgaacttttcggcacgcccaagcttctacctcatactgaaaggcatttggtttataaagccaaatggtttgttttcgtgagcccttcggttgattgaaaagaggagtgggacattgagtaggt

SEQ ID NO: 83523 - DNA, 612 bp, Heterodera glycines
caattaatgacattttaaatcgagcaactttctcatcctcattccaatttcgtcctacagctccaacataatcagtaaaccactcagcccattcatcaaaagcgatcaccgaatcttcaccaaatacctctaagtgaccaatcattccggttaaagtgttaactctgccaagttcaaaactgtcttccgcaaacggatcaagatattcctcgttgtcttggcttaaattggcattattgcaagaattaaaacgaacatgagaagtttggtttggtgttattttgggtttgacaatttcagcaagtgtatcaattttagcatttaaaactcccatattcgtgtttacttcccctgccattttatttaaggcccttgtgtttgcatatgcccttcgatttacaattctaaatgatctatttacagcttcctctaggcgtagaacttctatgtgggctctttccaaatcgggaacctttaccgacgttttaccattccaaaaatttcggtcaatgattgttatgtttatttcttcatccctctcttgactggtggccctagagccagtcttttttgagtgtgacataagccacgaaaatgtgcactgattgctgt

SEQ ID NO: 83524 - DNA, 144 bp, Heterodera glycines
atggataaaagtgtgccgtgcaatgagcgcgctaaaggatatggaaaagaccaaaaacaacaacaacaacaaaacgccaaaaaagggaaaaattcaaaaagaaaacaaaaaggagctaagaaggaacacagaaggacaaggata

SEQ ID NO: 83525 - DNA, 467 bp, Heterodera glycines
atgtggctatttgtggtgggaaacattgggcgttcggcagtgggggatgggctaatccaattcgcaggccgttttcgtacgagcacaaattttttgggctataacttttttcttcgtcaactaattaggaagtgcaacttttttaagcagggcaggcaggcccgaaaggcatgcgagtctcaatttttcagaaaattctaattgaaaatttttcaaaaaaagtcattttatatgggtatcgaaattttcgtagtgcgatttaaaaaaaaatacaaaaatttaatatttaataattttttacagtgcaaggaattagataaaaaagcggtcggtgattttctaggaattctcagaaggatggacaagatacgaagcattatagggatagagcgcgctgattggctaccgcagtatgtttaaatgaaaataagagcaattaaattaaattaattattaaattaaataaa

SEQ ID NO: 83526 - DNA, 1170 bp, Heterodera glycines
atgatgattttggttaaaaaggttagtattaaatctaaatccaacatttaaaatatttgatttaaatctttcttattttgttattttattcttttaaatgtatatattcttgcattatatccttcaatattcataataaaataaattcgttgtaaattcattcattaaattaaatttcattaaattaattcttaaactcatcatttggatcaagtttttgttcaattttctcaatgatattttaatttaattgcattatttttcaaaaataacgtgcacatatatttatccaataaaattcttttagaaatttaaatgtttttttcctaaaagcaaattttttgttatataaattgcatttttatttactattttagatttaattttctgtcaccaaaatatttaagaaattgctttgaatcgtcgcaaaaattttcacttttaatttgaaaatttatttgtgctttttgaactcacataaaaatttgaaaatttcttgtaaaattagcagcccaacccaatactttaagttaatcttggtcgtacttgagttttattttttgcgtcaataacattcttcaagtacaagaacatacacaaacaactttagaaattttctttacaaaattaaaaccaaccataaaacttctttacactttttttatattttattgattaccataaataaaaaataagctacgcaaaaaagcaaaaaagaattgaaaaagtgtgaaattacaataattttttaatgagactattaacttaatatatgtttatttgattaaaattacgaaatttgaaaataccaagtttagttttagtattagtcaacgttataaataataataatagaaatagaaatggtcaaataaacaaataataattaatattgaaaatctagaaattttcatccgaaaaaattgcaatattccgagaacttgaagaggaacagatattggcagaagaaagaggcgcgagggtcttctgcagaatgataaggattactaatgattttgatatgtaaccaaaaaaaaattacgatataatgtataaacatatagttttatattaaattacgataaacttataatcacaaaatttatggtatttattcgtgttcgaaattgaataatctaagcttttctagaacatacttataaaaataaa

SEQ ID NO: 83527 - DNA, 1173 bp, Heterodera glycines
atggtttttaagggaataactctgatttgtgaggtggtggcgcagagcgtgactgggcaatccgacagtaaaacacacaaaaacgatatttaaatgccatcgccgcatgggaccgattgtgccataatccagaagacggcattgtgtgcgagtaatggcaagaaaaagcttttatattcttcaaatgagcaaccatcatttatgaaatgccaaacttaaactaattagcaatgaaataatgttttagactacattcgcacttttttatttgcctattttccttttttctttatatggcacaatcggttcccttcagcgatggcttttcttatcttttcgtgtgatttactgtccgattgtccgggagccgtgcggaaggataaaaaaataaaaacaagaataattcaaaaaatgcatgttctaaatgtgttgttaatatacgcaaaaaaatctctaaattttgaaatttcaaagtcaaaatctcattgaaatgattgaaaatgtttttttctataaaaattattttaaattaaaaaagttaaaaatttttatttttttcctaccataaacttttttgttgttatttttttttgttgttgtattaaattaattgactcatttattaataaatttatatattataaagttaatttattttcgtagaaatttattatattatctttaaatttagttaaataattatatttttacgattttattttgtatattatttgaatacaattaattggtttttaaatttattcacgatgaaataaaaacaaaaaataaactgataaacaacccagaatttttagaaaaatatccaaaggaataaaaattcattaaatttaaatacttttttcattaatatttcccaacttaaattgtattttcgatttattttattaggcatatttttagagaaagaaaaaaactctcatcattaggttagttgagcccggagttttgaaagtaccgggcgggcccgtgacagggcttagacaattgaccgggtccgggccgtgacctaaattcccaaaaagtctatccttagaggtgtttctttcgctttttttgcgtttttcttgtgaaaatttccaaaaatttccaaaaatgtcataatatgcatttattcacgaaaaccccagaaatactcactttaagtaaaataaa

SEQ ID NO: 83528 - DNA, 952 bp, Heterodera glycines
atggccgaatttcgcgccgcagacaatttcgatggacttcgagttggcaatggtcggtgcggtccgaacagtgcttccggcatgcagtgtccgctactgtttttttcatcttgtccgcaacatgaagaggcagatcagaatccttggcctcacacatgtcaattgaatttttcagatgataaatttttttcttagtagtttaggcttacaacactgatcctgctttcgccgagaagtctaagatgatcacttcattggcctttctgcctgtgcaccaccttcaaaatagccttaatgttcttcaaggacaaattccaccacaacttaacggcgttttcaattggttaagtccgaaggcgaattttataattatttttatttttctaggtttttggacaactacatgggccgaatgcgtttcaatgttccaatggcggcgcctctgttccacccgcacgaatggaatgttcatcagcgcaccttagatggtgctgttcgtaccaacaacttcgccgaggcattccatcgcaaacttcagcggcaatttagctgcactcatccaacaatttggcgcttcattgacacgatcagatgtgagcagaaggcaattgacgcggacatttcacgttgtgtcatgggagaatccgctccacaaaagaaaaagaagtatcgcgaagccgacgcacggattctccgactcgtccaccgttataacgaaatcaataacattcacctccctcaaaatgatcacaattatgccaatgccaatgtgaatcccgaaaacattatcaattttctcactggtgtttcccgaaactatgaaatgcgaccttagtttgttctgaaatttgttattttttgttatatttttataaaattttaattattttttccgtttgatgcacatccgaccaaactgacaaattattgtagaagatactagccgcaagaa

SEQ ID NO: 83529 - DNA, 134 bp, Heterodera glycines
atgccggaagcactgttcggaccgcaccgaccattgccaactcgaagtccatcgaaattgtctgcggcgcgaaattcggccatcgttccaaaagaagctgtaacatacgcgtataaattgcggcacacttcgat

SEQ ID NO: 83530 - DNA, 103 bp, Heterodera glycines
ttcttgactttttaatttttttatttcttgcggctagtatcttctacaataatttgtcagtttggtcggatgtgcatcaaacggaaaaaataattaaaatttt

SEQ ID NO: 83531 - DNA, 55 bp, Heterodera glycines
gaaaatattttaacgcagaaatgcgttttttgagctcctttcttcaaaacaattg

SEQ ID NO: 83532 - DNA, 111 bp, Heterodera glycines
atggcacattggcaaaggcaccgaagtgcacgaaaacatcaccgcttcgctgaggggccaattgaattctgtccaaagtgtcgaaatgcattttccgatatgccattcaaa

SEQ ID NO: 83533 - DNA, 368 bp, Heterodera glycines
atgttagcaatgtttgacctgataaatgccatagacaatcaacaggctattcagaaaaatgaaagaaacaacagcagacaaaaccccaaacgtaaaaataaggaactcggacatagttagctaaaaaaacataagaaactaatttgtataaaaaataatatctaccttttaatttttctttcagctttaactataaaactttaaaaatagttaaaatttaggattcaagagataatttgtcattttcaacaaaaaaatcaaaaatatttaacaatcaacaatttattcaaattaaacactcaaataatcaaatgaattgacaattgatatttcaaagtcagtggcgtttattgagccatcctaaaaaa

SEQ ID NO: 83534 - DNA, 514 bp, Heterodera glycines
atgtcctccccctctccccgttttcacatccttcttctgttggtcatctgctgcttttcagcctttttgtgtttggcattggcccacgttgttggcgaaagtcaaattgacacaactggtattcgcgctcgtcgtaagctctcttcaatattttggcacattaaattgttaaaaataaaatttcggctttttcaacattcactaaaatgatcacagtgatttctcgataattaatattttccctgacaaatttgaaccaaaatttcaatgctttcaccataatttgacactttacgccgttattaaaactaagatttccattgtccccattttaattctttgcctttataattgtcaaaattaaagcagagattgttgaaattttcattatttaggccaatattatgaccaatggggcaactattggagcggtggcaataccaattggtggaactggagaaagaaataaatggaagagaatgggcgacgaagtgatcactaatgatcaaataaa

SEQ ID NO: 83535 - DNA, 1052 bp, Heterodera glycines
atggaggaagtcgcagacaaattgcgtcaaagtgcgcttcagtcgtccaacgctaagcgaaggcatttgtcattggcagaacaagcgatggaaaatgaggcggagatggaaatgaatgaacaaccgtcggtaagtgcaaaagaattaaaagtcgaaattggccaacaaattgtcatgcaaaaaaaggaatgcttaaattgttccaatccgccgaattatttatcgaacatcttatttttgaattattgagaagctttttaaccaaaggctcacaagaactgggcgtttcaagagtgctctgaccacgaatttgggctcagatttgtcataagattgtttaatcggtatttttcgaatatattttctcgaaattaggattctattttctttaaaaactcatgaagaaaagttttttaccaacaatttctcggcatttctgctgacctccctcccttttttcatgtatgattgaattttcaaatgtttgagttgtaattaattacgagtcatttttttttttattagtttccacaaatctctataagattggttggagaaaactgcttttgtgataaattaaaaacttgcataagttctctatcatttcaaaaaaaaaaaattcatcagaaaccgactggtttgggtctaaatggtttaaatcggttttccggtgatttttttttttgccaacaaaatcccggtttatttttatgatttaaaaagatatcaccaaaaaattattttttgagcatttcgaactaaatttgctgttttaagattttggggagaattttttaaatcataaaaaaaaaattaatgagctaacattgtaagaagttcataagttttaattatcaccaaagctatggaaactaataaaaaaacggctcataattatgttatcaatataataaattttgtatattttcaagtctgatgacagcctttcgcagtcggttgtctttgaatgccaaagttgcgacaatggcaaaggccgtgacgaggacgaaatgggcataccgcccccatcaaaacatggaaggacggagtga

SEQ ID NO: 83536 - DNA, 2438 bp, Heterodera glycines
atgactgtggttgaccacgttcagctacgtgcaaaacacttattggatcccaatggaggaggacattccccgggaggtttattcccggcgcaaccgacagattggatactatcaatgggtacggtattccttccgtccggtgacagtaccccgaaactctttggccaattaaggtgccatttattttggccctccaggcgctgttcttttacattccgtgcattgtgtggcgaggccttctctattggcactcgggtcagtgccaaaagaaattccaaagtgccgaactcattacgccatttgccaccaatgagcaggcatcaacctgcagggattagtccaaatggcatgtgacgcgcgactgatggaccccgagataaagtcgcggacggtgtacaccatggctaggcacatgcaggaggaagtgcatgttggtcaagtgccattgccttttgactctttgattttgcaaatgccattgacctcctccccccgcctattcagctgacccaagtgcaacggcaaagtcgcaatcgtttgcccattttgcgacttggcaaacactgtggatgttacgtcactctcctctcaattggcataaaagtgagcagtcagtgagtgaatggcatttcaaacaaaatgccccattcagctcctttactccacaaatgttatggtccaattttggtacgcttttccttcgtcacttttttgcttttttccaatttcagcttactcaaccacattttgggctcgcgcgatttcacttacggattcactcttctgagagacattgtcaacgaaatcgaatgggagaaaacgggtgggttaaacgagggaatgggccaacaccagcagatgaaccattggcccataactttattggggttgtccttaaggggtgcgttttgcgtcccttttgttgtgccttaggctcccgactttagaggaggaggaggaatacgtttctttttggcattggaattggcagaaccgctgatgaagataaacgtgtcacttcggtcgccccccccacccccgggggtatgtccatccctcgcctctctttgggtccgtccgtccgggagccggaaaatccgacactggaaaatctgacaccggaaaatccgacactggaaaatccgacacaagcggaaaatccgacaccgatggaaaatccgacacaagcggaaaatccgacaccgatggaaaatccgacaccagcgggagacccgacactggaaaatccgacactaactttaaattaaaacaaaattttagattgtttgagttaatatctgcctaggcttagcaagttcttgaattgaatttgccgagaattgtttttttgcgtggattttttcacgaatgatctgatcaacttcggttgcctggggagtattaggtccaggtgaatatgaagaatatcattcattcatatgttaaaaattgttaagcactatttacattctcgtttcccaaggatcacagagattattttatttttttgagataatcaaaaaagggcatacaaaaaatattcatatgcccacctagatagaatagattatggcaataagaatatttattttaaataacttcagtactgtaactttttatatgtattttaaatattaactcatagaatcaaaaattatttttaaaatttaatgttagtgtcggattttcctgtgtcggggattttcctagagccgtccgtccgtccatccgtccgttctgttcctttttgtcctccggggcgcgctccctccctccgtcctttccccgctgttcacatctcagcaaatcctttgtttttctagggatgttcccacgtgtcactttgtgcgactttgaggtgcgcgtcctcggcaacatccacaggcatactgtacaatgtgtgctcatgatcaagtacggtcattctgctcactcatctccctcttttgcaatttacatttatacagcatgttcaacgaaaagatctttctgtttctgtggttttggtttctcaccgtcggctccgttaccgtaatccatcccttttgtaccgtaatcagttccttttgtccgcctttttgcaggtcaccaattgtctctattgggtctacgtgatgctctacccgaaaaaggtgctcctttggggtttctctcatcacaggttcggcatttgtttgctcagagtgtcattttcatccgcaaatatttgcgagtgctcagcgaacatccgcaaaaaccaatggccgacgacgtttcgctgcgcaaattcaccaacaattttctgcgcaaagacggagtgtttatggcgagaaagcattcattagactaattgtaagtttaatcatgaattttacagcttcggatgatctcaacgcatgccggagaactgatgacttcggaactgattttagcactttggaacgacttcaacaacatcg

SEQ ID NO: 83537 - DNA, 2385 bp, Heterodera glycines
atgggttcaaaaaagttttatacagcaatggacatgcaaagtggtttcatgcaaataccaatggcacctgaggacattgaaaaaacagcatttatctcacaccttggaattaatgaatttataactatgccttttggtttaactgccgcaccagacacttttcagcgtgtaatgaattcccttagaagacgcttgacagcagcaatgcttatttatttagatgatataataataggaagtgaaaatgaggaaattcacctaatagacatagaaaattttttgaaactcttaaaagaagtcggacttaaattgaaaattgaaaagtgccactggggaatggccgaaatccgttacctaggattcttgctaagtgaaaaaggaattcgaatggaccctaagcaagtacaggcagtccaaaattttagaccaccgaaaagcctaacggaattaaaatcgttgctcggtgcacttacctattttcgaagatttattaaaaattttgcccatatagcaaggccactccaaactttaacacaagacaaatttgagggaaaaatcgaagaaaattggggaaatgaacaagaagaggctctggaaacacttaagaaaatgttgacttctgccccggttttacaatccccaagatttggtaaaccgttcataattgagtgcgacgcatccaaaaaagcaattggagcggtattactccaagcaaatggtccagtcgcatatgcttcgcgcgctttaaacagacatgaaacaaattacccgtcaatcgaaagagaagcattagccttagtgtatgcggtcaaagaattttcgccttatattgttggttcaggcgtaactaaaaccattacggattgtagcgcactgacgagcatgatgaaagccaaagaattaaaagggcgactagagaaataccagatcactctccaaagttttgaccttgagatcgtttaccgccctggcagcaaaaacaaggcggccgattttctttcacgttataatataccaggcaatgagtccgaagacacaaacaaaaagggtaaaaaagaaaacaaaataaaaatttcaagtacagaaaataaacccaatagtgataaaaatagtacaagaaacggacaaacggacgaaagtagaatttctttaatgcaaataattgatgctcaacgtaaagtcaaagaattagtaaaaatattttatatcctgaagactggacaatatccgaaagaaatttttaaatggaaaggagttatgacagattattgcctattaaacggagcaatttactttcaaaaaggaaaagaaaatgcagaaaacccaaaattggttataccctatgaattaagacaaaaaattttcaatgaaatacataatgaaggacattttggttttgaaaaaacttggttcgaaattaaaaatcgttttcattggattgggatgaaagaggacataaaactgttaatcgatacttgtgaagcatgccaaaaaagaaaaattcaaccaggaaatgttaaaagtgctcccagtgtaccaatcaaaattgccaaagggccatttcaacgtattcattgtgatttaatgggaccactgaaaaagagcgaaaatggaaattcgtatatttttctggccattgacagctttacaaaatggataatgggtaaggcaatcccaaaccaaaaggcggaaacaattgtggaaacatttgtggaaattatggtacaccaacactctacacctgagattgttgtaactgaccaaggaaggctattcacctcggaattatttagtgatctttctaaaatttatggttttgagcatcagacatcgactgcctatcaccagcagtcaaatggtcaaatcgaaggctgtatgagaattatggcaaacattatttctcaattagttaatgagaaaggaaatgattgggataaagctctcccacatgcgatttttgtttataattcttcaatacatacagtcacaaaatattcaccttttttccttttgtatttgcgtcatccaaaaatgccaactgatcgcttgcttaaactccctagccaaaacgaagtaacgtctgacatttcaatttacactcgaaagcacgcggaaaatgcctcaagggcttgggagacagcaagagaaaatattttaaaatcacaaattacacaaaaggaagagaatgataaaagcagaaaagcggaggagaaagaatttgaaattggtgaattgttactgctcaaaaaagaagttttaaaacataaatttgatcagcgatggtcgggtcctttgcgttgtgttggaattgataaagacagaaaaaatgtcattttacaacaaattgaaggaaaaggcaaactaaaaaaagtccatcatgaaaaa

SEQ ID NO: 83538 - DNA, 1232 bp, Heterodera glycines
atgaaaatggatttgcgcaaactgatttgggacgtcacagttatggtatgtataaaaagaaatacaatttataatagggatcagtttaacaaatccagctttactggcgcaattgttttaaaatttttaaaaattgggcttaagcctcgaaaccctctgggagcaaattctctgacaaaatttgtcggagatagcatgagaaaatcgagtaaattttcataaaaagagttcagcaaaaaaagtcttagtaactcaataactttttttaggcaacaataaactaaattttcgggttagaccttcccaaatttttttttttgagggacaatgccttaaatttttcccacaaaatttcccacaatttttttcagatgaaggagcatccgctgttgcgcatggcgcacattgcaattttgtgccaacgcgtggacatcttcacggacgacgggctggcctacctgcaacggtttaactactccgtcaccgacttggtcaaagtgacatgctccccggagggcttctacccgctgatgttggccgtccagacaaaccaggactccattgtccgctttttgctcaagcatggggctgacctgaccgcgcatgaccacgttgggaacaatgcggtgagtcggacaacaaatttttttttgtaatttaaaaggctgtgtgtttaggggcacgacactgcccccgcccaatgccgtttctcatctataaattctatttttagttttcttaatctcttcgaaattttgtttagtaaaaagtcttaaaaatttacggttttttggatgactgggagtaaacatttttttaatttaaattttttgcctgtttaaaaaggaaactggaggtcatatgttaccgccgataggcggcacttggaaattggaaaatttaatatttttatatagaaaattttcgttttttttgtaaaatcgaatttttgcgatttactttttaaatttggtaacatcggtgggaatggcagcacatcctcaatattttattgcttttttcaaacaaatttcacatatttttcccatttttagcttcactatgctgcccgggtgtccacccaaatgttggagacactgcttgaaaaggaggcgggcaaggcgttgatcaattcgcggaacaatgcgggcgaaacgccgtcaatggtcgcgctgcgggcggccagcccgttgtgcatgaaaacgctgttcaaccacggggcgagctgttga

SEQ ID NO: 83539 - DNA, 422 bp, Heterodera glycines
aaatccccaaaaaccccacatactccaggcgtgctgcccttgttggactggatgagttcgatgagtgggtttttgtccgccgatttgttcaacagctcgccccgtggttgaacagcgttttcatgcacaacgggctggccgcccgcagcgcgaccattgacggcgtttcgcccgcattgttccgcgaattgatcaacgccttgcccgcctccttttcaagcagtgtctccaacatttgggtggacacccgggcagcatagtgaagctaaaaatgggaaaaatatgtgaaatttgtttgaaaaaagcaataaaatattgaggatgtgctgccattcccaccgatgttaccaaatttaaaaagtaaatcgcaaaaattcgattttacaaaaaaaacgaaaattttctatataaaaatattaaat

SEQ ID NO: 83540 - DNA, 1210 bp, Heterodera glycines
atggcccaattggcgacggcaccgaagggcgtgttgttcacggcactttgccgaccgttgagaactaccgtattcactaccgtacgtgacgctgctgctgcagctgtccgaattacggtggtcgacgagagaagcaccgacccggacacttttcgactttggttttcgccggctttgcaaattgtgcaacaatgcacaaagtgagaaatggcattggcataattagcaaaaattggcatttgatttgatcagccaatctgctcacgtgtctgatcagtaaagaacggatttttacacctaaatatgctaaaaaaatgccaaaaaggatactaaaattccaagaaacccacctaaaattggcgctaagtaggtggaaaaaacttgtcgtgttgaaagatgccggcactacgaaaaaatttagagtttttctgggaagtttttcgaaaattgcaaaaattaaatttaaaaaaaaaactattttcaaccattttggcgatttgaacaaaaatttaacagaaattttattaaaaaatcccaaattttcaatcaaaaatttgcctaaatttaaaatttcaagactaaattgtttaaaaatccataaaaaaggaaacgattttggcattttttagcacctaaaaattccatttccgttaaaacagtgccgaattccatctgagccgcttggtcccaaccgccgtcacttcttccgatttgccatcactttaccatctcatacacccgtaaattggaaaaatatttatttaaaatgaatttaattatttttaaaataaattttttcattttttgtaagaaattgtgcacccacgctcacgaccattcacaaaaaatgtgcgtaaaaattcataaaatttaatttaacaatttttcaactaacccattcagttttctttatattttatgaaattttttttttgtataatgggtttttaaaatagaaatcaaaagaatagatttaagaataagtttctgagttttaaaaacttctcatacaataaaaattagatagaacttttttaatgaaaaaaaaataataattattgacaggttttaaatgcaaaaaaaaaaaaatttgtaaaataagcataaaagtcggtacttgtaggttttgtcacccacctgaaattttttttcaaaaattttttctaggcttattttttatgctgattacgaatctgacgtttatttttaa

SEQ ID NO: 83541 - DNA, 734 bp, Heterodera glycines
atggcactttgctgtgtgtggattcgaaagcatcatgcgctcaacggcacaagtatgcatttggccaaattggccaaaatgaaattttattttttgtttttttgcaaagttttaccctcgctcaaaccgaaagtgccatccgtggtaaaccatcatcttgcagccttacttgccgaccttctccatgatcgattcctactcgtgaccactgatcatggcaaactgatcactctgagcgacaatttccactccgacccaacatttagcactgtaaatctgatcactcattagcaacgagaacaaattatcgattaaacattttcctgatctaccgactctaataatttgagattcgtcgatcgctagaggaaaggggcagattaagttccaaaaattttaaaaatttaactcaaattttcaaaaaaaaaattcctttgcggcgcttaaaaaaaactaaaaaaagattgaacacaagaaaatatttcagttaatggttttggtgattttttttttgttattttttagaaggttatttttttaaaaataactcattattgatcaaagattctaaattaggcatataaatgcaaaatgtggcatattttcaggacgaatttgttgcccaaggcgattcattatacgatctggtcgatccccgggaccatcaaacattgtcacacacattaatcgaagctcaaaatgccaaacccgcggtggcatttgttcgtaattga

SEQ ID NO: 83542 - DNA, 1320 bp, Heterodera glycines
  unsure (1)..(1320): unsure at all n locations
atgtatcatacagtaattttactgatcatttgccatctacttcatacagtaatctcgctggcttctgtgctcgtttcatcgccgtttgataatttccgaattgagtgcccacagtcatcgggcgcacaacggttgtcaattcgtatggtcgaatcgcaaggccagaagcgccaggacactgtattcgtgctcagttgtcagcacattgttgaggtaatgtgtagtacggtatacggtagtttacagtgagaatgggtggcagtttttccaaaataattaattattttaaatttcttaataattgcaaatctctgtgaaatgtgcaaatcaggagtgggtttgaggcttactgcaccactcttcttaaaaattaacacaattttttaaaattaatcattttgctaaaaaatttagaaataaaagaggaaaagtgcaaataattttaattgctaatctttaagtcccgctttacatttgaaatcatttaattcttaatgtcatcatttcaaatctattaaaccaaaaagtaattagccgattatacaatattttaaattcatgaaaataaaatcagttatattttgcaaaatttgtcaagctttatccatggctttgtcttccacaagaaagaaaaaaggaaatatacaaatatttttaattaataatgaataagtcaattttttttattaaaatcatttaatagttaatgtctatcatttatcaaaccaattaataaacagtccccaaaaacaattagccgtttccataaaatgattgaaaataaccaaaatttttcaaatttacagctttatccatggcttgatcttccgcaagaaattgctgaccaagaacgcgaagattgtcgttacactaaacaatttgacattttgttggagcaaaaatttgatttgacgtgcaaagagcatgaatatttggcaggaattgctcgactggccgataccaggtcaattcaacagcgggatttgttaatagattttgtccaaataatgactaaattttgcgattatgagtttttttttaaagaaagttaagcatttttcagctctgatccacacagctaggaaattttgggcattttctctcagtttttaaaagattttcgccaaaaattgataattttttagattttaagaaaaatttcgcgaaattttttgggaattatgatgaagtagatatttgaggggtaaaacaaaaaaaattgaaaattttttacaattatttccccctcaatgaatctaaaaatctttgggagcccctattanaactaaaaaaaaaaaagaaatagcaaatattaaaaaa

SEQ ID NO: 83543 - DNA, 278 bp, Heterodera glycines
atggcaaagacaacaactcgactaaccacaacggcacagaccaccacttttggctggtggctaaacaaaaatgatgaaggtgtaattatttaaaattattgtaattgatgattttgataaattaggacaattagcaacgaattttcagacctataagtgccaaaataagaccaaaaaaggagcgaaaattgtaaaatttttgatttttacatttttggacaaaattatttatttatagtgtttatttttcatttttttcattttttaaggaattttga

SEQ ID NO: 83544 - DNA, 306 bp, Heterodera glycines
atgtccgttctgctgctctcttcccaattttccgtcgctgttttgctaattgcctttgcctcgtctatgggtttgtcaaatgcgcgaacaataatcgccgccgatgggtctttcggcgatgaaaatggccaattttccaccccgaatagcttaatcgattcgtacgaaaggaatattccatcacttgtggcattaatgagggaatttacggaatcaaaagaaaggacaaagcaaaaagccattggaaaagcacaagagaaggaggaaaaacggatggaggagggaaaagtaaaagcgggggatgaa

SEQ ID NO: 83545 - DNA, 718 bp, Heterodera glycines
atgtttaattattttttgctttttcttctcctttcaatcgctttcatttctttgagtaggttaattaattattattaatccaataaaaaattgacatttaatattttaatttcagtcagtttttctgagcaaaaatcattttttacaaaagttggcgatggtttcaaaaaaaccgctaataaaattggcaaaggatcgcataaaacgtggaacaaagcaaaaggaacagtaaaaagaggaccaaaaaaagcatgggagaaggcgaaaggaacgatgaaaaagggatggagaaatgtgaagaggaaagtgggatgagaatgaaggaaaagcggaagagagaaaaggaagaaaagtgaaaggaagagagagagagagaggaaaaggaaaaacggaagagagaaaaggaagaaaagtgaaaggaagagagagagagagaggaaaaggaaaagcggaagagagaaaagaaaaacggagggaggaaaaggaaaagcatgatgtaatttgcatttttttttttggcttgatgctattctgttttaattgtccattttattatccgtcctcattagtctcatttatgtaatttgtttaacagtgatttatttttttattttattgtttgttttctttattacttgctcttttactacaatttcgatagttacagattaagtggtgtccccgcccttctgtgacttatttttcttgctgaaattaa

SEQ ID NO: 83546 - DNA, 538 bp, Heterodera glycines
atgtcggacctaagcccgaatgttagaaatagcatatttcaatttaatacggtaacaatttgtgcgattccacgggccctttggtgcatattttggccagcacgggaggcattactcggtcaaaattcggatccaacacatttgaaatgtaagtgagcaattggcggtatttggcgcccatgttgaagagaccttcgattagtcccatcagttccacgtaccgtagggcacccggcgcagcaccgtaatttatctaaatggtgcaaattagaaaaaattaagtctaaatcagatgacttttaaaaacgaaaaacacacccctaagaaatgaccaaaaaaaaatttcagaaaatacacaccctaagaattgaaaaaaattttcagaaaattgatcaccaaatttactattttttcatgataaaagtttttgactaaaaattgtccttattcgaaaaaactttaaaacaattgaaatataagaaaatttaattttttgattaggtttcacgtgatttgctacctaaaaaatgttaataaa

SEQ ID NO: 83547 - DNA, 1530 bp, Heterodera glycines
tgcatatttgagctcgatccaaaaactgtttatgcagaaaaatttaaacttgaaaagtttagctctgacctcgattggttctctttgtggtaatgaggtggagatgccgtaaattgcaatcttggcgatttaccattgatgtcttggaaggagtttttggagatcttgtttgtcgtagagatcgtcttaacggcaagtgaggaaaatggaacatcggacaaatgcgaaggggatggagaatatgaggaagacgatgttgaaatatccattgagtcagagtccatcggtttaattaggtcggcttattatgcttaatatgtaaattaaaataggtcataacaaattgtaattaggtacctaattagcaattctaaataaataaatataagtgatgaaagcatctcaaaaagatattcatacatttgtattacctatatgcagaattacaaattggtctcatggttttatgcttatcagaaatttgacaaaaacaaaattaatttctaaacaagagattaaaatttgaaaattaaaaaaatataggttttaatttagtttgattcttagcttagggataggtgttagccgatttccgaaattttgtgagggaagcggtaaaaatcctgatgtagagaagtagataagttaaaattatttaaaatgctgctactaaagagtttgtgaacggatgataaaaaagtattctattaatgtctctctctgtccatcagaattatgtattatttttttcatatttttctttaattttcagtcaaaatgagtgatgatggtcctgcttccaagcgatccaaaaatgacgactcatctcaaggagcggcacaggttgtgtaaacaattgtaaaaacaaattaaatgtttttaaattggttaggattgtctcaccgagtctcagaaagcgcttgaggatttggacaaagtgcagacggaacttgacactttaaatgaaacagccagcgacgaaatattaaaagtcgagcagaaatacaatcagatgcgaaagcccttcttcgaaaaacggacacacttcatcaaacagataccaaatttttgggtgacagtggtgagtcactacgagcaattgcccattttataatgcattttgtcagttcataaaccatccacaaatcagcaatatcctcgaggaagaagaggaagaatgcttgcactatttgacgaaagtcgaggttatcaagcccaaaacattaaatttattacttttatttcaagattgaggaaaatgaagacatcaaggccggttataagttgaaagtaattaagggacagacgctgaaaagttggaccatcaaaacaaataaattctttcttttagttttctttcgacccaaatccattcttcgagaactctgaaatagtcaaagaattcaattggactgcagcagaaccgaacagtgtgacaactgaaatcaaatggaagcaaggaaaaaataaagtaagtattttcttgaaaattggctaaaaataacaaatgttcatttttggacaaaactt

SEQ ID NO: 83548 - DNA, 945 bp, Heterodera glycines
atggactctgactcaatggatatttcaacatcgtcttcctcatattctccatccccttcgcatttgtccgatgttccattttcctcacttgccgttaagacgatctctacgacaaacaagatctccaaaaactccttccaagacatcaatggtaaatcgccaagattgcaatttacggcatctccacctcattaccacaaagagaaccaatcgaggtcagagctaaacttttcaagtttaaatttttctgcataaacagtttttggatcgagctcaaatatgcataacattcattttgaccaattctgaacccgacctgaatatatcgaaaatcaaaaaacgaaattcgagaaatttgggttttgactttttgttcataaattgttaattttgtttactggggaactacaattccaaattatttcttctacaaacttttagtgttccatctacggctccaaatccgttggccgtttcacgtacaatgatttctacttcttgcaaaaaggacatcacggaaaggcattccccttcagtgaatgcaaaccgtcaaaatcaaatgcaaaaagaggtgattaaagattttattgaagtctttctgaataaaatttacagcacagtgttgcagctgaaatgtttcttgcgactgatccaattttgatggatctgcaaaaagcaaacaaaaaaagtgaaaagcgaaaattaaatgacgaagaacaagacaacacacgacaaatgaagaaattaaaaaaaagcggaacaaagaagaccgattgtgaccagaacgcaatgtcaggcaaaaagatggaacattctgttttgaccgggcacaaaagtgacaattcaaatgcacaaagaccgaatggaaacacttcaaattgcaacaaaagtgacaagaaaagtgacgctacatcaaattctgtgcaccctcaagtaattaattga

SEQ ID NO: 83549 - DNA, 3301 bp, Heterodera glycines
atgtcttcaaattttatcggttcgccaaattgctttttccgtccaacagctgatcagggtaagagaaataattaaaaaaagaattacgaaaaaaggaaaattattttatcttttttaaataaaataaaataaaaatttatcaccattagcagcagcagcagaagaagtggacaagtatgaagtgttcagttggcacggagatttgagcgaccaattggcagcacaatttttggtcagtgatcagcagctgttgaaggtgggacatttcagaacggacaaatgagcacagaggggggagcacaaatgatcacagtgggggggggggagggggagagaggccggacggatcagtcacggacaaagggccgaccaattccgagagcaatcaagagacattttgccaaaaatcatgcaattaatgagtgaaggaaattggaaattatttagtggactgaaaaaactttttttatttaaggaatgccgagaaaaacttgccagtgccgaattgagagaaacgaaattgctgtgcaaaaacggggaattgaatgcagagaatgtaagaaaaattaattattaaaaaaaaatttaaaaaatgacgaaataactgagagcgaacgcgcataaaacagaaactttcaaattttgtaagaaaattcagaaggcgcttaaagcagagttggagaagcagaagctgatgtcggaaaacagtgaattgaaggcgaaagttgataagatggaccaggaaaagcagcagcaattggacaaaaaatacggtagagacaatttaaaaaaataaataatttttattaccgtactcggacagtactgtatgcttcaaaattatttcagtttctgtcgatgtgttcaattcattggtggagcgaatcaaacaattggaaaatcggcagaacaaagaggagggcagaaagggtaaataataaatttaaaataaataattaacggaccgaaattttgcatactttaaaaaggcgaaaaaattttaacggaccataagcttttacaattttgatcagttacaaattttaaatgaacatatttaattagctgaccaatgccaattatttttaattttcattttctattattcaattggatacattttttagcagaggaaaagcagcagaaggaaagtgttggtcaacagaacaaaaacaccgaacagaaattggatggaaaatatgccgtggtggacaaaaacaatgttttgggtgggcacaattggcaaattatttaaaattaaaaattggcgttataaaaaaaatgcattttttgagaggggacaaaaccctcgtattatatcgggattttatacatatttggtacatatttcggacttttttcttacatattttcatttttttacatatttgaggattttttacggaaatttttggaaattctcaaaaaaaaaatccaaaaatttcggcaaatttttcatttttttacatagctattctgagaatttttgaaaatttttagaaatttcttgtgaaaaaattaaaaaatctttttttaaatgtacccctccaaaaataatttttcaaatgttaaaaggtgattttaaacattttggtcatttttatggcattttgtgcctatttaacactttatgaaaaaaaattttccaaaaaataacaatttaaaaaaattttatttacatattttcgtacatattttgggtttttatacatatttcttacatatttcgggatttttttttacatatttatgtacatatatgaccactttttgtacatattttttacagccctaattataaatatttaggtgttaaaaaattaatttttttttttaaatgtatttattgctaatttagttgctttagtgacgtcatcgggcgaccattcgccgccggcggttgtctcagcgaaagttgcaaaggtgggaaggaaaccttaattatttcacaaatgccatttaatttcaggaagtgcctaattcgcagcaacaaaatgattgggatgccaaagtttgccacaaagacatcgaaatcattggggaaaagcaattgacgatcaattgcaagggcaacagatttggtatttaatataaaaattaaaaaatgtaattaattaattactttcttaattaggatggcactctgtttttgcgaaatttccaattacgaacttttgtcgtcccggaattttctacttcgaaatgaaagtgttcaaattgaaaaggtgttcattttgatgatttcttagcgttttatttataattttgaatttattttaacagttttgctgcgattggaagtgccattggacgggtcaattggtcaaattttgaacagttacgggtaccgaagcgatggctcatttggctgtaatggcatcaatcggccgtgcaaaatgccaatgtcattatttggttcgtcattttcccccgtggcaatgcaatcggcggacgtggaaatggcatacaaatcatcggagttttccactggtgacgtggtcggatgtggcattttcttggatactcgactgatcttcttgacgaagaatggccaacgaatgggtgggccaattaaaatgaaaaaacaaattaattaaaattttatttttaagattattcctcttttttcattcaaactcccgccaattctctcaattctctgtttccgtgcgtttctttgtgggtgggcgacaaaatcgaggcgaactttgggccaaatttcaaattcaatttggcgactctctgaagaaagcaaaaagaatggaagaaggagaaattcatctaattgctgtcatttttactttatttatgtttattttttaaattctttttttcaattttcattttggctttataatactaattactattttatttgctattaatttcgtttattaaaacgtcgattttgtgactcagtttcaagttttttcgaaaaaattcctatgaatcttaaaaattaatacgagaaacttcacaaaataatttaatttctcttaaataaggatggcatttcttgactcttggttttaaaattctgaattggggcattcttttttaggtcatcattttgccttaatttatgttaattgaccccgataaatatgttaatataagcaactgcagaatcagcagatgttcatttattacttctccaatttgttatcagcttttcctttgtccattcgttcaccaattcaaatgtcacaattgatggcgcatgaacagtaaaatgaatttggtaactgacggaagaaatggcattggcacggagaaattgctaaataatttggaaaataaa

SEQ ID NO: 83550 - DNA, 996 bp, Heterodera glycines
atgagcgaaatgataactcacaatcagcatcagttgatcaaatgggtgaagaaatggggacagacccaaatgatcaacaaaaaagagaaatcattcgaaaatttgaagtaattaaagaaaaattgaagaaaagtgaaaatttcaatggaaaatacaaacaaaaattgagaggaaaattggatgaattttaggcatatatcgcgaaaaaatatacaaatggaaaaatgaattaaatttaaataaaattaaattcaaaataatgaaacatagttttttatgaagagaaaaagaaagaattcattgaacgatttgatgaatttaaaaggttgtataaaggcaaacaaaaagaatttgcgaaggaattgggcatttctaaagaaacattacgaagatggaaaaaagaattgatgccaaaatatcataaaagtgagagaatttgttttttaattagtttatctttatttttaagtacaagttaaacattcaaatgaggacaaattaaaaaagatgaaaaaatattttaaaatcaaagaaagaaacctaaaaattagcgatgcaaaaattgcaaacataataaaaaaaggagcgaaaatgagagaaaagagaggggaaagaaagcaaaatgttggggtggcacaatctttgactcaaggatgggaggaatgaaaatatcaatgaaaattaatttataaggccaaatagctatgcttacagaagggattgcattttagttacaatatttaacatttttgctgctttgtttcgctgagaaatgcgcgaaaaactcatttttagcccagacattctcattttaatagtattgttcgtaattaggaatcattaattatttttagagatcgacattttgaaaaaagcctggacctggattccatgttggacctggatttcctggacaaaaatctaggaaaatccaggtccaggaaaaatccaggctcctcgggacctggatccaggcctggacctggatttttttaa

SEQ ID NO: 83551 - DNA, 378 bp, Heterodera glycines
aattacgaattagcaattttatattcgaaaattttgcagttgataattgttgctataaccacgatgtgtgctacataaataaatatcagaaacgttacgattgtgatattaaattttgcaattgccttaatgaatatcctaattgctttctaacaaaagtctgttctccaactcatatcttaaatattttattttttagaatatattatgctggtcagttcatattgttggagaacgttttaaagaaggataaaaataattattttattttaccgtcaatagatatgcatatgtattttaaattttttattgttatgtaaacttctaatatatatatatttatatacataatcatatgagttggcggttttaagaaac

SEQ ID NO: 83552 - DNA, 2309 bp, Heterodera glycines
atgagtggtgggccacgctatgaatatttgtggcaggacggagcccagtacaaaaagccaacaaggcttccagcaaaagtgaaagccttaaaaaaaattatgacaacaattttctaagcactgttgcaccagtcggattatgtcattttttggataattttttgggagcttttgacttaacattcaatccctggtttaccgaaaaaaaaatttgtattaattaaaaggaattttgattttgaaagctggtttttataaaagggacaactttttcagaatttattgaaaaataattctgttattatctccctgtaaacactgatttttcactacaaatcatagagaaaaagctactttaaactcatttcttgtccttaattttttaaaggattatatgcacttactgatggattggattgaggagcgtattaatgacgagaaaattttccctaccgcgacaggtgggctaatttttattttatctataaatatctaaaaaaaaaattttttaatttttatacagatgtgccattcccaaatgattttcgtcaaacgtgcaagaaaatcttgtcacgccttttcagaatatttgtccatgtttacatccatcattttgatcggcttgttcaaattggagctgttcgtttttgaataaattttaattttcaaataatttcatttttgtatatttttatttaaatttgattttcaggaaccacatgccaacatgttgtacaaacatttctactatttcgtaactgaacataacatggtgtcccaaagagaactggacgccttggtaagcgcacttggctttggcttaattgatttatttagggtagaaaaccatcatttgaaaatgttgagaaaaagctaatttttaaaaacagttttacgagttgcatttgttcgagttgccattgacccgcgttatattcgcataattaaataaattatttatataaattattaattatatttaaattaatttttcacttttttttagaaggatttgactgctcgattgataacatcacaacacaaccaacagcatactgctatcgatgccaaaaatggttctaccgcaaaacaaatctcaccagccaaaacaaattgaaatttaataaatgataattaattgttgttaccgtatttcctctaatagggtctcggggctctatttttcaaatcgccggccgaaaggtcgccggaagatttttaggacccaaattttttcaccgttaaccaatttaagcattcttggaattgttcggtagttctatgtatttattattattctgccaaatctcaaaaaaaaattcaaataaggtatgctagaggaactcaaaaaacctagtttttcaaaaaaaattttgcccttttttgtacatgaaaaatttaaatttttcaaattaatagagggttatgaattaacgaacaattccaagaatgtttaatttagtttataaagaacaaagttattgtccaaaaattcgtacgccttttgtcctgctccgataaaattgaggaaatacggtattattattaattatgtgatttgaatattgtcctcatttgcatttctatttttaataattggccaaaaaagtaaaaattggtaaatgtggccatagcattttgcccactcccaaaaatgtttggaaaatgtcaagaaaacacccctcccgataattcgtcatcctcgtcgcatttttcatcgtcaacatttgctgctttaagctgcaaaaattcactaatagggcatatgtgtagggcaattatttaaaaataaacacaataaataattgctttttaaaattcggcttttttgcgatgaaaacaataaaataattatgatgcttattgtagcaaaataaacaaaataaaatgttggcgctttatattcaaatataatccatcaaattttctatcaattaatcaaaatttgagactccaaaagcaaatttggaacaacgattgaaccttgatattctgtcattaactcaattcccattgattgtgtgcaaaacgggcattttcctttgattgagaccaaaattttttgacacataatcatcgtcattaaaacatgatatagatgaagggattaagaaggaggtggcatgttttgcactcatttatgcaatacccccccccccccccgctcccctaaatttaattgaatttaagttatgtgtgcatcatcagccagcctctccgacgacgacgacgccatgaactcctctgatgctggtgatggacggtcggtctgtcggcgggtcgtcgtcgtcggagtggacgagaaatga

SEQ ID NO: 83553 - DNA, 2209 bp, Heterodera glycines
atgaccagcagtcaaaattcaattatggatggcgcaaatctgttgggcaatttggagtttttgaacagccttaatgaaggccgtaatttgcttcatacacaactggcacaaaaacagcaacaacagcatcatgtaaaaatcgatgatttttgtaaattttaaatgctaatctttaaaatacagtcctcaacattttgccaatcgccgtttccactaaaacaaccgaagatggaacataaattggacatttttgctcaacttcaacaattggtgtcctccagcagcagcagcagcactaatggctgctccaactccacagatcaccagcacctagcatcatcattcccgaagcagcacattgcttcaatgcacaacaaaatgcttagtgagaatttggagaaaattttggctaattaaaatgattacggtcaattacagtacatgcttacagtttcgtgctagcacatttaagaatcattaatttttataatttgtttgaaaattgctcttcatgggcactataataggtattagtctttggaaaaatagacctatcagattaagtataaaaatgatttcaattcagtaaaatactgactttttcgagttttcaagtaggaattgttggcactgaactgtgagtgccaaaatttaaaatgcagtaattgatttaatacggaaaattattaaatttaatatacctttccattttttaggtcgggaaaaaaagaaatttagctctgatgtgtcagattttttggtgcttgaagtgttgaaacggaaagagctgttggttgagaacaacacgagccgagtatgtaaatagataataagcagaagaaattcagcaatttttgatcaaaattccctaattttcaaaaataaaacaaattataaaaatgatttttcacacaaaatttaaaatacaattcaaatttttcagaaaaatttcttttattttacaggatttgtctttttcggagtgcaaaagaaatgcttggaatgatgtcagagagttgctggtgtccagattccccggctttgatctgaacattgaagcgatcaagtcacattggcgctacagaaagcgcaaagtgaccgacgcgttcagtgaaatgtgcaaagggtgcgggaatttttaaattgcataacatttaaaaaatttaaaataatttttaattaattaattaaatttttgttcagcagtgaagccgaacaaaagttgaagctacgacttgcggctgtcgatttcgaaatttatagccagttgaaggattcaaatttgttagaaaggacaaggcttgagaaggacgcatcaccggtgtgaaaacaataattaatttatttacgtatcattattattttttaaataattaattaacaggatcagtgtgatgatgggcattttgaaagtatttcgtcgtcaaattctcccgcaacaagagcaatcaatgctgaatcatctgctgctgcttctacaatgtcacttgcgccaactctgccaatgatttcacaggtgtggttgtttttttttttttgaaaaaaatcgtttttatccgagttcttccaaaatttgtccatttttaatagcccgatttttaatacgaattccccattttccataggctcccttctttctgggccaacttggcccacaacaacagcaacacattggcaccacaaacccgacaatgttgctcgaacgcttaacagccagcttattggagcagcaactgaagcaacagcagcagcagcaacactttaccaaaaaggacgtcgaagaggaggagaatgatcaacagcagcaggagcagagaggacgggaaacagttcagcacagaattaatgattaaaatgaagctaatatggggggggggggtgtgtacaatgagtaaattgaaccctaaatcgtacacgccaaaacgtcgtcgccgccgtaacatcaccggaacgtggaattgtcgcttcaaaaaattagaaaaatttaaaaaaaaattaaaaaaactatctcttaaaattatttttcttaataggctaggtaacaaaattttgattttttttttcttatgttttttctaactatttttctaatattttgctgcgacgatgcgcccaggtgacgttttgtcccgctttgtcacaaaacataaccttgttgaaaaaactagcaattcccatcctgctgctggtcccatttacataatcaaaa

SEQ ID NO: 83554 - DNA, 56 bp, Heterodera glycines; identical to SEQ ID NO: 68623

SEQ ID NO: 83555 - DNA, 633 bp, Heterodera glycines
atgtccaacctgagcagcacgataatgccaactgcagcagagtaccaccatgttggcaatgcagcaaaggagaacggtggtggcactggcgctggaccggaaccgccggcaccgaagcggcttcgtcttggcagcgcggagaacgaagaagagcgcgagatggcattgctcaaacgagaggcgtacatggtgccgtatttaaaaaaaaagttatggccaaaaataaccgaaaaaattctggccataacttatttgagttaagaaaaattttttgaaattttgccggctcaagagaataattagcgctttcgaatgatatcaaaaattaaatatctgggtcaaaggacgaagctcctatgattataaatcagatttttggattaaatattttggaatttcaatgaataaaagagaaaataaaaactcagaaaaaatgcaattttgttgagtttccaattcctttttaataagcatattaattgaggttgatacatatttgaaattgaaatttatttttaggcgcaagcatcagcatttgatgagatacgatcgctggtgacagaagtgcgttcaactcttttaccgcagatgttaacagctcttcaaaattataattcgcaatttaattcataa

SEQ ID NO: 83556 - DNA, 168 bp, Heterodera glycines
atgagtgccagttttgatgacgaacttcagctcgaaatgcaatcaattgaggccatttttccaaatgaaatccatattgaatcggctcgacaaatttctgtccaatgtgcgtcgaatgtacaactaaatttgaacatcccggcagactatccgaggtcatatgatgct

SEQ ID NO: 83557 - DNA, 532 bp, Heterodera glycines
atgaacaaatacatcacaaacagcagcacccactggcagcagcaggtgtttgtatgattaattggttaacattattaaaagccgtggtaattaattccgagtaaaagcgtggaaatttcaattaaagccaaaattctgagaaacctaaaattacagaaaggcaaattaattaaattgaaaaaaattcccacgattcaaaaattttaatttaagccgtacctgcatttggtgaataaggtggcgcatttggtccggcggaatgccggcctgcattgcattttgaagaattgcttgaattgcctcaatggaggagggcatttccatcagccaaatggcacaaaaagtgtcgacgaaagcaaaaaaaaaagttggcggagaattaattaattaattggtgacgaaaaataattaataatttaaaagcaattaaatagttcctctgctacgaatcttctcattcaaccacctttgataggtgattaatacagaattttgctaaatgaaaaaaaaataattttataaattaaataaa

SEQ ID NO: 83558 - DNA, 827 bp, Heterodera glycines
atccaagtgaggtgcaacttcaatcgaaacgaacttcgtccaaaaatagggctggattaacgggttccgctcggggtgccattcagccaccctctaaggaaagtgccgaaagttctccggcaccatcgtccctcgccactcatcaccaatctgtcgcttccatgactctgtccatttctgccaacaatttgcttaatttcaacataaattctcctcgctcttcctcctctcgtgcctcgccaatggcaaacggtttttgttttaaattttaccaaaattacgaaacattaattatattgtaagtaaaattggaaaaattatccgaatttccatttgcctgcgtccgtttgtgaattatgccaagacttttatgtggattaaaaactcagggttcttgaccccgacatttaataaaaggtggctttgcttttcagtttcaaagttgcgcttccatagcacgaagggagtgaatgtgtatttacagcatgatgaaactgttgcagttcggaagcacggcgaatattaccagggatacgttttcactgaaaggccaataaaagtcggagaaaaattggttattttggtcagccaaatcgaggactctttttccggcagtttggcgtttgggctgaccagctggtgactgacgacgtcgattgtccgttgtagataatactgatttagtgacccgtcaaaagtgctggcctccagactgcccgtggacagcgacgaactgttagaaaggacggaatattgggtgtgcatcaaagatgttgccgcgacaccgcaagtcggggacacactctcatttcaagtggacgcggaag

SEQ ID NO: 83559 - DNA, 490 bp, Heterodera glycines
atggccaatctctcgctgttttttgctcttttaaccccccccccccttttcagcttccgtctctcccctccctccgccgcccatttaccaccaaccgcccgatttgccggtcgcccattggaactttcagtcccatccaacgccattttcaccgcctcagagaagcaaattatcgtcgtcagacgcgaaaaggccaattggaggcgaaagtgttgggagacggacaaacaaagagcagaaaatgccattgatcgaagcacaaaggtaaaaacaacggccaatgccattggcattttcttcgctcagagaatcgttggaaggatggcgctgattcggcaaacaatcacaacgcttatgccacaataattgagcttgatgcatttaatgaagagcttccaaaacaaagcccgccggtcaaaccccaaatagaaaagcattattcaatcagccttttaataatttcttattgttattaaaacatcaaaataaa

SEQ ID NO: 83560 - DNA, 204 bp, Heterodera glycines
atgttgctcctgctcctcctcctcctcgacatgttgctgctgctgctcctcctcctcctcctcgtcagagttcccctcgatgcgcactaccacctcctcaatgggcaatggaacccgggggaaaacctggtcctaaatcaaaaatttggctgttgccatgtcatgactcatcattaccaagggtaccctttctgcattgcgtag

SEQ ID NO: 83561 - DNA, 227 bp, Heterodera glycines
atgctcgacagctcaatgccttactcattggcagcggtgggttcaaaaagataatccaaaaatcagaataaaatggcaaaataactttaacattctaaattaattagttcatattataacaaattcagaagcgaattcgtaaaaatgataaattaaaataaattattatttaataattttaaattatgtgaaaatggaaaataattaattatttttaaatcattcga

SEQ ID NO: 83562 - DNA, 878 bp, Heterodera glycines
atgtcatctgctgctgttcgcattggcattatttatacggaatttcggattcttgctaaaaatctactgtgagttgtggaacagcaaaaaaaaatatataaactccattatctaccaaaatcaaaaatttacagtctgaatttctttttaatcttttttgtaaaagcagctgagctggacaagaatttcttgaaaacccgggaccaaccggggaaatacaagaaatcaaaaattttatgaataaaaaaaatttgattttatttatttttgtttttttaacgcaagtctttagttattcggttcataaaaattattttcagttttttatgacaaaaaaaatttaaattcagcatacttattggactatcaacaaaagaagtgccattggaccattgggttggaaatggccgtgtttcgtacggttacgcaaattttggcgagattataagcacaaatgccaatggaaatgaaataagcattagggacaatgtgccatcatttcgcactggcgatgtggtcggatgcggactgaattgggcaacacgctgtgtttttcacgaagaatggacaacgcttgagtttgtgttcatgatggcaattcacataaataaactggctaattgcctaattaagacatcaccaatttgtacgttgacgagggaacggctgacctttacccgaccgttacattgtttgatcacttggccgcggtcgaggccaactttggtcccaacttcaaatacgaactgtcaaaggaatttgagactttgtaaatgattgattggcttatccaatatcaattgaacatcaatgatctgattttttttctgatatcactgacaatttttttttggatgttccaaatccgacaaaataaa

SEQ ID NO: 83563 - DNA, 163 bp, Heterodera glycines
cttaagttaaaaatataagaaaattatattctgaaagagaacaattaaagctattgaatgataccccgaaatattaatttggttgaatttgagccaagctattaatttaattattttacccattttttgttttcaaacccattggcagttttaacaaacgcgc

SEQ ID NO: 83564 - DNA, 331 bp, Heterodera glycines
atggaggtgagttttaagtccatgcacgtccaaatgagcacatgactatcatcatcccccactggcgagtggtggacccactacttgctccgtcttcgcatgctcccttttgcgaagttcagattgtcttcgattttgcagataaaaaacatttacccctaagctgtcataaccgtgttcagcaacctcaaaaccccttaataatatgttttcatttaatttataaatttaatatagtgtccgaaaagtattggcagtgaacccaccctggcaccgaatcggcggcaccgaatcgtcctattcggaaattagtagagaatcaaagaataaa

SEQ ID NO: 83565 - DNA, 97 bp, Heterodera glycines
ttaagccaaaaaaattctttactctattaaataaactcacttattttgccatggaattaatcagaggcgtgaccgacagaatgtctgcaatgttttc

SEQ ID NO: 83566 - DNA, 323 bp, Heterodera glycines
atggacggagcagtggtacggagcatcaaagatttgcccattgatgagctgaccccatggaattgtaagttaaatgatcattcgatccaattgttaagctttaagcgaagaagtgcaaatcgtccactcgcttcagctccgtccaattcgatgctgaaaagaattctctcgtcttcaaccgttacataatctccgacgcggccaatgtcgaaaggccggagtgtctgataggttcccgtccgaccaagtcgaactaatgttgttttctccaattttcagcttgctactattgtaaacatccaatattcaaccttgttaaaaag

SEQ ID NO: 83567 - DNA, 616 bp, Heterodera glycines
atgggattttcgacaaagccaataattattgacggaaaagatcatttgcttggacgtttggccgctgtcacttcgaaacagcttttgcttggccagaaaattgttattgtgcgatgtaagttttttctttgtttattctaaaatactattcgatcaaggcgaatccatcaacatttctggcaacttccaccgttccaagctcaaattcctcgcatttttgcgcaaacgctgcaatgtgaagccatctcgcggacccttccactaccgtgcaccatctcggattttctggcgcacggtttcttttcatatttaggctaggctaagcgtaggcttgtttgggcctaggcttaggcacaggctttgtaaaaaaaaaattttattgcacgagttgccattgactcctccggtaaaatatgatagaaaccaagtaaattttgaatcttattcatttaggttcgtggaatgcttccgcataaaaccgcacgaggtatggaagcactgaaaaagttgaaatgttttgacggatgcccgcagccgtatgacacaaagaagaaattcgtacttcccaattctcttcgccacatcgcattgaaaccgcgacgcaaatattgcacag

SEQ ID NO: 83568 - DNA, 1174 bp, Heterodera glycines
atgaaaagacgcgttccctactataagcaattctttcttgacctaattgcaaatgattggagtccaaatgcgccaacaattgacgacaaaccgctgcaaaaagaggcagtgcgatggctatttattgactgctttttgtgcattgaaatggccaaaacgataccagcaatttggcaactcccattgattgatcaggcaattaattattcactaatctaattgactaattactacataattacattttttctgctatggtaatccctgctgacgcgtttcatttacttaggatgtcaactaagttctgtgggttttcgatttttttacttggttaactcttattccttaaattctatgttcatggtattgatgtcatacctgaaaatggcaaattttttcgaatgtgatggaaattatttaagtcatgcttatgttttgttgaattttatatcgaagggcgacataactgagttgacacgctaagtaaatccatctaattattagcgaaagcaatttaaaaaattattatttattaatgaggttataaatccatcatataattagctgaagtaataaaaaataataattatttattaatgagcttaaagtgttcatttttagacttctctgctactcaacaacataattctgaccgctgtgttcaacaaaactttctacagctgcgtcaattgtccaaatgccgaaacgctaactcttcccagcggattctctccaatttttttgggcacttttaatgtggcgattcgcgtgttttgcgaatcaattaagtgtttcaaagaaattaatttgagtatggaagaatttgttctcctcaggggcatgattttgcttcaacatggtcataacagttttaaaaataatattattttcattagcaatttttcaactatttaatttaaacgaaaaatttgggtgctttcatattcctggagcccaattgaaatacgtggggatatctgtttttgattttgtgattttaagcttggcactgacggcaagtattaccacttatttcctatttaaaagcttccaattatttttcaatatttgtttgaattcggctccggggttcggttattgggcaaatgggagtttagattcatgctccgcatccactaaaattccccgaaactgtttttgagtactgaataaa

SEQ ID NO: 83569 - DNA, 796 bp, Heterodera glycines
atggaggacttcaagcagaagatgcggaagcaaatcgacgagttcaagtcggagagtgagttgttttggtggggggggggggggaggagggggaagagtgaatttatgagactgcaatttgtgttccccccttttttttgaatgaattcggttataatgccaatgccttctgtagagtttccggatcactggtcatgaatatgggctttacctttaacggatccaaattggttcagggattcgtattgattaggaatgacaaattaatatcacatatttagagataggcgggacttcatatacactgacaatgagacggaactttctctctaaactcaaaaaattcctaattaaaatttcagaaaaaatctctcttattatcattatgggactttgcaaatatacctgtatcacaatcattacgtgaagtcccgcctgatctctattaatcagtgactctgagaagcccttgaaaatatttcgatgccttaacaaatcggcaacatttgttcaattaaagaaaccgacgttgccctttttcagtcgcacttggccaccaggaaattgagaacaagcgaaaagagttggagcagctgaaggccaaattcgatgccgaaatcgacgaaccgcaaattgggccggaagtgaagcgcgagatttggtgggttttggattttacaccagagtggccaagtttttttttcaaaaaaaggacaaacgaggctaaaactaagattttgaccccaaaaataagatttttctacaactaatagtagcgcgaaggaaacgtaataaa

SEQ ID NO: 83570 - DNA, 425 bp, Heterodera glycines
atgacaaatcaactccaggaaaggaaaaaactattggacgcaggtaaattaatttttaaaaattcattttaataaaaacgaaaaatttgcgcagagattgaacagttgcaaaaggaactgaatgaaattgaagcggacaatgcggaaaaacagaaacagctcagtgacggttggttcggtttcactccgctgggtccaaattttttaggcttcgtattgcgaattttcgaataatttgtcgtaaccccccccccccccccaaaaaaaaattaggggccataattcgaattcagacgaatttgccatgtattttttcagaacagaatttgttgacggaagtgcgtacggaggagggaatccaacagcacaaactgcgccaactgaaggaatcgctcgaatgccatgagaaggcactcgaagagtaa

SEQ ID NO: 83571 - DNA, 75 bp, Heterodera glycines
caagcactgccgcttccgttgacaatagcacacaatccaccgccgtggagcatatcgcttttcaaacaccaaatg

SEQ ID NO: 83572 - DNA, 1227 bp, Heterodera glycines
atggcaccagaaattccggaggatctttaccatctgatcaagaaggcggttagtatccgcaagcatttggagcgtttccgcaaggacattgactcaaagtatgaaaatcaattcgagtccaaactcaatttaagcgtccaattaatgactatcattttcctaggccgtaacttttttcttactacgtcattgcctatattcttggtattaagcgcaagcttaaaacctacagaatttttataattaaattacgagctaataacaattgacaaaatattcttttatgttcgaaaatgagaatgatcattggttggacgcctaaactggaattaccgacattgggcccacaattcctaatgattattgacgtttgtgcatgtttttaggtaccgtctaattttggtggagagtcgaatccaccgtctcgcccgttacttcaaaaccaaacggatgctcccgcccacttggaagtacgaatcggcgaccgcctccgcactcgtctcttaatttggcgatgaaggctgctgctaacgcacatttttatttgttgatgattgaattaaactgttgatcttttgtttccctttgttattttttggtatttctccaggaattactttttaatttgttcattatttaccatcgtttttttgcattaagtgaagtaaaaaacaatgattgtcaatggttcgttgaaaatttgccggacagcgctcggtccgtttgttcgtcgggcatcggtaagccttttcccttggaattgtggttaatttttgaaggagaattatagtttattagcgaatttaaaagtcaaatttgaattcatttccattcgttcgtcttttggtgcttcatttcaacatttaattgttttacggctcatctactgtttcacttttgcataattatttcctaaaaattaggcttccgcgctgggtcttccgcttgaggacggtccgtccgtttctccgccttcggtggaccgcgcgaaggacatttcgccgcgcgtccgttcgctcgtcgaccaaattgccgaactttcattggtcgaagtgagtttcgaattgtttcatttttcatggtaaaatttacaggtctccgatttgaattttgctctgaaaaagcgtctgaacattcccgacactcccgcgatggcaatgagtccggaaatgtttgcagctgccggaatgtttggagcacaagcgggcggagcagcgggagcacaaa

SEQ ID NO: 83573 - DNA, 166 bp, Heterodera glycines
tttcaacgacgtcggacattcggccgacgcgaaaaagatggccgatgattatttggtgggcgaattgaaggaggacgaaggccaaacgaccgctggggtttcactgccggaagaggcgaaaagggacgaaccgacggagtcgtggcggcaaattctgagcagtccg

SEQ ID NO: 83574 - DNA, 1329 bp, Heterodera glycines
atgcaagcagttcgtgaacagcttgagaaggaccttgcatccaggttgggttagtggtcgcgtccaatttggcattttgagactttccatactaattttttgaaataaatatgtccgattctcttttcagtaaccgaacaatcgaagctctgcgcaatgagctcgccagcaaggaaatggagttcttggagcaggccaagacgctgagcgaaacggtcaacaaatcggaggacgaacgatcaaaatacgaacagcagcaaatgacgctggagaagactggacacgaagcgcagctcaaggtggcacaatgccaggccgaaattgaaaagttgcagctcgactgtgagcaggtcagttagttcggcacaattcgtgattccaatctaaattgcatttttctgaaaacttgtaaggcacgtgactctttttagaacttggctaaattcacggaactgtccgacgccaacctgcgcctgaccaccgatttggcacgcgaaattgccaaaactgaggagtttgagcggagacttgcggacgccaacaatttgatgaatgccgagcgtgagcaacaccagcaatcatttgtaaattcttatattttttaactttatttattttcattccttttagcaaattttggagcaagaaaaattgcgtttgaatgacgagatcaaggagttcatgaagcgggacgaggagaatgtgcagaaacagggggtctatctggacgaaattcaaaaggtcagttttttttttttatttggaaaattttcaaaaaattctgtagttggtccaacaaaattcattcatggaacgcctcaatcaaaccattgcatcgccgacatcaagcagcagtctcaacgcatcattcattgctggcacaccgaacacatcgtaagtttgggatatttgatttgatttaattggatattttaagcaaaatttaacttttccattcaataacccagaaaaacggaacaaaattgattaaacgaaaattagaaaaaaatttactctttcaatctattttcaggcgtttgtcaaccacggtcaaccagggctcgtaagttttttttattttccgaattgcggaactaaaaatttaaaatttggtgtttttttagttatatggccgagcaacaacagcagcagcacagtgaccggatgaatgtgatcattggctatatgcgtgccgagaagcaaaaggagacggaaatgcgaatgaatgccgagttggaattgcaacgcatccgaacacaggccaacattgaccagcacaaaattgtgcacatggaggcggaagtggccaaactgcgaaaggaagcggag

SEQ ID NO: 83575 - DNA, 372 bp, Heterodera glycines
agccccgtttttttgttgtcaggatgatttgcgactgctgcgtgacaactatgctaagcaggagctgctcatccgtgagctgagcgagcagcgcgagcagtaccgacagctgtacgaacagcagcagatgatgggtgacaacacaacgccagcaaccacggggttgacggcgcccagcgcaaattcaaacgcatcgtcgctgtcctcggcagcaacaacgaccaacgctgtcgaccaaccgccgcaacaaatgcagaaacgccgggagagcattgacacgctgcagagcgagctgtacatgtggcgttcaaaggccgaacgactgcaggaaacgctgtcctatgtgaacgacgacagacagaccaatgagaa

SEQ ID NO: 83576 - DNA, 1314 bp, Heterodera glycines
atggccgttattcttaacggagaattccatcgccgcataagcagcatgcaggctggtacaactcagattcctggctttggccagttgtacattctggacccagtcgaggctatggaacagcgtcgaaacaaccccaggtttactggggagaaaatcacaaacgaagatgagtttgtgcagggtcaccagctaaatgagcagactcttgagatcttagaacaaatgatccaagtgcatcatcctgctgcgcaagcatataagcaggcgcgtgagcagctcagtgagctactccaacaacaaactccggaagagcttcgcttcttccgcatgactttgttgaatgagcgcagggccccagctggtctgaaagacccaaaattgcacccacaccaaataatcaccccttctacgggtgaagggatgttcgctattcatgcggaccccactggtgctcctccacccaaaggaatttgggtagagaacaaacaagggcaattaaatgaaattgctcctttcagtccgtggactgatagtcttacgtatccattaatcaagccaatgggcgatgatggatacacaactggcattaaatatgctaagccaccatcgcgtaagcgaaaaggtgctcagaatgcatctggcctatttcactcggaagccgagtcagataatgagtcgtgcgagactcagtcaattgcatcatctgatgctgggtcagtcgcaaattcagatgctgaatctgtagcatctgtttcatcgcagcaccggcggattgacaaatccaaacaatttatctccctgcgagattattgcaagtattatctcgcaataagggatgaaaatatggagttgcaataccaccacatcctttcatgtggtggaggacttggtcagcgctggatccttgaccaggctgcaaaaattgattggcaaattgcaacatttttgcgtagacctgacatggacctgcggatcagcactccaaaaaatctgctgcagtatttggtcaaccaatacaacaggcagcaggcacggcaaaaccccaatgcccaacagaaaactgttgatgacattggcagtgttgttcggctttccgaacacaacgtaaattctctccaatattggaagaaaatgtatgaggattgcaacaccgtttttgcacggtgtcatgacgcgaaaaaggcgcgtctcttcatcacattcacgaacaacagggaatggcctgagttcaaagagaatatatataaaaacggtcaagtatttactgaccgttttgacatgtggatgcgtgtttggaccagcaaaaatcgctga

SEQ ID NO: 83577 - DNA, 1520 bp, Heterodera glycines
atgtcttcgaaaaatgtttttgctttgaaaaagaagcataaaacgcgaaagaattccgaatcgtcgaaagggagcagcgaatcgtcagcaagccagaagagccaccgatcgcaaccgaagtgttggcgttgcggaaaatggcactctcccaagcgttgttcgcatggcaagtccacctgcagaaagtgcaatgagactggacatttggagaggatgtgcgaccagcacaaggcttggcttaaaagaaatagggagaaaaaggatggaaaagccgtgaacacatttcggcttggaggattatttctgccggactcagaaagtcggagaaaactgatcgaggttctgttgaagatgaatggcactgaagtggaatttattgctgattttggcactgaaagaactgtggtcacgaaggacgcacaccgccaaatcggaagtccatggttgagccgttgcactgaacgggcaaaataccacgacggatccactcgccctcttttgggaaaagggcaggcaaagttctcgatcggtgatcgctcatgcgatggacaattctatgttgccaaaggaacaaagaatttgcttggcatagacatgcttcacagtttgggactgttggatagcttcaggaagagcctggaagggaatgtccaagtggcagaagcaaacacgaagtccgattcaactgatgctcaaagtgaaaacccgaagaagaaacaccacggaaataagccaaaatttgctttgggagcaaaggtcattgctagtttgggactgcaaccttggcgcgctggatacgtcgttaaccgtcaagggacgatgtacgaaatccgttttccagatggaacaaccggcaaattcccagaaaaaggtgtagaggcatgtgttttggactcggacgaagaaatttttgatggtttggacctaagagaggcaccatccgatggaaaaacgtcgaagggcttggtcggcattgattgtgaccagcgaaagcgtgaaaacgtgatcgcctgacagccgacgaaccgatgagccaccgccgaaggatgaagcggatggacggatcaattttttttaagggggaaggtgttaggccggtacccaaatgtccgcctcattttatttattttgtatgtttccctcgtcccccttatctctgtctctccctccgtccataaatagcccgctttttgaccttccctcgtcatttgtctcattcgcatcattttcccgcaattttgttatttcattttatttgctccataaatatcgacttatttgtttgccactcaacggcataacaagttctgattctctgttcatcttctatctctcgtataatgcactttgttcagttggttgcatcattagcagccggaccgggaaggtcgttgatctgtcatgtgttcagttcggtcggtcgtttgttcgtccgttgatgttgacgcccgggggtacaaagcaaagctccttcaattttcaaagataaagaaacataagtacagtcgaggataacaaca

SEQ ID NO: 83578 - DNA, 3101 bp, Heterodera glycines
atggccaacaaagtgtacgtgaagaaaggcatcagagtgaagaacgcgttcaaaaagaaaattgaggaaaactacggtggacggatggaaacggtggactttgaggacatcgaagggacggcggaggtgggaaattgttttattggcatagtgccaaacagttccgaaaatagaaaaatttcgagctaaaaaacgccggccctgctggaatattttccccattttatggtttttttttttgcaaaactaaaaggttttccccatgggtttttgataacggcaatttgcgatcattaaaaaaagctttccacaaattggacagcctttttttgcctttcagataatcaaccattttcgtgaaaagaaacgacccaacaaaaaaaatccacgaattttgtcacccccccgacccactttgaccaaaaaacctcggtaaaagggcaaaaggaaccgcccctattcaccctttttttttaaaaaaaaaacccaaattttttttttcaaatttaccccctcaaaaaaaattttggggaaaaaatggggaaattttttcaaaaagggggagaaaaattaaaaattttttaaattttttttgaggtgtgggggggtgaaaaaaccgccccttcttcttaaaaggggggtgggggggggaaaaaattctaaaaaaaaaaattccccccaaaaagaggggtttttttttttggggggcccgaacacccaaaaaaaaaagggggggggggagaaacaccccctttttttttaatttttgaaaaaaaaaaataaaaatggggtttttttttttttttttgttgggggggggcgggccccccccccaaaaattcccccgcccccctctttttctaaaatttttttttctccaacgcgagaaaaaaatttttttttaaaaaaaatatttttttttttttttttaaaaaaaaaaaaaaaaaaaaaaaaaatttttttggtgggggggaaggagaaaagaaaaaaaaaagagagacgcggtggtttgtgtttttgtttgtcggccttcccctcccccttccaaaaaacaaaaaaaaaaggagtgtgtgttgttgtttggttgtttttgggtgggggcggcgggcgggggggggggggggggaaagaaaaaaaaaaaaaaaaaaaaaaataaatataatttattttttttttttttttttttttttttttttttttttttttttttttcttttctctctcctcttttttccaatccaacaaaaaaaaaaaaaaaaaaaaaagaggggggggggggggggggggggggcggccgcccccccccccccccccccccccccccccccccttctttctttttattttgttaacagatttcgtttaaaagtgacccaatttacaattttgatttttaaaagagatataaaagatagaggtcatccggcggtgccaataggcgctgccgggaaaatttcaacaattttgaatgaaatttgcgatgaaaaatgagttaggtaattaaatttattatttaatttattcaaaaatatttggcattctgtatttgaaaaattttcaaaaatgcaacgcggatccctcgagatcccgcacaaaaaaatcaaatttgcgggtcccgctgcgggataaaatattttaacaattaaaaagaaatatattaattaaattttaatattttaagtaataaataaacgaaaaaagtaaaaaatattttttatattgataaattaacacctgcacaaataaaggacaatcgcatttgatccagcagaagcattcaacaaaatgccagaaatagaaccaacttgccaagctcgaattgggggccttaagaaatttgaaaaatttaaaattcaaattaatttaaaataccccaaaattgagccaaatgcatacagcaattgatatatggccaaattggtcagatatccgccaatattaatggacaaaatgatgatcaatgaccgtaaaactcgtgtgttcgtctgttgggttactgtaaaaaatattttgaattttaaaatgccaaagaaatgaatgccaagatttaccggcatttttgcatctgatgatcacaaaaatggacacataacagcaagtgctacccaatgaaataatgaatgtgccggcgaagaatttataaccaacggggcccagcaaagtttcggccacaacaccggtggttggactgaataaatttaaaattattaattaattttaatttttgatttaattgcgccatactttcccgcattttcgaatgcaaatgcgagcacataattcagtgtaaatgcaccgtaaattacacaaattaacagatggccaagcaaatatgagaatttgtatttagtgaaaatggaggagtgtctaaaatgaacagtccaaataaataaacaattaagtattgttaggataattagggtttgtggcagctaattaaatgagataaattttttaattcgtttccatccgtacttaaatggcaatgcaacagcaaaaagtcggtcaaaagcagcacaaaacattgccattaagccacaattcacagcaaaaatcattggctaaaaattgaaaaattaaatcaaaataaaaataatttgaaattcagaatttaccgtcataattaagtcagcagtgagcaaactgacaaaatttgtgcccaaaatgacaacaaccacaaaaaaagtgtgccacaatttatagcaaaaattggaggctgaaaaataggaaataaaaaaaaaatttgaaattttaaaatataccgtcataattaagtcagcagtgagtaaactgacaaaatttgtgcccaaaatgacaacaaccaggaaaaaagtgtgcccaatttggtggaccaattcacaaaggcaaatcaatgccatcagaaaattggctgagccgcggagggaactgaaaaatgagaaattgaattaaattggtaaacagaaattaattaaattgatttaaatttagaaatgccctggcatttgcctggatttgacagtgaccaccaaaactgtgccgttcaacacaatgccaaccaacgcaaccaaatacaccgcaacggccggcacaatcaagtcggcggacggaccggcgaaacg

SEQ ID NO: 83579 - DNA, 705 bp, Heterodera glycines
atgatttttgctgtgaattgtggcttaatggcaatgttttgtgctgcttttgaccgactttttgctgttgcattgccatttaagtacggatggaaacgaattaaaaaatttatctcatttaattagctgccacaaaccctaattatcctaacaatacttaattgtttatttatttggactgttcattttagacactcctccattttcactaaatacaaattctcatatttgcttggccatctgttaatttgtgtaatttacggtgcatttacactgaattatgtgctcgcatttgcattcgaaaatgcgggaaagtatggcgcaattaaatcaaaaattaaaattaattaataattttaaatttattcagtccaaccaccggtgttgtggccgaaactttgctgggccccgttggttataaattcttcgccggcacattcattatttcattgggtagcacttgctgttatgtgtccatttttgtgatcatcagatgcaaaaatgccggtaaatcttggcattcatttctttggcattttaaaattcaaaatattttttacagtaacccaacagacgaacacacgagttttacggtcattgatcatcattttgtccattaatattggcggatatctgaccaatttggccatatatcaattgctgtatgcatttggctcaattttggggtattttaaattaatttga

SEQ ID NO: 83580 - DNA, 821 bp, Heterodera glycines
gcaacacatcattttcaacttgaagctggaaattatgtgattataccatcaacgtttggaagaaatgaagaaggggagtttttattgcgcatttttacgacagggactattggaatgtagtaagtttttgagtccgagtattttcaaaaatattctccataatgtagtttaattaaatttcttccgtttgaatggtcggcgtcagggatggcattcagaggccccaaaattttctgtaatcggaatcccgggacccaaaaattgttggaaattgaaattctgaccccaaaaagtcggaaattttgaataaaatatcatcaaaaatttaaaagtgaaaggtgatgtcaaaaaatttaggttttttacttaaaaaaatattctgctttttatcagaatctttttcaaattgtggcaggggacccggcggtgccgataggcgccgccgggaaattctgaaattttgcatgcatttgttaagattttgtcaaaaatgaccgaatttttatttgaaagccaaatgaagcagaaattacatacaaaaaactaattgtgtctctattttaaataaatcattttggtttggcaaaaaaaaaaaattcctactttttatcataaatttcagtaacccaaattccggtcaaaaaactttggaaatactgaattcattgccatccctgctggtcagcgtgaccaaatacgaaatggggtattagttttaaaaaagcaacaaaactgcttttggtaatggcagggtaatatgtgtggaggtggaaaagtacaaggggtaaatatattaatctttctcattaaaaaaagtaaaa

SEQ ID NO: 83581 - DNA, 1557 bp, Heterodera glycines
ttaaccaccatccctttagtgaacctcccgagttaccgtactaattaatgacttattcgtcttcccttcacatttctcccccagcgatgaattgctctggcgacgccccaattcctccgcaaatgatttttcgttggacacacaacggaagcgtggccatttgttattccattgtccgttttaactatgcaattatttgtggaggggcggggaaaatgaaagtgccaaattaattcatttcttactcagagaatgacacagagaatcattttttatttttcaaaaaaggtttttgtgatcgctttgtttggcaatcttttggtgattgctgtgttaatcaggtaaattaatggcttttagagaagcatagagaacaactgaccagacgaactcatctgatcagactattctgctttttaccgaataaataatccatgttcagaaaccaatgcatcaaaaaacgacgagtgaataccattctcttccacatgacaattgctcagcttctcggttcgtcccaatttgttttggctaattgtcgtccatttccattttcatttccaatttttctgtcaattccctccgttcagtgactttggtatatatccccaaagaaattgtgcacaatttgaccatcgcgtggctctggggcgactttgtgagtgttggtgaggtgaatgcaatttctgatgtgctctccccgttttaacagttgtgccgattctgtaaattcttcgatgtcttcggcgtaacactttctgccggcattttgatttgtctgagcatggacaggtgccaatgccaaacccaaccgattggccaccctttcccccccctcattcagtgcctcccgtcattttcaggttctactccattctgttccctctttacgtgatcaatgccaaacggagtgtccagtggatgctctccgttgcctggtgatccctccccttttgcgtcgtctttttccattttgctgcccctcttaggcttgtcagctttttgagcagcatccctcaagttcgccccccccccaattcgttgctaattaatgtccgccctttcagatctacatcttccgcactggttcgattcgtccgtttcttttcctcttccctttccgactttctttccgcttaagctcatcatccgtgctttgttcacttcactcagtgtgtgtcggcagatgtcatcggaatggtgtcgccttcagttgtctattggttttccgtgcttaacattgtacaggtccgctctctctctttctctcccctctctcctcccttttccttgtctctctctttcccctctctctcacaatttctctccccctcttttccggtctacttcatccctctgctggtcatcgtcgtctgctatggctcaattttggtgtccatttctctcaaaagtgccggtattcacgtgccgtcagcccgttcaaaccactcgcagccccaaacaaatacggccaaaaaggcacttttgcgaggcgaacacaaagagacttttggatgacggcgcaggaagagcagtttgacggcgacggtgagaacg

SEQ ID NO: 83582 - DNA, 504 bp, Heterodera glycines; identical to SEQ ID NO: 66584

SEQ ID NO: 83583 - DNA, 521 bp, Heterodera glycines
atggacgctgaggatgggcttttgctgctcgctcaacttggaatacagaaggcgtacaagcggatgaaggcgattttacggccattgtttgtgcaccattgctgccgtccatcaatgttgagcagatgctgttggctccgttccatgtcttccaaggcctcggaaaatgctctgatcaaggagttggaagcgggagaaaatgccgaagtcgcccagaaattcttcagacggatagggccaaggagggaagcgttcagaaagcgagacatgacggggaacagcatccggaaaatcctcgtccacgccgatcaaatggaggcccttttcgagacggaatggggcaaaacaatttgccaaacgatggcacatttggggaaaatccaaattttcaccaaagtgattgtcttcattttttgtgtaaatattttttaatttaaggcccagctattgtccccaggtgatttggacggactggaacagcagttgagcagttcaaggcatttctcgacgaacaaccaatg

SEQ ID NO: 83584 - DNA, 77 bp, Heterodera glycines
tagagaaaaaaagtaatgtttttctctggcactctctatttattggtacacatctcgttttttcggacggtgtgtta

SEQ ID NO: 83585 - DNA, 520 bp, Heterodera glycines
atgaagaagagggaaaagaagaagaagctgatgaagccgtacaaacggagaggaatgacaaagaggaaaaaggaggagagaaagaaagagccgacaaagagaaaagagaagaagagacaccccggggggaagaggaaggaaaaagagaaggaagtgagggacacggaaccggaactgagtggagaagagacgccaaagaaacagacagacagaggggggagaggagtagaaagaaagagagaaaggagaccaatgatagtacaacagaaaaaggaggaggaagagagagaggaggaagaggaaggggaggcgtatcaaccgttgaagcatggcggagacaaagaattgctgggaatgtcgccgaagagcattctgaagggatcgaaacggaagaagggaatggaagaagcagcggatccgaaaccgcaacagtggaggcggagggacaaatggaagaagccgaccgaggaagacggagaagggcactcccgaggaaacaatgggacgggaagggacggag

SEQ ID NO: 83586 - DNA, 2958 bp, Heterodera glycines
ttgagtgtgatcagccaacttgcgcattttgacgatgtcagtccccttggtcagtttctgcacaaagcggcaacccaaaccgagcgtagcaactcatttggcttcattaaaattgtgccaaaaacggtagaaatcggcactcactttttactctcatgaaacttgtctatgttttgcagacattttcattgaaattgggccacccaaaagtgcgtgacatcattctgcagcagttgcctatgaacaatgccacacattttatcatgtcggcatgctatgggtcaattgtggcagggatcgtaacttttaatgagcgcagtgccatcggcaaaaccgacatttcaaatgcgaaaagggtctgttgaaaaaggcatagtatttttaaagctgtaaatttgttcaagattgttcgtaagtttctggctgggcctggactgagtccttcggacaaatcattcatctctcatctgaataaatcaatttcgtgcagtgttttcgttgacccttctattggaaattgcttgactgatttggttcgttttaagcgaattgtgttcattttaaaacaattccaatcggatttcgttcaggattttgtcaaaggactcaactcttttgccgataagtgggcggctgctaaagacacaaaacatccgactccgatcagtttttcgttggtcccactgtcttctattggcgacaaaacccgattcaatcccgtctctactcatatgatcggtgatttgtttattcttttgattaatcttaattatccctatgatcagcagatgaacatcagtttgaatggttttgtggccatgtgaaaactgtgaatgaatatgattggttgttgcggaaagtccgtcaatcattgaacgaatgttctgccatgttaacgttagattttggcaatttacagataatttaaaaatttgtttcaggaataacgagctggacgacgctcaagaattttttgaacaattggaagagaggaaaaacattttttacgattcgttgaaagatttcatcgtggatttgcgaatgtgcaaagccgaatctcaaaaagaggccattgtgcaaagggcagtcgatgattatgtacatttctgccaacgtatagttggtcattatgaagagttggtgaaagagaagaaggaaatggtcaacgaattgaagcaaaaaggcaaattctttgggaagatttctcatccaataacctttttgttatttaaggcgtcacttacatcggtcgttccactcgccaaaaattggactcgcgttttgcttttgatgactccaattcttccgtttttcattttattttgttgagaaattcgtctgttccgccggttcaaaatcaacacacttcctttttgctttgccttggcaaactttacgagttagtgtcacgtggaaaatgtacttttgtcgatttggatgttctgcgggatggcgaagaagcgcaggcggacgaaggactgccggaggacattcgctcattgaacggatatccaagctttggaatgcgtctgataaaaatgcgtgggaacaaattgttgtcgaatgattacatggcagaggaggaacggaaattgcaatatccaattgctcgggttcgttaaaacggaggagagggcggcattggctcatggtccaaaattaaaaccaaagagaattcagataatttttaatattttcttgtatatggaggaggaaacgattcattctcgtctccataatttttggtttaaaacctgaaatctattaaggaattaaattataaaattcacgttttttaactattttttaaattgaatttcaaaacaaaaatatttaaatgtttttattgggtttcatttgcgcagattgagaacattcgacgaacagaagttggagcagtgcctgaagctgattccaaagacatccaggcctgcagtttgccgtgccctttatgtgaaggctatggtggaaattgcccgaacactgaccatatgtggatgtgcgatgattgttgcgaagcattaacttttgtgcaaatagaaaaagtaattgttgtttggtaatattagaaaaaaataattactcacaggaacaagcacaaattacgcatttcttttgcgcttgtggaaaaacgccagtggacggattttcttttcgctgttccgatgtggcaaaacatggaactgagttcaagcatttttgctcaaaagtgtcgctggaaaaggaattggatcggttgaacaacaaaggcatgctgacctttttgctgcttggtgagacgggtgttggcaaatcgactctgatcaacgcactcatcgcttacctgaaacatgcgactttgaaagaagcgcttgaggtgaccgagtttattaaatgttgtgtttgtaattggcattatctaaatccaaaataggcgaatgaaattgactgggtgatcccggcccgattttgtacgggtcgttatgacagcaaagggaatcggcaaaggattgaagtgcgactgggcgaggagagcaaggaggagcggcttgaagctggtgaatcgcaaaccaaatggccaaatgcatatgtgattccgtcaaaaggtcgaccaaatagttatttctttcatgatcattagtgacactttcagatgggcacaaagttcgaataatcgacgcgccgggcatcggtgacacaaacggcatcaatgaagacaatatcaattttgacaagacactcaacttcatcagcacactccccgaacttcatgccgtttgcattctgctgcgccccaacagtcctcgcgctacgcccgcaatcagatattgcattgaaggactgctcacgtatttgcacaaaaatgcaaccaacgtaacttcgtagtaattgggagaatgaataaatcaaacactttagaacattgtttttgtgttcaccaacgcacgcgggtccagttatgacatgggcaagttttaa

SEQ ID NO: 83587 - DNA, 644 bp, Heterodera glycines
atgctcgtgacagtgcttcatgtacagcgtgacatcaccagtaagtgtacgatggatggaagtgcaacaggtctaaatgaacacgaacacattttgaaatgtaattccaatgaaaaacaaaggtgagtgttgttaggtttaactatttttcataccgcggcgcaaacagtgcgcgggtaaggcaaatggacaaattcaattgtttcaagagtgggagctttttccacctgctccactccgagttcgatggcctcttcgtattttttgatccggtcaaggtttgtctgaaatggcaaggaggcataattaacaccaaaatgacaactaaatggtaatttgcctgaattttttcagtgataagtgccaacggttcggacaaatcgatgatcgttcgacgcgcttcgttgaccgacacggtttcccacgtgcggtgcggttccaaattggacacatgtttgaacagtcgccgaaattccttctctgcatgggcccaactcctcgaaaaattgtccttctcttcttggtcgtattcaatgccgccctttttgatcagacacaatgcctcatacgcttcgttgtccacacagtaaattcggtcccgatggagtggaattgacacctttttataggggaaagcgaataaa

SEQ ID NO: 83588 - DNA, 1372 bp, Heterodera glycines
  unsure (1)..(1372): unsure at all n locations
atggacggattcggtggcaccgcttccggcgcgattggtagccccaacagcgacgcgggcagcatttattggatgtcaccggacccgaactcgccggacctgcaggcgtggacgggtgcgagcggtggcagtgcggtgggcgccggcgcgccggtgccacagcagcaacaacagcccaccggcgggtgggtactcaaagggcagtgctcggaaatctgatcactataattcggatgatcggaatgatttgaaattgcgtttgggtccgattagaacttggagacagagatattccaatgcattttaaattgagcacgaaattatgatttctagttgccgaaattctttgtgccgtcagaattccgattcccgacattttttcagctgttggaatgccgattttcgattgccaaattttttgagggcgtcggcacacatctccgataggcacacagccgtccactaattgcctaggctatctgacagagaaatttgttgcaaattgatggctatcaaaattcaaatctgtgatcaaaagatccatgtttttggttcagataaggccgtaatcactttgttttgggtctttgtgtgggatccattacagccaaattttgtattgtttaccgtttgccagcactgagtcatttgggagacggtttaagtctaatttgctaccgtaaaccgtttagatagcgtttctaagaattgttaaaattatgaaaagtcgaaatcctttagggctgcttctgtccctggccaagcggttggcggcggcgcgtcatcgccgatgatgaatgccgccgctgtcgcctatggtatccaacaacagcagcttcaacaagcgcaacaatcgctttcggcaccgcaaatgccatcgcaacaagcgcaagcatcggcacaacagcagcagcagccaattggcatggcattggcacagccccaacaacaacaagttcagcaacaacaacaacagcccatgtccatgatgccataccagccgcaggtgggtgcgagtttggcactgaaatgcttcctgaaagtgccggtttatcccttcgaaatcttacccggatttaagccaaccgaatcacgaaaaaacaaattaagtctcggataaatgccaacaatattaaccctttcaaaactttaagctaaaagactgcatttttcccaagggtggtggtgccggtgtctatggctacggtggccaacagggcggctacggtatgggcggcggttacggtagttcttctgctggtggtggccaaatgccggtgtcgccgtactcgtcctacttggagaaacagatcagcacctatccgtaatgcctgatcagcaagttctgatcaatcaaattcatttttanata

SEQ ID NO: 83589 - DNA, 1647 bp, Heterodera glycines
aattgaaaagctgaaaaacatcatccgacagaacgagagcgcttttgtgaaacctggagaagtcggactctttaaaggacaaacgatacaccgcatcgacctaatcgatggcgcacggccggtccaacagaggccctatcgttatcctgtcgcacttcaacccgaaatagagcgtcaagtcaaggagttgctgcgtcaaaatgtcattcgaccatccacttcggcatggtcatctccaattgtgcttgtccgaaagcctgatgcctcctatcgattttgtgttgactaccggaagctcaaccaattgacgaagcgatcgacatattatttaccgaggattcaatcgatccttgacgaagtctctgggaaaaaatatttctccgtggcggactgctcaagcggattttttcatattaaactggcgaaaggacacgaagaaaggagcgcattcatctgccacatgggactgttcgaatggctacgttgtcccttcggattggcgggagcaccaacaaccttccaacgagccatggaagaagtccgacaaatgtgctcagcgacatttcttgtgtatttggacgattgcataatcggctcaatgactgaagatgaacatcttcgggacatcaatacttttctaagaacgatgactgaagttggattcagactgaaaccagagaaatgaagatttgcattgatagagattcgctatttgggacatttaatttcggctaatggcgttcggatagatccaaaggatttggagccaattcacaaattgaggaaaccgaaaaatatcaccgaactccgatccttgattggaatgctgtcatattttcgaaaattcgtctacggatttgcagaaatactccaacccatttatgagttgacaaaaaatgaaagcacgacagaatggggaccaccacatgagaaagccttggaggaattgaagacaaagctgatgactgctccagttttggctccaccaaaattcggacaaccattcgttgtggaaacagatgccagcataaaagcaattgccggatgtcttctacaagaaaaccgtgaaggcgaagtccatccgatttgttacttcagccgagtgctaacaaaacatgaaaagcgctattcggtggtcgaattagaagccttagcaatttgtgcttccctcaagaattttcgaccatatttggaaggagctggaaaatcaacagtgatcacggacaattcggctttgacatcattattccggcggaaggacttggaagggcgactcagtcgataccaattggctatcatggcattcgatgttgaaatcattcatcgccctggaaagcggaaccaattttgtgaccatctttcacgatacttggacgacaacgacacacaaattaattggctgaaaattgaaccaaaaatttcacaaagtgaaatgcgcgaggctcaaaaacaagagacggacacacaaaagagacgggaaactttaaagaaggatcaaaattcagaggaaccaaatgaattctctggaaaatggaaaatacggaagatcttttgtgtgcaatggaccgaggcgaatggaaaatttatgtgcctaatagtctgaggcaaagagtgatgaaggaataccactctgaccctttcccaagg

SEQ ID NO: 83590 - DNA, 2194 bp, Heterodera glycines
atggcaattgttctaaaagtttcaaaatattggttaaagaaaattgggaaagtagcaatttcatcacatattagaaatatttcagaagaacaatttattaatccacaggatttcgaaaaagccgaaattttagtgattaaacaaggacaaatgaattggcaaaattatgccggaaaagaccaaattagaacatttattgataatgatgacctgatcagattagactcacgtattaaaaactgcgaaatgcaatattcgtttaaattcccgattgtttttccaaagggagcagcaattctcgagttattagcatggcgatcacacataaaagtcaaacacggaaaagttgatgcgactttaaatgaatttatgtccgagttttgggctccaaatattagagcaacaattaaaaaggttataaagatgtgtgtaaattgtaaaaagttgagtggcccagcattctcattaccaatcatgccatcacatccacaagaaagggtaaaaatttcccaaccatttaattcagtggcaatcgattatttgggaccctcattagtaaaaaatgaaggaaaaacaataaaattttggatagttttaatcacatgtttagttacaagagcagtttatcttgaacctgtcttagatttatctgcttactcatttttgcaaattttgagacgatttgcaagcagaagaggaacaccaaaaagaattatatccgataatgcacaaacattccgattatcagcaaaagttgcaggtgcatatgaagcaagaggaggaaaaggaaaagatgaattagaaaaatatttagttaaaaacaaaattatttggagatttatagctctagcaccatgggctaattctttggcagaacgattagtaaaagtttgtaaagatgcgtttaaagcatcacttggaaaaatggtattaaatttggatgagttgcgcacatttataactgaagtcgagtggactatgaataaccgaccaatcactcatgtatcaattgaaccggaaggcgaaagagccctccgtccgatcgattttataaacccaggattagaattaggaataaatttacaaaatgctgatgatgataaaaatgacgaagaatttactttagagccagaaaaattggaaaacaaattaaaaattcaatggaataaaacgaacaaagttttagaatgcttttggaaaagatggcaaaaagaatatttgaccatactaagagatcggacccaatggcaccacaaagggcctaaatcacaagaaaaaagagagccaaaagaaggcgaaattgttttaattgaagatgaattccatccgaggaatacttggaaaatggggaaaataatttgcctaaatggtcaaaagggatcaattagaagtgcgcaaataaaattagcatcaaaaggaaatgaaacaaaaggaagaataattgaaagaccagtaaataaactttactcattggaagtgaataaagcaattaatgaagaaactaaacccagtcaaaattctaaaagcgaaaaaagtcttgaagaaaataaaataatacaaaacaaaaatacgcatccaatggttacaagggcaaaaactcaaaaaacattcactctataagagaaaaatgtagcctgaaatgacgtttgctaaaaaaataagcgagcggttgctcatagcgggatgcggtttgcgcatccttccggcacttttcgattgcggatcgaatggtgtaaagcgttttttgaaattttcacgtaaaaaaaagtttcttcagaaaatttttgaaaattttcggaaaattttagaactgttcgcacaaaagggtccatatctcggcggggagtgccgaaaccggcttagcgatgttttggaggataaatgtcgacactcgggcggttcgaatgagctattaagcatctttctagcataaatttaaaattgagttttgctctggacacgaattaaaaatttttggaaaaatttttgcctcaagaattaggggggatacgcagggattctgaggggttgatgagtaattataaaaaaaaatttacactggaaatacttaaaatataatattattacgccctacgtgcatttgggcattacatgtcaaatactcaccaagatacttcatgggaaattgtgtccagaatccgaaaaaattcaattttgaaaattaggttaagta

SEQ ID NO: 83591 - DNA, 845 bp, Heterodera glycines
atgccgacgggtgaatggacattacggggaatgtgttggacgtcccccgcggccacttttgtaagtttcgcttcccacattcatttcaaaaaaaatcattttgctcacacacacacacaattttaatttgatttactgtttatatttttagatttttgtaccccaattgaaaatggaagcagcaaagactggcggcaacagcaaaaaaagtcgcgccatgagcagcagcaccgacccagcggaagctgggggcaagaagcgccgcaacatgcatccggtttgtggccccccccccccaaaaaaaattagcaaatcaggaagagcctgaatatacccccaaccaaaaagtagaatttgggtcccgattccttccttatctcggggggggggggtgaatatggaaaatttgtaaaacaccccaattcatttgttttcacatttttttatagcaaattgttgacatcactcaacagcagcagcaaaatgtcgccgaattttgtccagtttcaaccgggagtgttcatcagcagcagcagcagtcggatccgcgcgcaattatgaacgtaattatggggggggacgcttttttttgctcggttttaattggggccaagaaatgttgaaacatgctgccggtctggccgcaaacaaaataggagaagcctaattaacccctccaaaaaggagtaaaatttcgtgttcatttcattcttatccggggggggggggtgaaaattttaaaccgccaaattactttgttttcgcatttttagcaaattgttgacacccctcagcagcagcagcagcagcagcaaaatgtcgcccaatttcgtccggcttcaacc

SEQ ID NO: 83592 - DNA, 1446 bp, Heterodera glycines
atgcttgaaaatgaaagtaggctggtcaattcgcctttaactaagctgcaaaccaacaattctaataacaacaatggtcaacagttgcatcaaaccaaaacaacatttccatcaattttattgcttccggatcgaaataacgaacagattattgtaagttttttcaacttaaaaaatcaaatcggtttaattgcattatatttattaaactaaaaactaacgtttattgttttagaatatggaaagtcactatcattcacaaattgaacgactttcttcactcactgaggtggaaatggctgaattggtatcgagtaatacgaatctgaacaacgtccaggctttggagattcttgatggcttgttttgtgcttttcttatagaaagtcaaaattcttctaaggtattattttgcttttattgtcatgccaagttcgtctttcagtatttgaactgtttgccttcttccgacatgtgttggaatcacatgctttacaatgccaattacgtgttaattgaagaattctcgtttctcaaatctgaatatcgtcatcggatggttcaattcttggcttacactatcaaaatgaatgttccatcggttgattcttgtctttcaaatttatttcgtgcactttccgatggtaattctaaaaaactcattaattatcatcctatcaattaaggaactgaatttgtggagacgtgcaaactcgtcttttctgtttctcagatactcagcacaaatcagaagtggctgattggcctcaaaaaaaattcattggccctggcggatgcttttgccttcatggcacgttttgtcaccgatgtgcctttggtgatcgctaatgtgtcttccgtttctatcgacttgttcaaatctgctttggtctccacttgtgaattactcatccgcgaacgtttcgttgacctggccaccacaatgggaagagacctgatgatttcgctgatgcgactttccaaattaacgcaattccaaaatgtgtggaaggcattgcttcacaacccgacttccctgatgcccaacttcagtatacaacacactcattttaattacgtttgcaattcatttaggtcttaagcaactgatgcttagtgtaccgactgataaatttctcgggtcgcgtgtttctgtcaatatcagtcggaaaattgatcaattgttaaacgttgtcagaatgctgttggggcaaaacaaaatttccgagttgactaaacactttgaggccttcaaaaacacggtttctgaattttgttatttcttcactttattttcaattttagcatttgtctgagcctgacagtgggacaatgcgtgctgagataatacgccatatttgggctcatttaaaacaagaagagcagagcgctgactgttgcgaagctcgtgcttggcttatcggctggcttttgcgctcgtccaag

SEQ ID NO: 83593 - DNA, 870 bp, Heterodera glycines
atgaaccgacggtaagcaatttgaaaagtcacaaattcgtcgtttatttgactaaactgttttcccatttcagttggatttgcaacgacgtttggatggacattttcccctgttttgaccatgctcaactcggcctcaaattggcattgctttcgccacgtttcaatgcgttggtggacaaacatttcaatggcaaaagcgaattgacaatttggagatcaatcgaaattcgtcgcaagaacagtgtcacaacagcggcaccagaatcatcggtgtttatcaactttgacaattcagtgccatttccattgcctgactaccgtccgttgcccagcaaaatccgttttaagcgccttcagattgagtaattaaaatcagagctatcgcaataaaagcattcattcattccattatttttgcagttacatcgatcattctgtcatcaattttcttcgtttaaatcgccaaattttcgacaaaagaggcaccaatttacagttgttttggatttcttcaccacacaccacggacggccagctgattttggacatttttgttcgtgaaatatggccaatttttgcgtcaaacattcgccatttgcgttttctcggtggttatcatttggacaatttgcgtcgtctcatttcgccgacatttctcaccgatctcaaccaattgaattcaatcgattccgttgatttgttgcccgatgcaattggtgattttgataggccaaatgcaacaatttctgctggccaagcgttgtccaaatggttgcactctccaagaaaagatggccaaccaaagcaattgcattgcacacttttgaaccaacaagcgtacttcgattgggtcaacaatttcaaggag

SEQ ID NO: 83594 - DNA, 766 bp, Heterodera glycines
cattccaatcactggcactcaattcccaccagcatttcaatctctgggactcaacccaccagcatttcaatcactgggactcaacccaacagcattccaatcactgggactcaattctccagcatttcaatcactgggactcaacccaccagcatttcaatcactgggactcaacccaacagcatttcaatcactgggactcaacccaccagcattccaatcactgggactcaacccaccagcatttcaatcactgggactcaacccaacagcatttcaatcactgggactcaacccaacagcatttcaatcactgggactcaacccaccagcatttcaatcactgggactcaacccaacagcatttcaatcactgggactcaacccaccagcattccaatcactgggactcaacccaccagcatttcaatcactgggactcaacccaccagcatttcaatcactgggactcaacccaacagcatttcaatcactgggactcaacccaacagcatttcaatcactgggactcaacccaccagcatttcaatcactgggactcaacccaccagcatttcaatcactgggactcaacccaccagcatttcaatcactgggactcaacccaacagcatttcaatcactgggactcaacccaccagcatttcaatcactgggactcaacccaacagcatttcaatcactgggactcaacccaccagcatttcaatcactgggactcaacccaacagcatttcaatcactg

SEQ ID NO: 83595 - DNA, 130 bp, Heterodera glycines
tatggcacggaaagacttccggtttccgacatttttggggtcggaattccgacttccgaaatttttgatgaaaagtcggaatttttttaaattttttttttcaaaaaactagtaagttttgtacaatttc

SEQ ID NO: 83596 - DNA, 743 bp, Heterodera glycines
atgctccattgtcattcagtcgctttgcgtgttggcgaccgaattgtcgcggtgagtctctttgaatttaagcaattatttaatgtttcacaggttgacggcatgtccgtgataggttacgcttgggagcaagtcgttactgagatgatttgtggtggacccgaaaagactgaattggaattaacggtcgaacggacccttccggacggaagtgaccaagcggaggagcaaactttgacagtgacacttgacaagacgcagaatggcgcaatcggtaagtatttgactcatcttcctcgtttaaatttttttaaggactcagtttggccaaacggatgggctccgacggtgttttcgtgaggaatattgcaccggactcaatcgcagcgcgagacggcactttgcgagtgggggacagaatttggcgggtgcagggagagcaaatcgctttgggagaaagtccggcgaatgtcgtcaaacggctcaaagatttatccggggaattcatcatcgaagtgcggcggaaggcgtaatttggattatcagagtcaggaagcgacaccaccacctctacccactaaaactacttaacctttgcttcgttttcactattgtccatctctgccttttcactttacatttttcaatgtgctcatttctcccctcatcagttctaattgtgatataatacttaattccagcgcattaagataactaataatattatctcgttaaattcgtca

SEQ ID NO: 83597 - DNA, 866 bp, Heterodera glycines; identical to SEQ ID NO: 3189

SEQ ID NO: 83598 - DNA, 580 bp, Heterodera glycines
atgcttccttcgcttcgtcaaatgtggtactgtgtgtgcgatgtgcagctgccaatcgcgcagaaaatttgtcggaaagattttttggaaacgctgaaggaatgcgacccggcaaatggatggcttcccgcggtactttcaccaaaccatgtcaatttgggccataactttcagggccgaattgatgccatccgatcggcgatcaaaaaggacgttgagaaaagttcggcaagaatgggcgatgacgaattcgatgaggatgttggcggaccaatgggcgctgggggcggtgctgcggaagacgaaagtgtcgctttgggggacgaggaccgagaggacatgatgctgctggacgagttggccatggaggaggaggaaacggaggaggacgagacggtggacaccggcgaagaggacgaactgatgttatttgaaggggccaagaaataccgataaaactgcactcattttgacttttttttattcaaaaataagtaaaaaataactcaaattattcgttgccgaatttatctcatcattttaatcactcccgattagtgtacatataagtctcaccgga

SEQ ID NO: 83599 - DNA, 404 bp, Heterodera glycines
gaaattcaaaacaaaaacaataacatttaaaactctttggtgcctaaatcaccagctctaccaaaatgaccttaacgatggatgaactgagaaacaaagtccaaaatggccaaattagcaccgttgtcgttggttggcccatttcaatttaaaataaaatatttgacactcctttttcactccgaaggctctgtcgatttgcacgggcgactgattgggaagcgattgacggcacggcattttgttgaaatggcgcaaaaaaaggacaaaatgtccatgtgctattatttccttgcgatgacaattgaaggtggcaatgttaaaaattattgtcaattgttccattcattgccaatgttaggccacgtggccgaagggttcgaagtcgcgcggtgggaaaaacg

SEQ ID NO: 83600 - DNA, 1192 bp, Heterodera glycines
atgcattcgttttctgtacgacttcgcaattcgcttttccatgcgctcatttcgctcgtccgtttccttcagcgtcaaatgatcgcgcgatttttcgcttccctcgaaattttttacggtcaccgcggagtacggctcgaacaggccgaggcggcacaccttttctacgcaggccgtgccgaattcatagcggagccaattcgaccgattagcaatcgcatcaaacactttggttgcgcgaaatgtcaaagcgaaacacggaagatgggccaaagcaaaggcaggggaattggcacgaagaaaagtgaacaatctgaaaaaggacaaaagttgagctggccaaatccgacaacaaaagcagcagcatggaggggagaagctgcttttggatgcaaaaacgccacaaattcagacggacaaagggccaaattagaccggaatttggtgtcagtctcccccaatatccgccaacaatttccgcggatcgattgggaagaaattgagagaagccctttcgtattggtcagcttcggaagcattgcgaaggtcccaaaaataaatcccattaaacattgagaaatgccttttaagctcgagtttatgcccgaggaattattccgctcatttctccgcgccttttcaaattttccttccatcatttttctttggcagacaaacagtgagacaaatgccattttagctgacaaaaagtgccaaaatctgcctaaaaatattcggtttgtccggtgggctccaatcaaaattttgctgggtaaaaaggaaatcgcagtttggcttcgattgtcccttatgacgttggcttaagctcatcccaatttgcattatgccattttgcacggcggcgtgaacacagtgaatgaggcgctgatttacggcggcagaccaattatgggccttccgcttcaggtgaatgacttttcttggaaaagacataaaaaaaagccaaaaatactataaaactttgctctttcagggcgaccaaccctcaaatttgcaacgattggtcgacttgggcatggccgttcaattggacattggccaagtgtgggccggacaactcaacgccaaaatggcattaattgagcacaattatgtcgcgttcagcagaagagcacaacaaataagtgccatggtcagaacatatcgcaatggcattggcgctgtacaacag

SEQ ID NO: 83601 - DNA, 595 bp, Heterodera glycines
aattcgtacaagcgactgcagccgaacaggtctaagcggagacggcatttagacgatttacgagatcaaaaagaaaagggaaacattttaagttgggcaccaacaaaaatttgttggactgtcgacaatcggacgagttcgttccgtttgtgcggccaaagttcgtccaacgttcacatcgaatgtcgtattggtggggccgacctcaacccgtacttggcattcgccgcactgatcgcagcgggcattgcgggcattgaagaaggtggggaaaggaaagcattttcggcatcgaacaacgaacactgtcaaaaaagggttggaattgccaaaggccgttgcctgcaatgtctacgcttcggccgatgccattcccgaattgccgaaaagtctgcgaattgcggcggaacttatggccaattcggaaatgttgaaaagagcgttgggttggtggttctttcgtttttattagcacattaaattattttaaggtgaaaatgttttacgacactacaaaaattcggcacgcattgaattggaggactttgaaaaggaagtgaccgattgggagctgagaagggcatttgacagatgt

SEQ ID NO: 83602 - DNA, 2486 bp, Heterodera glycines
ttgtcccattgctttgcttttcgcttcttttaatgctttatcccttctcggccaagggcaatcgcagaagcgaagaccaactttatgaggatttattgtgggcaaaatgcgaaaaaattaaatagtttttttctcgaaggtatttttacaacaaaaacgtacggcccgtgaaaaatagcacgcaaattttggaagtgaaattcggcgcctctttgatcagaatcatcgacgtggtgaggaggaaaagtgatcagaaaaaagaaaaactaatcaatcgcaggacgaggtcaaccaagtgctcaccacgtcactgtggcttgagatggtcaaaaaggggcaattaccaattcggacattattaatgactaattaggcccataattaatgaccatttattcgcttctctctttcagcaatggttcgactacaaacttgtctggtgagagggaatcaatttttttttcttcttaattcaattgccaggaatccggccaaatttaatggcatcaaaaaattgtacattccctcggaccaaatttggaccccggacattctcctgtacaataagtacagtaattgtctcactaattgaccttacgtggaattccttcctttgaagtgccgacggagagccgcacatttccattgtgtccgatgcgatcgtttattatacgggtctcgtcgtgtggaaaccgccgagcatttacaaatcattttgcgcggtacgtttggttgacatccattggctttttgggctgccaaagggacccaaaaagttttgttcagatagaaattgaatactttccgttcgatacccaagaatgcatgatgaaattcggcggatggacttacaacggatttctgatgaacatctcccaaattccggttacattttcctaaaattcactccgggataagcttttattcccagccgcgcccagaagacgtgatcgagaatcgccattatccggatgggcgggaatacaaatacttggccttgggcatggacctgtccgcctatcacgcgtaccttttggcattcccacgaaaaatcattggacctttgaaaggagtttggagtgggatttgatgtccgtgacgagccgacggcacgagcagctttaccctggctgttgtgggcaggtgaacgaacaacagcaaaatgttgtgacacgaccaccttcgttcatttcaaggacaaatacattgacattactttcgcgttgggccttcgccgtaaaacgcttttctacgccgtcaatttggtcaccccgtgcatgctaatcggtacttaattgctgaccaaaaggccccctgattaatttgctgcccaattaatcccaccaattagccattttgactgttttcgtcttctatatccccgcttgtgagcacaaaatgacttattccagtacgttttggaaaatcaaaaggccattgtatcatttcgcccctaaccgtcgttcagtttccgtgttggtcactctcaccgttttctatttgattctgattgaactgatccctcccacttcgatggttatccctctgatcgggcgctatttgcttttcaccatgttcctcgtctcgttttcaattgcgatttctgtcgttacgctgaacttccatcgaaggtacttcagtgtgtcagtgatcactgatcagtgatcggggttgatcactgatcgtcccactcattaactgccgatctcactttctcaagggatggtactttgcacacaatgccccgatggatttaccgcgtgttcatccgcttccttcccaaacttcttttgatgacccctccggtggatgatgatgcccaatcggataatgacgaaagcaccagcatttcgggtagtttgcaaatgccgctttatttgtccaattcgttagacattcaaccgccctatggcaatgccaactccgacaacaatttcggctgctacgcccattcctaccgaagcagcggccctttcttggcacattcgtgtcgctctcgacgaagcattcccgccgcgggcatccgtctgtcgcaaacagcgcaagtgaaaggaatgagtgcggaagtgctgcgacggatggcggacaatgtttactttgtggccgaatatttccgagcaaagcagcaaagggacaaggcgagtgggacaacacaccaaatagccgtccccatgcccccgggggttctctccctccccctaatgctccatcgtctctccgggaggagcgggggtggatgacatgacgtgctgttacagctgctttctgttttgtcctatgctttctgtgctgtttaggtctctgaaaattggtcctacgtggccatggtgcttgatcgcctccttctgatcgttttctccacctctctcttcatcggcacccttctcattctttccagttcgcctcccgcaaaaagcgaatggggcgaacccctgagcacaatgccaacgacaaaaccactcagtggagacactttcgaattcgaa

SEQ ID NO: 83603 - DNA, 294 bp, Heterodera glycines
atggactgttttcgacccgagtcgcctaatctgccgaatatttgctccgatgggaatttaatactggatgaccaattgactcaacatcattcgtcgcctttcaaaaccggtcttccgtctcacaaattcgttaacttagctaatttattccgatttcagatgccgtaaatatcattcgagagtcatttgaattggcccaacaaatggacacaccgaatcccattacatttgactgcgtagaaagcgaaacacttgcggaagaaggcatacaacagagaatagctgtgaaagaaa

SEQ ID NO: 83604 - DNA, 740 bp, Heterodera glycines
atgcagcaaaagaatgccaaaacgtgtagagcagcagaagatgaaccaaaaaaagctgctattggaggcactggagatgaactggatttgttgagcttgctgatcaagggtgatcgaagcaaaacaatcggtgaggacgggttcgatttggagctgttcgaccaggacgacaacaacaacaacgacggggaagagcagggcgtgaataagggcaaaacgacgacggcaccgcagaaagccaagcgaacaccgtcccagccgaaggaatcgtcgttgagcaaagcgatgaaagaggtttttacgggcaacttcgagttttttaaaattagtctcgagacaccccgagcctcgaaaaatgagcctaaaaattcgagacttagactattcaaaaaccgagacccaaaaaacccgagactttctcgagtcgagactctcgagcagcactagtaattaggcattttaaaagtgccatgttgttaagatggacttagaccggagcaagcaaacaccatcatcaacagaaaagccgccgtccagaaaaggttcccgtaagggagcacatctgctggagatgatggaccaagaaactgcagccccaaaaacgacccaagcgagaaaggggtccgttaagcggggcaattaacacactaattgcgtcttaatcattggccattgtgaaaaaaaaacaattttagcgaagaaaaaacaacaagattttgaattcaattcggttgtcagta

SEQ ID NO: 83605 - DNA, 406 bp, Heterodera glycines
atggagatcgacaaggaaattgccgaattggaacaggaaatttccaaatgttattgtttgctcttgtaattgtaatattttggtaattccatttgtttcagcaatcaatgaagtggccaaggatttggagctcaaataccgggactttgtgccaagttacatcggtctcgccgattgtcaggataaaatccaaatggcactgcaaaatgggaaagaaaatgtaattaaaatggaagagaaattgacaaatgcggagaaggaaattgtcaaactcaaggtttgctttatcacatggaaaagcatttttgctgccaatttcaggaaaatgcgccacacaaaaagttgggagttgtccaggatttggtggaccgtttggccatcctcgacgaaatggagcagtgtctga

SEQ ID NO: 83606 - DNA, 239 bp, Heterodera glycines
atgcggtaggtacataaaattcatgtccatctttataaataatgtattaaagcattattatattaaaacaacaaaatgggaaaaatacaattatgaataaatataaagttaacaatatgattaaatggaaaaaagatcatcaaaatttgaacggagaatattaaagagacgtccgtataatttgtgggggcggtttgttcagcttgacaatgctctaaattaattattcaataatataa

SEQ ID NO: 83607 - DNA, 458 bp, Heterodera glycines
atggatgatgcaaaaatgaacgaaaaatgtcttaaaacaagagttgagcgggaccgggaccaaaacacggacggacaactgagtaccgaaatcccggttttttcccggttttcccatccaaaaagtcccggtttttcaacccgaaaaggttccggtccagggctgcacgaaatttcgtgtcgttttcgttttcgtatcgaatgccttttttcgtttcgttttcgtatacgaaaatttttttttagagttttcatgcagccctgcacccatgggcatttattgaaacaaatcattttttggctcctaaccgacaattttcgtatttaaacaatggatttttaattttttgtcatttagactgctgctggtagtcatttgccttataatctgaacttgcctgaccaacttttgccgaatttatatggtgcccattttccacgaattaatggtaaaataaa

SEQ ID NO: 83608 - DNA, 377 bp, Heterodera glycines
atgtctctacagatcttgtgagtcatgatttcattaaattaattaaaactttgcacaataaaaacctaaaatagtaaagaaaaaaagttcaaagcgtattgaaaatatttatgtaaaaaaaaataagatataattttaaaaaataaataaaattttagctcaaaaagaatattcgaacaagacaaaaaaattttacaaaatttttttgaaaaatcgggtgttccataatatggcttgaaatcgggaaattttcagattaaaattcctagggggttggaaaaaaattttcgtggaagacgaatacagcggacagaaagagcgcaaatggacattaaatttaaaagttaataattaggtacttaaattacgagaataaa

SEQ ID NO: 83609 - DNA, 279 bp, Heterodera glycines
atgcttctcatcattagagtcaccactatcatttgttttttaattccgcctaatttgtccattgaaatatgcgtaaggccaaacactgtcttgaattatattggggaactgatgtgcattgataagaatggcatgtcgtactaccttgataaagatacgccaaaacgctcaaataatgacttatattcatgcattcggcttgatatgaacttcacaaaatgtgatcagaatgaccctggtgcaacaatcaaaatcagcgatgctaacacaaaaaaaggg

SEQ ID NO: 83610 - DNA, 281 bp, Heterodera glycines
atgacttttttggtaagaaaaaataagatatttcttgaagtattgtattaaatctgccaggaaattgtatgtaaagtttgaaatgttgatagttttttctagagagcgatatttggcgaaaatacggatcaggatcaggactacggactaggcatccatacggactacagacttatggactaaaaacccggaaaacccttactccgtataagtccgtatgcaggaaaaatacggacccgtatacggatcagggttttttgaaaagttttttaatcaataaa

SEQ ID NO: 83611 - DNA, 1909 bp, Heterodera glycines
  unsure (1)..(1909): unsure at all n locations
atgagcaaagaatgcgaaacggcaaaaaacatcggtgcctttggccttcgtcgtcagtccgaacgaattgaaaaccaatggttctccgctctgctgaccacgcgccagtcgacccgtcgcaccgtaaaatcgctgaatttggatgagaggcgctcacggaagagacactgcacaatcgcaggtgggcagcgaacaaaacaaaacgcactcgcaacagtttcccacttatatttccgatgaactcgaagcatacgtgaggggagaagtcggacaaccacagcagcagcacggcttttgtgcggtatgcaacggaagtgccatggaaaggggggaggaaaaggaaagcgaatgttgcattggaggggcacgagacaagcaaaggcactcgacggacgaggaaggcgaggaactgatcacgggcggggaggagacgggcgaagacgacgcacggacgatggacgaggaggaggggcaaacggaggacgacgaagggacaacggacgcactaaacggacaacagtccctccctctcttggaccttgtcgagctgcgatttgacccgaccgaattttcaagcattcagcaaagagtgtgacactaaatttttattttccaatccattttgttaaaaaaatagcattttgttttttttggtgctggaaaaagtcatttgttcaaaagcgaaatcggtattacatatagctaaaacagaaaagttgtgcttttcataatactctccgttgagcgactcacatacaaaagtgaatttgcatgaataaattaaggaaaaaagccaacgtcacgtgcatttaatcgagcctttttttgtacaattaaagaattcagtgaattaggcagaaaatggatttgtgttaagttgtagccatagcaacggaaatggaatgggcgcgagaagttttctcacacttcgtgatacatacaattaatcttaaagtgccggctgtcaaactcagagtcactcatttgagcacgcagtcacttttcgtgtccctccccccgtcgctttttgtcggaattttgcgcatttaatatttattttagtttttttgtgtgaaatgagtggccaacaaaaagcggaaggattattcccagtggacgaatgcttcgggacgaacatcggtcgcccaatagccgaactggtcgatgagaacggattcggcagggaaagccgagaagaattggtctctttcgaagagttcgtgcggggcggagacaaaaagcgaggcaaaaaggagaaagacgaaggtgaaaaaggaacaatgggagttgaagcggcaaaaagacaattaattgttgaagggttcggtttccgtccgattgacaaccggcgagggggggaggacgacgacagattcttcgacatcgctttgaacagcggtggcacggtgccggaggatccgatgtcatcggcggatagaatgccaaaagggagaggacgaagtgagctgtacgcagtgaagcagcatgaagacgacgacaacggcacgattcatcaatttaatagccaaaatttggcatcattaaaaatggttaagacaaatggggccgtgtggacaatcggcagagcgaaggggacgacgacgcaatgttcgcaagcgcagcgaccacgacgaaactgcgtcattcgctgtgtccgaccgtcggggaaggcggcggatggctaagcgggggacggacgcgaagagagaggtggggacaatgtttgggcagaaactttggtggtcccgaaaactttgttttacgaaacaatttctaggtgtaatctgagncnctnctcgatttcnaaccctnaacctaaattcgaaaattttaaaattttcttttnnattnttannttncaannttcttttctnttttntnacccccccccctnaaattttcaaataaa

SEQ ID NO: 83612 - DNA, 2248 bp, Heterodera glycines
atgagtacgaggtaaaatttaattcacataactagggaagcaactaatgatttaactatttttttgttcgattgttttgaagaaaggagctaaaaaacgcatttctgtattaaaaattttcgattctgatgtcattatcggtcactagaaatcgctattttggcgacttcgtcactaaaatagttaaaatcactattttggagttttgtcactatttttttcactattttgacattttttatttatttatttatttatcgaacaaaccacaaggtgctatgcactctaacagtggtgtaaaaagaaaaaagtgagaataaaaataaaacataaatggtagtcaaaaatcacaaaaataagtgtcaaatcacaaaataggtgtcaaattaaacaaacaatagacataaatgaaacaaatcacacctctcaatagggaaaatatgcattattgcttaattattccttctgcaatttctctgaattttttggggtcatttatttccataatatttttcggtaataaattccatgaattaataaccctattaaagaaattattttttgtttttgtaatatatatcctattttgtagtaaaaagggtttgcgaatagcccgtttagcaacagcaaaaaagttagatggtttaagatgtgtatgtttttttattattttaaaagtagttgtaatatcattaattttgcgcctaatttccaatgtcttaattccgcaaaacattaatcttttttcatacggcatagggacaagcccacatttattgaaggcttttcttgtaaagaatttttggactgcttcaattttgtggacattttcttttttcaatggattccaaatttctgtggcgtattctaacactggtctgatatagcttttatatgccaaaattaatgtttcaagcttccgagtttttaacgcccggagaagctgaaaacaagaaaaatatgaattttttaaaattttattaatatggttagaaaaggatagtttttgatcgattaaaatgcccaaatcccttacacattttgtttcgggcaatggttcgccatcaagaaaataaataaattttgtgttattttcaccaaagtaaaggaccattgttttttctattgatatttttattccattattttttgaccatttatttattgcctcaagcgcggaagataaattctctctatttttatcatttttatgctcaatataaattttaatatcatcggcaaacattttaataccaacatttttaggcaaattgttcggggggatcattaataaaaataagaaaaagcaaagggcctaagacactaccttgtggcaccccactataaatgttttttgaatttgaatacgctcagagattttaactctgaatgaacggtcatttaagaaattttcgataaatttatgaatcttaccattaataccgatatttttaagcttttgtagaagtaattcaattggaacactatcaaaagctttagaattatcaatatatgtatatgctctaattatagtccagtctctattaatccccctttattttatttgagactattatggcacatccacccccttttgttggacggtttgcaaaaattgggttatatttccccatatttgagaattcagaaataattgtattttttctttcagccatgtttcggttataaagattagtcccggttcttggtttccattaaataaattatttcctgtaccttattgcttattgaccttgcattaatgagtatacaggagagattttggttttttgccattttcgtattttgtagtggtttgttcgatgacccctatgcattattttctcatgttttgagagggtgtgggtttttcaatgtgataatggaaaggtcaacgacagtatatttgaacagtccttcggacttattcatttcatatgcttgagtcctaagctggtacaaggctcgcagttccgagcgggtcagaccccgccggaccgtgatattttgcggaaaattttggtgttttttaagtgttttgcgaaaattttttatgaaaatatcacggtatttgcgttcagtgaatggaattttgacactgcggcgctttttgttcgattgatcggaacccacaactgtccatggatggcgatggacatccccaggattcaaatgttcagtgattccgcattcgttatggaaaatttttgacagaaattactcacaacttcgttaaaaatgaattaaa

SEQ ID NO: 83613 - DNA, 197 bp, Heterodera glycines
cggtgcaccccaaaacgtcgtcggccgaaacgtcgtcggaagactttttgaaccataactttgttcactgtcaatcaaattaagaattgttggtgttgttcgatagtctatgtgtttattattaatttgcaaaatctcaaaaattttggttaagtttcaaaaaagttatggccagaaggaactcaaaaacccagtaa

SEQ ID NO: 83614 - DNA, 133 bp, Heterodera glycines
atgatcaacgaatacgaaatggacgaggacaaaatgtatgaagcatgtgaacagcttggcgaaatgcatgcgaattatgcgcaatatgggcttaagccacattttatggacctttttcagcaacaattattag

SEQ ID NO: 83615 - DNA, 592 bp, Heterodera glycines
atgccgtttttggagaccactttcagtctcggctctccaataattcaatttttgtaattaaaattttatatttttgtgttcttatagtcctaactttgctctatttaatcactatttctctggctctgtatctcttttatttttctttaaatcagccatcaaaaatacctacctctaaaatgaccatttttacttacttaactctaactccctaaatacttttccattggtattgatctcttgccagaataatggcaacatattattgataataatggcgggtattttgaatcatgattgtgttttgttgaaatttaaaaaaaaattttaataaaaaaaatttgggtatcaaaaattatgttccaccctaagtatatgctgaaatatttttaggatttttttatgttggcgtaatgacatagcgacaagccgaagagatttgttccacaagacaatgctgaaatgcattcagtcaagcccgaaaatgaacgaggttatcgcctgcggctattattgctacagagacctgacgaaatggccaaaactaaacagaatatggtcagaaagaaaattaatgggtttaattcgttaa

SEQ ID NO: 83616 - DNA, 237 bp, Heterodera glycines
gccgggcagccgaaagtcggccatttgcgagagcgaccagctgagcacgggcgcttctgagtcccgtttagaagtagcaaaaaatttcttacgtcgcttttacaaccattcgacgctgagactaacggggcggagacggcggcgcggaaatggcacaaaaaggggcgatgccgacaaagggacagcggagccgccgctgatgtacagctcggcattgggtcctttcttcgagatgag

SEQ ID NO: 83617 - DNA, 1239 bp, Heterodera glycines
atgattttctgtatctgggaatttttcggtcattcaaaccactgctttttgaagggtaattaaattttttgaaattttataccattacgcttacgaataatatcaatggaaattaggaggatggccggccgagaatcagttgacctcggttttaacttttcactttccatcatcttcatggtgacaccttcacttcctcgtacaataaaaatttacaaaatatttgtattatgtagcatttaaatgatcactgcaaaatgaatacattggattgatcaaaaaagtaatagaattgcaataaaaaaaatatttttataccattgaaaaaaccattaaacacaatcaatctagacagtccttaacaaaaatttatgaaatttatttttaaattgatatttgttatcaaaaataattttgaatatttgaaaaaattgcactttcatggccctgagctgatcattaagagtgtattttttggcctgagacccgtccaaaaatcttcgggtaggatttcgggatccgggacgagaaacacatcgcattcttaggcttaggtctgcttgggcctatgcttagactttatattgtaaaatttttattgtagagttaccattcactttgaaaaagatggcattggagaaggtggtgccaacaccgttaatgttgacggaatttgatctttgcatgcaatttaaaaaagagataagtgctggtcaccatgaagattttgcagtttttttctctgtctccatatttctctcagcataatgggaaaggaatgaatgattctctttttctcattccgcacacactctttcgcctccttccccatctcatacttcttttcctctccgtcacacacactatttcccctctttgcatcaatatctctgctcctccctatgtaccaatatgcaaacccataaattttcttttaattaatttccattttagttgcatattttgctgtctgttcatcgcttctcggccttttggctaagatcaaagtgtagttacagttctttacggcttaatctccgtaacggcccttaccgggtcaaagagattaaccaatttttgggaattggtcgttgcagggggcttgctccctctcggctgtgcgttggcccgttattgcacttgcttacgggaacggcgcgtctcccctgcgggggagaacaaaattattttgtaattcttcaatccaaatttctcttttgaatagctgtgtgatcaaaa

SEQ ID NO: 83618 - DNA, 1610 bp, Heterodera glycines
atgtggtcggttgctttcaaccgagtcagttcgtcccaaaaaggttttatgcctgtggacggttgtgccgaacacaattttgtactccaatcgatcatccaggacgccaaacgtgccaaaaaacgatgctcaattgcgtggttggatttgaccaatgcatttggttcaattccccaccaaacgattttcacagcactaaaatggtctggactatctgaccaatcgatcagtgttgttcgacagttatatgccacgaattccactcaaattcggcattcaaacggcctcactcccgaaattccaattcgagcgggagtaaagcaaggatgcccgctcagtccaatcatttttaacctcggaatagagcccatcctccgcaccattggccaactcagaactggctataagttgcaagaaaaacgcattgatgtgttggcttatgccgacgatctcgtccttgtagctgagtcgcccgaagaactgcagaaaatgttggacgccacctcaacaatagcaacttgggctggactttccttcaatgcccgaaaatgcgcgacgctggacatcgatgggcgaagaaaaacagcattgaacacaaaattttccattcaaaatgctcacccgcccatcctaacaatttatcaattctatgaccatcttggcgttccaacgggctatggttcagcccaatcagcgaccaaaatcctagaaaaaatgaatgaccatgttcaaaaaatcgatgcgtctcttttaacaccgtggcaaaaatttgacgcaataaatactttcgtccttccgtgcattggtttccatcttaaaaatggtgtggtgcaaaagaacccattaaatgcactggacaagaaaatccgcaattacggcaaaaaatggcttaatttgccacaaagagctagtactgagcccctttatctcagccatgccatgggtgggatggggatgataccactcaatttgcttgccgacataagccaaattgtccacgcttatcgtcttatcacttcacgtgatttgtcctctttgtcaatggatttgatcaaaaccgtggtcaacaaacggattcgacaacagccgactcatcaacaaattgccgaatatctaaacggctcgatgaaaggccttttccggcagtttgagtcgacggacatctcctcaaattggacacgcgtcaggcaggcaaccgcccggctgaactccaaattaaaaattgaatggaaatggtcaacgaatgaagagcgattggcactcgaactcaacaatgacccgctcaatccaaaaaccgcggaatattgtttgagagctgccattcgcgatttcttccgccgtcgtctgctctccaagcccgatcagggcaaagttttttcaatcacaagcgcaacaaccgcttcgaatcactttatgaaggccggcaacttcacgcgattcgccgattggcgatttgttcaccgcgcccgattggactgtgttccgctgaatgcaacgcgtcgattcggccacggagacaaacactgcccgccgctgtcacgatggacaattggaaaccctcccacatgtcctttgccattgttggccacatcttggaaagggaatcacgc

SEQ ID NO: 83619 - DNA, 439 bp, Heterodera glycines
atggttggtggcatcattagcattagaattgtcagcccagcagcaatgccaactgggaaaggaaaaaggttcccatgcttcttcattggaggagaattggtggcaaaaaagggaaggattggagaggaaaaaatatggaatgaatgaatgaaagtgggaaatgtgaattagcacttgccaagacatgccttttatggggcagaaaagtactgatttttaagattttaatcctgaattggataaaggcattcttaaagattattaacatgttctgatttttaagattcgtcctgaattgggaaagcaatccgagggattaaatgtcctgatttttaagattcgtcccaaattggataaagtcaatccgagggatcaagtgtatgccaatttttcattcattaatattttaacgtcataagattaataacaattaaataaa

SEQ ID NO: 83620 - DNA, 1266 bp, Heterodera glycines
atggtcgaaacggtggccaacgaattggcactgtccaccagccaaacgcacgcgctgttgaacaaagcgatcagacggtgggtgagatggcggaggagcagggccaagctggtgaactgtatccccccccccacacccttcaatcgcatttcaatcggttcctccacctcttggccaactttttttcgaaattcattctcgaaattttcaaattatattattctttatttttaattttttctggaaaccccctctaattgtaagaaattttgaaaattcaaaaatttgtaactctacaaaaaagtttgtagaaaaatttgattctgaaatttgggaacaaattttacattgaaaaaaaacttccaatattttttattcaatatattttatttttttaaaagatcatggatttaagcaagttttaagggttcatctatttgcttatttgttatttgggttccaatttttgttttttcagtttgtccgaatatttcgactcaatttgccgtgaggcgcttgaacagcaacaacacaacacaaatgatcgccaacagcacatagcaacagaagcagaaggaaaattgggggcaaaaacgaaaagcgacgaatgcccggcgattaaaaaattaaaaatttcacattttgtcaaatgatacaaattttgtttttttttattcttgttgattttatttgttgaagagagattttcacccctattacagtacttaaactgggtttttttggtctaaaatgaggccttcttcaaccagattgaccaatttcaattttgcgaagccttatgatcggaaaggagcttaattcaaattttaatagttttacatagacagtttttattcaagctacaacaacaacagcgacaaaaatgcataaaataagaacccaaaaatgaaaaggaaacaaactagctaaatggacagtgagtgaactgaaccaatgaaaaaacatactgaaaaccaaaaaaaaattgacagaaaaaaactaatgagtgttaatgactcgtttagcaacgggcgtgaaaggtgttcatcatcctctttcgctgctgctgcttcttctgcctctgttgttcatccacttttgcggagaccaaacaaatttgacaccttcccctttataccacggtttttgctggactgcggccggttatccgtcaggcgaagttccgtgttgttttcaatgccgtaataatgcattgttgctttatcgttattgttatgttcaacggtgaacacaacgatgaataaa

SEQ ID NO: 83621 - DNA, 612 bp, Heterodera glycines
atggccataaaatatggaccaaaaatcgcaaaatatggacataaaatggcaaaaatgtcaaaatatggacataaatttttcaaaattgaatgtaaaatttcttcaaatttattggttgaaattgcatatgagatacatttccagattttttgactcggtaaggcgctttgacaaagacggctttcgttttgcaattagtcggtcaacattcggaaattggtctcgaattttttcggcaattacgtgcaatcattttaaaagaaaaaaaacataaaagccaaaatttattaatttttttagcgcaaaatcaacaacaaaagcgaaattttcgcttttttgcttatttttgacataatttattaatttttaagaaaatttaaatttattcaattgaaaaatttttcgggttttgggctcaaaaaggctaatttagctgctgggggccgttctaatagaggtttttttgaaaaatgccaaaatatggacataaaatatggaccaaaatgccaaaatatggaaaaatatggaaatatggacataaatcgcgaaatatggaaaaatatggaaaatatggatatagaaatccttcctagaagcttcaaaccaagctaa

SEQ ID NO: 83622 - DNA, 154 bp, Heterodera glycines
tgattgcacgtaattgccgaaaaaattcgagaccaatttccgaatgttgaccgactaattgcaaaacgaaagccgtctttgtcaaagcgccttaccgagtcaaaaaatctggaaatgtatctcatatgcaatttcaaccaataaatttgaagaa

SEQ ID NO: 83623 - DNA, 554 bp, Heterodera glycines
atgactccgccctctttttatggatgtgccaataataagaaccctcgaaaagaaggcaaatttgagtccgaaaatcgttgtttctgccccgaggcggagctgtacgccgtcgaatgcaaaaaggtgggaaaagcggtcaggttttgtgctgtttgtgtgaacttaacaagtgcggaccgaccaattccataatgattttgctaagtcaattaaaccaagaaaagggtttggaaacattcggattttgaattatttaatctcaaaattcagtcgatccgcttttgcccatgtcccatatttattaatgggctctctctctttcgtctttttccacttaatgcatttttttcccttttaaggtcgtgtgcaataaaatgaatcggcgcaaccttttaattgagaaatgctggatggcgattggcttcattgtgcgtaaggttttacccacaaatttgctgctgctggtggcaccgctttatccgttctttgcccgtttagtttgtggtcatggtaaactttggccttattggattacaaatttggctttggtataa

SEQ ID NO: 83624 - DNA, 113 bp, Heterodera glycines
ataaatagggctccaatttttaggcaaaagcctatttttttcctgagctccccgtggcctgaaacgcacgaaaaacatgttttttttgggctgttgttaagctattttttgtg

SEQ ID NO: 83625 - DNA, 1394 bp, Heterodera glycines
atgacgaaaatatttattgaaaatgccaaaatgacgacgaaaactcaaattgttcgtgttttgtggggtgtaatttttaaaaatttccaaaaagttgatctttaggggtgtatttttcgtttttttttcatttttcttgtgaaaatttccaaaaaatggccaaaatatggactaaaaacccaaaaatggcgaaatatggatttattcccgaaaacccccaaaatatggatttatatggactaaaaaccttcaccaaatcaaaaaattttaacgcagaaatgctatttttaagcccctttcttcatagcatatgcgcagaaaaaatatgttaatccatataatttacaaccctagttattttttggaaaaaaattcttcgtaaaaagtgaaataggcacaaaatgccataaaaatgaccaaaataggcttagaatcacatttgaatattttacaaattaatttttgatatatcattttttgaaaaaaaaattcgattttttagggatacattttcaaaaaaattttttaattttttacaaaaaatttctataaattctcaaaaatcctcaaaatatgtaaaaaaatgaaaaatatgtacgaaaaagtccaaaatatgtaaataaaagtcccaacttttgttcgcaaacacaaaaaagaaagtgtttttcctactaattagagcatggagaatccaggaaaaaaaatatgtatttacataaaattagcagccctaaaaatgacagttttaagtgccgcacccttttcgtggcgaaatgcacttttttaatgtaaaaaaatgagacacttctaaccttttcaaacagttaaaccaggaccaattaggtttcattcgaatttttagaatttctgtgcacaataaaactagtgtaagttcctacgcatttattacagacattattttacacgatgatgaacaattggacataataaacaggggttctttttttggtcatttaacaaatattgttgttccatttgtccatcgttcgttcgttcgctatttcccatatgtctcttcaactgatgcgcttcatcaatttgttggtccacactcggctgtcatggaacacatgtacgtagcactggcacatggcgcggaattcttcctcaatgtcgttgtaatcggtcttcttgagcatcacttccggctcgcacaaatttgtgtagcgtccccattcgctgaaagtgtcgctaaagcccctgctgaactcttcttaaacgggaaacaaaacattaaatgatcattttttgcatcttccaccattacccatcatttcgtatgttttgtgcacttcgtggccacactggcgacatttgtacttcacctgcagtgcgctgtgtgtaaaatctgtaaagatttaaaaattaataaa

SEQ ID NO: 83626 - DNA, 147 bp, Heterodera glycines
ccctaaaaaatcgaatttttttttcaaaaaatgatatatcaaaaattaatttgtaaaatattcaaatgtgattctaagcctattttggtcatttttatggcattttgtgcctatttcactttttacgaagaatttttttccaaaaaa

SEQ ID NO: 83627 - DNA, 1172 bp, Heterodera glycines
catttcaatgtttcggaagccgaaaagcaagaaagttggcgccgatatacgcaacattcggcgtcgcgcggatgactctgaaggagaggagaacaacagtgggccaaggcgatctccctccacctgggctgatgagatggacgattaccaacaacaacaacaacaaccaaacattggcgctgaaagccaacagcacggcgagggtcaaatgacaacgaccgcagcacgtcccgtgggactgagttttgacgagagagagggtgaggagcaaagcgataattattatgctaatggaaatgttaaatgccaataaaagggatatccgtgtaatttttgaaaatacttagttacgtggtttttcaaatttcatatgtgccgcgctcgatggagcgctgcattcattgcttaaggggacgacgtcactcatttcaaactgaagcggcacactgcgagcggtcactcctctgccgccgccgcgcgtaggcgcagcgttgagaaagcggcgagacacaaacagaaaacggtggcggacgaagagcaaacggcgggtacaaacgaagcacagaaacaggttttaaataagccaaatttggatcacttaaataaatatttacaccatttttaacaggtcaaacaagaagtgctgccctctagcgaatgggaaaagccgaagcaagggaaaatggaggattctcagcaacaacaagacggcaaacagcaacccaaattcagagaaccaacgggagaaaaagtgagttagcccccccccccctctccgcaaaaacttgtcgtttggctttgaaaaaattagtacatgcagaccgatgacaatggggcgactgttcgtgccgcatttccggcgacaatgaccgatattcctgacgcaaaagcagtgtatgaagcgcgcaaaaaaagagaaatgatgagacaggttcgaaattggaaggagaaaaagtcattacaaaggtgttatttagggcggattgcccgcctcccaagactacattcctttggatgacaccattagtctgaaaagtggcagacaatctggggaacgggcacgacttgtgcgcgaagacgaaaatgacatgtcggacgaggaggagatgggcaggttgaaaagaaatggaatttggagaatttttctgcttcaccatttctgcattttttga

SEQ ID NO: 83628 - DNA, 658 bp, Heterodera glycines
atggaacagggtagcagcgaggaggacgaggctatggaagaaggggcgaaaagcaagagtcgaatgggagaaactgtcagagggaggtacaacggaaaggcagcggcagggcggcagcacaagttggtgcagtacaacaacggaaatggagaggacgaagaggaagatgatgacgcattgcaacggtgggaacgcgaacagattcgcaagggggtcagctcgcacaaggttggcacctacgggaaaaacaagaagatttttcattaaaaaaaaaaccgataggtcatgcaaatgcaagagcagttgaacgccacttccctaaattaccggggacgtcccctcaatatgctcgactctggtgaggcggacatggacatcgaagtggacatactggcgatggaccaacagcaaaatgcacgaggcgcaaatgcactaccgccaggtgttaagcagaagcggaaacagaaacaaacaaatcaaatgactctttaagaattgaggaacggccattctgctaaagtcgtatcggtggacgacattctcggcacaattcgccaaagattggccgacaaaaaggagcaacggagtgccaacgacgaaactttgatcaaaattcgcaaccaaatgacggaaaatactgaactcattcataaagtaa

SEQ ID NO: 83629 - DNA, 874 bp, Heterodera glycines
cacgccattccctttcatcatttaacctcttcattcgcgacttcgtctcttggcaaccaaaaccaaagatttgccccatcaatttgaatgctgtaaatacgaagagccctcctttggatgtatacacttgtcatctcctcctctatttaatgttcggaaatcattgaccacttcatttctctccggtgagtgagcagaggcggtcgacttacttcatttttctttcaatatagagctccgaacttatgatgtgtggcgctgcgaagacggaaacgaatgtgcaagtggctgttgtgaatgtgaactcgggcgtcattggggccaatgggaacggcgtgttattggcggaaagggaaaccgactcgcgaaatggcgccgaatttacaccaaactttgacaacactcaccaggtggaagattagttcgctggtaaatgggcgggcgagcacaatttttcctaccgatgttacacaccaaagaatgcattcattgttggtgtaaacctaaaaaagggtttgatctctgatcggcgcgtcaaagatcactgagctgtacaaaattaggaaccgaagtgatcggctgctcactcgatcgttttacaacgctgcactcagagatcagattgtcaatttccaaggtcaaacgcaaaaaacacttttccctttccgttggtgtttaattgccgattattaacttccctcccactaatcatttttgtcgtcagtttaattgtttgttcactgttcagggcaatttgttgccctcctcgttttctgcctgcggtgcttccacctcgagcactttgttgtcgatgccattcgagtgcagccatgacttggacacgaattcactgcaggcactgcaccacgacgag

SEQ ID NO: 83630 - DNA, 973 bp, Heterodera glycines
atgaacttttcatattggcgagcaaagattctgtccacttcaattgaatgggccaaatcgtttgaagaaatcgaggtggcggctttttcaatcctaataaataaaaaaaattgcgtaatttcagaggatggacgactcggacaaagaggcgatggttgtgaactcggccttttcaattctcgtcttttctgaagcgtttcacacccccgagcggttcaccgatcgcattatgttcccggacggactgtctgggttccgcaatttcagtgccaacattatcaaggagcgcagtggtctgatccccacggttgttgccgttatcaacaacattttggtgtgtgttttgacgggggttgaaaatggtgtctccgtttggtcctcccaaaataggtcccaatccgtcgaatgcaaatgactgaaattgaatatgtgctccttttggccattgtgcttttcgactcaggtccgtccacatgcctccaattgctttttgcgtttccaattttgccccttttgtcaatttttccttcgtttgtctcatttttcagaatgtctttccctcagcaagtcggccgttgccattatcaatgaaaaacgcgccgctcttttggcgagtctaagacgtcacctgaacaggaaattgcgcgacagaatggaggcggcggtgcgaatggcggaacttttgttgaggatttcgaatgtccacgtgagtggccaaatgtgttcttttaaagtgttttcccttcatttcgcattctttcattttccaaatccgtttatttagattttttctcttttagaaagtcgctgcattcaaacgggaaactctctgcaccattgaaactttcaatttgatgtctccccatccgtgggtttatttttgacatggaattttgattatcccattttttgctcccttttcagtctcacgatggagatctctaagaagtacgccgacgtgtcttttttctga

SEQ ID NO: 83631 - DNA, 2047 bp, Heterodera glycines
atgcctaaagcagccaaatcaaacgctgtgttaaatcgtcactggatttcaaagttcccggaaggaacttattcaactgatggaaaaattaatccgggactttacaaattgattgatatcgccaaaattttcattggaggtcgggcgaaaattgataaagactgatattaaatatgatttttttttgcgtaaatacacttggtttttccaatttttagcacatatttttgcatttttaacacatatttaggccttttttttggtttttagcacatattttgggtttttttagcacatattttattacatatttcaggatttttagcacataaaaatcccagccctaattataacagatattgtaccaaaaatagtcaattttcatttttgaagcatatttttgaaatatatttcatagaatttcattaaaaatcgaatttaagaataaaaagaattcgccaataattttataaattgtctgtttttgtttgccaaaattgaaaattttaattcctttttcctttttaaaatctttggattaatttaattgatcaatgtctataaatatcattcgcttccgcgcgaaatgtgccaatttttcccccaaaattgcgcgttcgaagcaactgcaaagcgtaactttagtgatcgaagtcacttttgacgatgacgagtgatcgatgggacacggattatttgtcttcaggaaatcgcattttttttggacgaaaattggggctctattttgggaactatcatatttaaaacatgttttttaaaacactattgaaaatccttgtataaaatttaaaaaccaaacgaattattttttttacataaaattgcagaactaataaatgcatattttttatggctttttgattttttgctaagtcctcactaatcaatgcccccactctgttaattggatagattattttcggcatagtttttgtaattaatttttgtaccattaattatggtttacactttgttgtttttttcagtggatcaagcataaagaaagatattttatattttgcatttaatggtttatgttgacacattcattaatacaacaatctctgctgcaaaatgtgctgaaagctttttccgcacatttattttttccatttaatttattcaatttgtcatcatttttccattgaagtccttttcatccatttgatcatttttaatcaaaacatttatttgtgaattattattgataaattaaaataaaaaattgaaattttaaatattcttttgtaaatgaattttttcataatttaattgccttcaatttgatcatctcaaaggcatcgggtgccgccgttgggaagtaattaattagttaattaattaaattaattaattgattgataattattaaaaatattactctaaaatttagccatttgttataattaattaacagtgccggaatcgtcaaaaccaagtctggctcagtatcaggaattgggatctggggcggagataagacgaactgtgccggggtcttgaaaatttagtatgctttcagaacttgggaatcgggcccgggataggattaacagtgccgggatcttgaaccgaagtcgtgatcagtatcactattttggaaccgggccagggaaagattaccggtgccgggattttgaacaccaaatcaggatcaggatttgggaaattttcaaggacgtgttgttttccggaaatcccagttttaccgggaacctgaaaacaattctgggtcagtatcccgggaaaatcgcgacagttaagtgcctgatcctgtcctttctcgaatgaaaattttttatttaaaattttcaatttgtttaggatgtggcattggagctaatgaaattgttgtcattccattgtcatgaattggacgatgtttttacattttttcattttttattccttctttttaacttttatgcatttttgagggcttgaagaaaggggctcaaaaatagcatttctgtattagagatttttagtgcatataaaagcatattttgaggttttcgagaataaa

SEQ ID NO: 83632 - DNA, 1059 bp, Heterodera glycines
atggaaaatgctgaaattaaatctcaacgaaaaaataaaaaactcgaacatgaaggctgcctttatgtcttccatttgtttaatgccgatggtgacgtaaaattttggcgctgtgaacatcagcacggcgaattcaaatgccgagggcgagtccacacaacgctaaatgacgtcgtactgaagacagttggtatacacacgtgcaaccgcagcgcggcaaatgtcatcgcacaaaaaaatcaccaccggcattaaacgacgtgccgctgaaacgatggaaacgccagcagcaatcagggcacacacgcttcagcaaattccaacgccactaatggcaaacattccaacaaagaacgcgacaaaaaaaaagtgaaaaatctatttagttttttactttttcacatttttggttttaagcttgtgaagcgagtccgccatgaaattgaattgccgccgccagtgccgttaacgcttcaagaattggaacttcccgagcagtaccgaatctacaaacgcaccgaagaagctcaggagcttttccttctggcggattcaggaacatacaccgaaaatgggcgagacggacaacagcgttgtgtttaagggcaattttcagccattttttaattttataattctcatttttggccgactttctttcggaaattgggcttccgaaatgaagtacatttacgctgacggaacctttgcaagtgcaccaacgctcttttcacaactttacgtcattttggcggggtacttttttgtcaattttgttttacattcgtttttcaccaaatttcagtcgtggaaaatgggtgtttccggttcttcattgtctgcttacgtgcaagtcgcagtccacgtacgaaaagatgtttgacatgatcagaaaccgctggccgacatttgcaccgaaaaacgcatccatggacttcgaacagcgatggtcaacgccctccgcgcaaaacatccacagtctcaatcaacttttgtctcttccacttggtgcgcaacatgaaatctcgcctaacagacgaacaaactcgcgtaagaaaa

SEQ ID NO: 83633 - DNA, 188 bp, Heterodera glycines
gccgagctgaacattgcgtcgttgaagcgttttgaggacatggaattggagcggcggaagcgccatcagaaaccgacaaagcgactcgcgttggacgggccgcgtgtgcgcgagctgtggacacgggacggaaagcatttcatcacatttgtgcccgaaccaccgccagccgagcaatgctttccaaa

SEQ ID NO: 83634 - DNA, 360 bp, Heterodera glycines
atgaccaatttaatcatttgccgccgacttcttccgctgatgttcatgcggtctatgctgaatatggtcaaggtatgtctccaagaattgacggtactcctcgcgcaacgcacggaacgcgtacatgtctgcgtacggcaacggagtcagcgggtcaatgaaactgcgcgatatgtgctttgattgcgcactcgcggaactgccttggcatcatcttagggcaccatcatattcaagtcaataaggaatgagtcgtctgtccgccacatcgtcaatccaagaaacgaaaatccggagaagatgaaaaagcaatttttcgaaaatttatcaatttttaggtcaaagcttcataaaaataaa

SEQ ID NO: 83635 - DNA, 1015 bp, Heterodera glycines
atggattgctttcaagccgttcttccgcacatcgccggttttatggatgggatttcacagaaaagcaatgctccgttagaaggcatcaaaaaacattcaacggacgaccgattagttcagctcgttgttaggggacttctctatgaatatgcattgactttttgtcaagagcaagcaatggaagggagaaacggtcagaaaacattgggaggcaaattttttaatgtccagcgaaataataaagcacggttactttaaaaaaaaagattgaaagttatttggtctgttattattaagtaaccggcttctttttgatttcattataattaccctatttaagtatttttatgcttatatttgatttttcgaacttaattttttttttttttgtgctgtgcatatttcgtgcttattctggttttttttggtgcaaattaacaatttttggtctttagctgcaacacattgtgagcgacactttaatgatttgctttctcataaagagaaattgtcgtcagcggatttgtcacttatttcgtggcttgaaatgctcgggagtgaacaatttgcccttcccttcaaacaaaaagaattatttcttcgcgtcaacccacacaagtgagtgaaatcactgaaattctcagaaaatttcgcatttttgtcaattacttttattgttttctttctttttttgccattaggaagcctaacttggaagcgcaatggagtgagcaaattctggcgacgccaattaaacccggcggacactttccccatgcgatggtgccttattcaaagcctaaatttacgcagaaactgatggcatattcgatgacaacttctttgtttttagaccaaggttcgcttttcagtattcgttctttaacttggcagtgcaggccgacgccatcccaccgaaacccgtggcagccaaccgatgtctcagagcactgtgccgtccgtcagttccttttccatccataagacatcaggtggatccgacttggacagtgat

SEQ ID NO: 83636 - DNA, 328 bp, Heterodera glycines
ctgaaatgcatgtttgtgagtgcaatttgcaccgatttccgcaagttgcaggtatttttatagcatttgtcaataatacataaaattattacaagtacattaagcctttgtacgtagtgaaatgaaggaccaatggggagggaagctgaaggtcaagcaggtccgtggagttttgcctacaattttgctgaagagtggcgatgggcaaacgcacaaaactctcagcattgaaaaatgggacacggacacgatgactgagtttctcaacggggctttgtctttgggatgatcttcgatctctcattaactgttattattattttttcta

SEQ ID NO: 83637 - DNA, 806 bp, Heterodera glycines
acgctgactaattagctaacatttataaagaaagtagaaatttgattaaatgcatatacaatatacaaaatattacttttttaaatttgtataaagttcctattttgtctttgactttgcttttttttccatttatttcaatcggctagtgctttaaggttttgtctttgactttgcttttttttccatttatttcaatcggctagtgctttaaggttttgtctttgactttgcttttttgtccatttatttcaatcggctagtgctttaaggttttgtgttttgactttgctttttcttccatttatttcaatcggctagtgctttaaggttttgtctttgactttgcttttttgcggctagtgctttaaggttttgtctttgactttgcttttttttccatttatttcaatcggctagtgctttaaggttttgtctttgactttgcttcggctagtgctttaaggttttgtctttgactttgctttttttccatttatttcaatcggctagtgctttaaggttttgtctttgactttgcttttttgtccatttatttcaatcggctagtgctttaaggttttgtctttgactttgcttttttttccatttatttcaatcggctagtgctttaaggttttgtgttttgactttgcttttttttccatttattccaatcgaccacgttaattcattctctatacatttagtgtcttatttcatgaaattatattaatttaattttaaataaagaggcaaatttttacagaaaataaatagacgctgactaattagctaacatttat

SEQ ID NO: 83638 - DNA, 1170 bp, Heterodera glycines; identical to SEQ ID NO: 18920
  unsure (1)..(1170): unsure at all n locations

SEQ ID NO: 83639 - DNA, 528 bp, Heterodera glycines
atgcccaaattgattatattggcacaaaatttcaacaactcaacaaaaacccgcggaaacaaatttacatacatttcacatgcgccactgacaccgatcaggtcaaaaaactttaaaaatttcaaatattaaaaaatcaataattatttttaaatatatataaaaaaattttcagatttctatcatttggcataacacaaccgttgtgataattcagaaaacattacaaggatacggaatgttgtgatgataacagaatttttttttatcaataattaaattgtaatttttatatgaaaaaaatattaaaaactaaggcgcaatacagtggtaaaaattcttaatattttcattttaactcataaaacatttgttttcaattttttgggtcctttttaattatcatcatttaaattattcttttcaaaaaaatgattaaaaatttttttgtcggtataatattataatttaaaatgagtaaaaaccttgtttcatacatattttattttgttgtttacaaaatttcca

SEQ ID NO: 83640 - DNA, 2635 bp, Heterodera glycines
atgagcacagcacgtccattctacaaaattgaagaagaaactggaaagattgttaagggtaagataaaatttaaagaaaatgaaaaaaaatcaatagggtagaaaaatattaaaaaacctgaaaccggatccgaaccccgaaaatatggtaaaatttctattaccatatcagcattattttctgcattccgagactgtcattttttgattttctgaaaattaaaatttcatttcaatttggattatccaatttcagaaattttactataggctatgtaatctttgcaatagaaaaatttcttaaaaaatttgttttgaaacgcaattttaaaattcgaaaaacaccaaaaaagccctagttttctcaactttgtttaaaaacaataatctcaacctgcaatttttttagtttcacacccattgtttccaacttcggcacggcattttccatcattgagatccaaatttttggcacccacaaaaccgcatcaaccgcacaaacaattggcgccgcccgctctgttgcacaatgctttacctgccgacgcaacccatgcactgctaatcccactgattgtgcaagcaccgcaacaacaacaacagcaacaagttgctgcaactgctggcgctgttgagaaagcgtcttttgaaagcagtacaaccaccacaagcagcagtatcatcatgggaagagaacggaatgttgaaaagccgcagcatgaaaggtaatacgatcgtgttaaattaagtttttaaaaattgaaacaacaaaaaataaatttaaaatatttaaaatgaaaagtcttttattagagattgagaaaggaaaattgtaaagtaaaaaataattaatttaaaaccccaaaaaggaatttataatgaaactaatttaataaataaaattaaaaaaaagtttgagaaacaggaaaattttaaagtaaaataaaaaattaatgaaaaatgccaaaatctataatgcgaattttttttttaaagtttttaatcataaatatgtaggtccaaatgtgaatgtgaagaagaatttgtgccgtcgaaaatctccgatgaagaaaaatttggcaaaaattgttgtgagcgtaagcgcgatttatgcgacaaattaaccagaagcatgaatgccaagaacagcatggaggtgacttcttaaagaaaatgttttaactatggcattctcaaaccagtctttggggaggataacaaaattttacgaattttttacaaatttctaaggaccaaagttttgaaaaagttggaatcagggtcaggatttaggaatcctgctaggccatgggttgcacgagtaaaatcccgctttggcccggcttggtaaatatgggattaggattccgggaattttctatagagctactaagatcaatcccatctcggtctttgttaatttgctgaaaatcccctcaaattttcagcatttcttgagaaattttatggccaaacatggaaacccggcgggaagcgatttgatcgatgatcatttggtcaaacacccagcagaccgggacagttttgacaatttgatggatcggttggccgaaatttcggccaaattggacaattggaagcacacaatgcgggccaaattcaattttcatgatgagcctttggtggtctctaaaaatcaaccatcatcaccacaaccattaccactacaacagcagcaacaacaattcccgatggtctcattcagcagctataagaaaaatcaaaatgccaatgcgcgaaacagtggcgccaaatttgaacatgaaatcagtgccaacggcacaatgaacattaacaacagcacattagtggaccaaatcatcccggaaaataatacggcgacaacagtaacgacaacaatcggagcaataattacaacaacagttatggaagaaacaacaacaagcacgacaaagccacaaattgaaaagattatttcaattcaagaaaggttaaagaatgaatttgccactttgttgggcattgttgaagagaacgatcggaaaaatgccaatgtaatgttttaattattaatttgttttaatatttttttgctgttttggcaaaaatttggttaatcaacaaaatttcattagaaatatatatatatatattttgtaaattttaatatcaaagaaaaagttatttttttttgaaaattttgcgttggttttttaaccttgctaattatattagttttttcatttaaaaataattttcatccaaattaaaaaaaatcttggcacttacttaagttgattttaaaaaatgtatgttttagagttatgagaaaaatgccgccaagcaacgagcgctgccaaatgttcagacggaagaatttggagcgttcaaaaatatgaatgattcacaagtttcaaaattgcctgacgaaaagaatgtgttctcacgatggcttaaatgcaaagatcgtagcaaagttcttagcctttgcctgtaaaattagtgatgatctgatcaaaggctcaattttttgtaaaaattttaagcaaaatttttgatcacttttatactttaattgcgaaaaagtatgagcctaaattaaaaaaaaaacttatttttgtaaatcatttagaaataacacttacatacagaa

SEQ ID NO: 83641 - DNA, 1033 bp, Heterodera glycines
tttcaaaaataggcaattgcataaaatatgaaatttatgctccttttgttgctgttggtgttctgtgcccttgcccacatgggtgatgcttttggatttggcggcatgcaaatgtgttgtcccccgccgtgcccgcctccatgcccgccaccatgctgttgtggtgtgtcggcaaatattaaaaaaaaaatataaattccgattaaaatgaatttgtttttaatccattttaaattattaaattaattcaggcggaggaggaggtggtggtggtggcggatgcggtggcgggggaggtggcggcccccctattatcattaactgtggcggcggtggacagtctggcggtggcggttgcggaggtcgtgcatgattcataatttttctggaatcccaatttaatttaaattatatttaaattatttagggggctgtggtggtggtggtggcggttgtggaggtggaggttagcacatttaatttcaaaatgggtaaatatattaaaatattattatgcattttaggtggctgtggtggtggcggtggcggatgtaagtacagtgaaaaaataataatttacaaaccattattttaaaattccgggtcagcaccgggattaggcttactgtcctccaaaaatcctgtctttaatcgggctttacttttgaaacccctggaggactcgggaaaagaattggaggatttgattaccagcaattaaattccttaattacctataatcggcttttgagcattgtatacctgataccaggatcagtaatccttgtaagttttgaacttgcaccattccgtttatccgcatcgatacaggaaccggatcatttctaaataagacttcatgatcagaattttatggaataagtccctcgtttttagacgaaaaattctgacagaaaaagattttctataaaataaattttaaacgtggaggtggaggaggctgcggcggatgtggttaaaactcatgaaacgaaagcctcttcaacatttgtaccagaagaagaatgcacat

SEQ ID NO: 83642 - DNA, 256 bp, Heterodera glycines
caaaatccgaccaaattttgatgaaatattcggcgaagaatgggacaaaaatgaaaatgaagaaaacgcgatcaaaattgagcaaaaagaggaaaacagtgaagaaaatggaaccgaatcaattaagcaaacatgaaaagtgatcaaaatatgaaagaagaatcaaatgatcaacagaaaagagaaataattcgaaaatttgataaaatttaagaaaatttaagagagaacagaaaatacgtaaacaaagacagca

SEQ ID NO: 83643 - DNA, 598 bp, Heterodera glycines
atgttcgtccgatcatctgccattctgctgatcgttgctgttgcgctggtgccactttccgatgccattctcttcggcggtggtggcaacaactgttgctgctgttgctcccctccgccctgccctcctccgtgccccgtccagccctgctgctgtgccccgccatgtccgcccccgtgcccttgcccacctccgtgccctcccccgtgccctcctccgtgccctcccccgtgccctcctccgtgccctcccccgtgcccaccaccgtgcccccggccatgctgttgcggtaagttgggcgaaatcgttttaaaaatttacactgaaaaatggatttaaaaatttgggtaacatatagccattcaaattttaaaattcaggaggttgcggcggtggcggctgtggtggcggcccaatcattgtgaactgtgccggcggatgcggcggtggctgtggcggattcggattcggaaaataaatcatttaattcgcttaattttcacgtcaatccacattagattttcatactgtagtgatctttttagtttttttttctttgttattgatatgcaatatttctcgcattgcattaattaga

SEQ ID NO: 83644 - DNA, 601 bp, Heterodera glycines
atgcattcaaattttcgaattggcgaaaaatgggacaaaaatgaaactgaagagaaaaggatagaaattgagaaaaacaatacctcactatcaccagttgatagcggtgaagaaatggggaccgacccaattgatcaaacaagcaaatattctaatcaaaatgttatcaaaagtgatcaaaatacgaaagataaacaaaaatgaaaatgaaaaatatggaagaaagaattggtgccaaaatataataaaagtaaaagaaatattcattttaatattaaattaaaattaatattaatatttttaagcacaaattcaatattccaatgagaataaaataaaaaagatgaaacataagattaatttttatgactcttttatgaaagaattgctaaatatgtttttcagtaattattagtgaccggacttttaggcaccaaaatttttaaaataggcacaaaaggtgagaaaaggcataaaaaatggacaaaaaggacaaaaaaggcacgaaaaattggaaaaaggcagcaaaaagaaactttttttagacaacattaaaaaaaaattttttattaaagatttttagagagcaaaacacgtaaaa

SEQ ID NO: 83645 - DNA, 526 bp, Heterodera glycines
atgttcatagtaccaaatttgtttcatgaggacccaatcaaatgttggacaattacaatgtttgtcgccattttgactgttaatgtcagtgccgcctccaatgggccagttttgtatgtgacgaggtaaaaataaaataattttaaatttaaataattttaagtacggaatatcggaaagcatttgtccatgagtttggcctaattcgccgcttcttttgctttccaaacaatgcttcttcctcggcgaatcaactccaagccaatcatttgccaataaatgttgtaaaagtcacgcctattttgagcccaaaaacaaaagttgtcacgacggcattttgattaatattagaatgtattttttatatattatattgtaataattcatttttttgttgtaatctatgatatttagtgatagatattaactattttaaattgatgaagtggagagctcagaaagtaaattttcaatattcgtgactacatttcatgattttttctgcactaaaaccgaatttaataaa

SEQ ID NO: 83646 - DNA, 734 bp, Heterodera glycines
atggacatcaaatattggacacaagaatattggaaatttttatccgaccttgaccaactacaaatccccaaagaaattgactccgacaactccattcccgactacgccaagctgcttattaagcagcttcactccctcttaagcaccgcctccgtcctaattcattcacaggctgcggcagtcgacgcggtcgaagaggaacgacgactgagaaccgtcgttgttacaaatgtgcccgaaagcaaatcggacaaagcaacggagagagcccgggaggaccgtgccgttgtggacgaaattttgaatgccacggacgttgatcaggcaccaattgtcttccgtgtcggcaaacgaatagatggtcgaccgcgccccctcaaaatggaattcccgagcaaacatgcagcgcggcacgtcatccgcatgcgcggaaaggtgcaagcattgaatggtctccacaatgtccgcgtccgcgaaagcatgaccaaggaccaactgtccgagaggcggaaactgatcgaagaatgcgggaagaaaaggcaggcggacaacggtgattgggtgatatatgccaatcaggtcgtgctgagacaggacattgaccatattcgaaaaaatttttaaattgtccaaccaaatcactgcaaattacctataattattacccaaaagtacaaaaatttttccggtctgtaaaaaatttctaccaaaaaattactcatccaaacttttta

SEQ ID NO: 83647 - DNA, 1129 bp, Heterodera glycines
atggcactcgaaaaggccgccggcgtggccatagcgatggccgtgtgcactgtgctgctgtgtgtggcgggcattggctttgtgcagcgcgaagtgcagtccatctgggccgagttggacacggagatggaccggttcaagctggacacggacgacctgtggcacgacatgttggccatgggcgccggcacggcggccaaccgccaacgacgaaatgcgtacggcggcgcgtcataccaagcggccggacagcaggcggctgtcggcggttacggtgtcctggtcaagacagtatgcagtaagtgattttgcatactgtagtgtagtgatgggaatgataacattattgaaaatttagttgaaaaataattatgtaaaatttgcttgaacagaatgccaaaaaagaaactcttgcccaccgggtccaccagggcgtcctggcgatgtgggttttgctggcagaccgggcattcccggaagggacggagtgccgggcgtggcagcggacaattggcacaacgcaccgttcaaaggatgcattgtaaaattataaaaacattttaactttttaaattttttgctagaactgtccaatggggatgactggtgccccgggggcagcgggaaagccgggacagcgcggaatgtaagctaaaatttatgaaataaatcttaaataaagaacattcagtatttaatttccaataaaaatttcggcttttttaaaatcaaattaaattaaaaaaataatattaaatgtacatttaaaatttggttaaattttaactttttttaaattttatttgcaattaaatataaaagttcagtcaacgaccagaatttttttcgtaataacacatccatataaaatgtaattcattggaaaaattcaggcgtggtcagcgtggcagcccaggaatgccaggacgtgatggcatcccgggcctacccggcgaacaagggcatccaggcgagaacggcaaggagggcggcacgggagtgaccggcgagaagggcatcgatgcggagaagcgtatcggccgcaagggcttccgcggagtgccgggcgaacatggccccgagggaccattgggagagccgggaaagccgggcccagtggggccaaagg

SEQ ID NO: 83648 - DNA, 1674 bp, Heterodera glycines
cgacatgccgaaattgatgaactgcttgagcaccttgaatcagtaacagtcaaagaattttgttaatcaattaataataaataaacagggtgaagatatcaaggaatctgtcttcatcgtcttctataatggtgaacggttacggcatatcattgataaggtaagaaatattttgctattaatccttttaatttcattttttccttgtcttaaaaataaatgggttaattaccctttaattaatttaataattgctttaattatcctttaattaggtctgtgagggcttcaaagctaagcagttcaatcagtgcccgaagacgagcgcagatcggcaaactgcacttcaacaagtgcacacaaacattcacgacatgcgaatggtctttttacaaatcgattattttttatattaattgcttttttatttttgattatttattaataaatgattatttaattaggtgatgtctcaaacgagggagcatcgcatgagagtgttaaacgaagtggcagcaaatcacagaaaatggttaaaacaagtgagagagttttttcaaaaataaattcaaaaatgaataaacacctaatttagaattaattatttcattaaagagaaataaacaaaaaattaatttaattaataacatctaatttaaattaattaattaaagatgaaatgaacaaaaatgctcgtttaaaaaatgaatacttttttaattaattaggtgcgaattcacaaatccatttaccacacactgaacacattcacttttgatgggattggcaaattttttgtggccgagtgttgggtgccgttgagcgatgttaatgatgttcggatggcgttggaaactggcgtggtaattaggcacggcacaaaattgttggggcggggggtggggggcggaatggcaattaaattacatttatttagaattcatttttatccatgttggacctggacctgaatttcccggaaaaaaatccaggaaaatctttggcttaggaaaacttccggctccttgaggcctggctggatccaggcctgaaccttttttttaatttgtttttaaaagcaagcaaatgtttaaaaaatcaatgaattcttaggaacatctaaaatatatgacaattataatatgatatttttaaatctatatcattttttggtaacttgaaataaaaaaattgtcactcgaaataataagttttaaaatattatcccggaaatccaggttttcatgccgaacctgagcctagacctgaatttttttcacatttgacctggacctagatttcctggccaaaaatccgtgaaaatccaggtccaggaaaaactcaggttgccgaaaaattgcctgggtctggacttggatcaaggaaaaacccaggcctggttccaggtcgaatacgaatatttagatatttattgttatggctaaattctgttcaaaatattcttttttaatttattttattaatacaaacatatgttttgtcttcttcaatttatgacttgtttctattcatggcataattactaggccccgccgcggggacgggatcccgcgcgggattttgcgggatcctagtccgcaatcccgcattttttggaaaatgcgggatttgctggattaatcccgcgggatcccggcccgtgaagaatttttg

SEQ ID NO: 83649 - DNA, 774 bp, Heterodera glycines
atgggttcgctttaccgctcggaggaaatgcgattttgccagctgattgttgaacgggacgcagccttttcatgtgttgctgagcttggcaagcatccattcgtccaattcaaagacgtaataataaaaaacaaattaaatttaaatttaaccaatatatttttaaataaatttcataaaaataattacatttttaaatgtagctgaatgccgaagttaacgtcttccaacgaatgttcacgaaagacattcggcgttttgatgaaatggaacgcaaattgagtaattttttttcgaattttatttccaatttttttaattttattaaatttgaaatccagaactttctaaattgtttaaaattaaaattttctgaaacattaaggatttttggaggtacaaattcgcaaagaaaatcaaccaattgtggacaacacatggggagaagcggttgatgtaatgtcacatggtgagatcaacgaggttgaggtaatataaaggaatttaaattaaaaaatattcaaaaaaatttaaaaatttttacagcaaaaattgattgacaaggaacgcgatatcattagcatgaatgacagtgatcagcagttgaagaaaaattttttggagctcaaggaatggcaatatgtgctcagcaaaacggatgaattttttcagggggtaaaaataaaattttatggaaattttctttattttttttttgattttgagggcattacggatgcggctgttcaagaaatgagggacaaactgtcgtag

SEQ ID NO: 83650 - DNA, 1453 bp, Heterodera glycines
  unsure (1)..(1453): unsure at all n locations
gtggaacgccttgggcgccgaactttgcacattactggcctcgttggcctgcttttgtcaagcgcttttatcgcaatttcaatgcttatatcaaaggtggctttttgtttaaaaaataaaatatatttaaacatttgctttccagtcagttcaatggttttcatatttttccattttatttgttctgctttttgtcatttcggcggcaattgggccaggtcatttaattaattaatcattagttaatcaattaaacttaataaattcattagctgatcaattaaacttaattaattatttgttaattaattaaatgtgataccggtttttccagcaaaaaacaatatcaaatagcaaataaattattaattaacaagagaccggatcttattagaatctattaattttgaactaaattgtttttatttcggtaataccgttaaatttaaaatttaaaaaattaaaaaataaataaaccaaaaacagtaatatttatattcaatcataattaaaaaaagctatttaggctcgattccatggttttttgttaatgaaatctttccattgaatgctcgtggcaatgccaattcaattgcggtcctttctaattggggctcaaatgccattgttggcttcttctttccaatgctaaatgtatgtttacgtacattagactaattctattactgtaattccgcatatttaaatacggttttcctatcatgggaaaataatattttcaaaaatcctaggttatcaattgggagcggattcttaagtttttaatttatttttttaggaatccctattttggacttttcacccctaaaagaggcgtccctttttggcatttttgaaaaatttcttaacaaaaatcctataaaaagaacccagatttttgcaaaattttcgctcctattttaccatttttcgcctttattgagcccctctaaattagaatttttcgcgtctaaaaatccgctccctagttatcaattcatggaatttctcttatgtttagaattattttttgactgtgttttttatgggatatatttttcgaaaaatttataaaaaatctaaaaaaatgttttttctagtccgttctggatgagtatgtgttcttcgtgttcaccgcactgtccgttctgttcattgcatttgcggcaaaattcatgccagaaacgaaaaacaaaagcctggaggacattcaggcggaaattgatcgacgacgagggaaaatgccaattagtcnaatgaataatgccaaancgaaacgtgccaagaatgggaaagaaaattgtgaaaaagtctaacaaaattttgcgatgactttaaacacacacaattttatacaaattaattaatttaaatttgcatgacgatcattttacgatttctatctattttttaaaaaatcaattgtctttctgtgcttttatttgaaaataaa

SEQ ID NO: 83651 - DNA, 3585 bp, Heterodera glycines
gtgatggaacaaatggattctggcaaccatggaatgcttcggatgattacagtgaaattaaaaaacgtcttttgcgtcctccgaatgatttctccgagctcaggggtttagttgaagaataagataatcataattaaacacttgcagaaattatacgcaaagacattgaaagaatggcacagataaaggaggaaaacgtaaaaaagaggaagggaacgaccaaagggaagaagcaaatgacggatgagcagaaggaagcacgggaagaagaggggcaggaggaggacgaagtgaactcacaaacatttgaaaatagaaaaactaaacaacaaacactgaaaggaactccattggcattcttaaatacaccccaatttcctttttcccaatttagactcgcaggaacagaatgatcaagcgaatgttcttcgttttttgcctgacctttcctttctttgtgatgttagttggaaattgtttgctctcaattagaaattcatttttcctttagccactattggcttaaccatcgtttcgattcattcctgttgcccatcgatcctaattcttatttatctgtccttatccaagtcccttggagcgattttattgaacgcattgtgcctactggaactgtaaaaattcattgactgtgattttttaatttacgtttgtttatttttcaggtgtcaaatgttcatttgaaagtttctcgtgggcctgaaagaagaatttccaaaaaagcactggtcacagttatgccgggtgcgcggtggccggatggaaaaatggtgagagtttttaaaagcaggtttaaaaaattgttgatatagttaggctgtggctagtgccctccccccatttttttagaaataaagaattctaaaagtattaatggctttccgattttatacccagcggcgcctatcggccacccgccggacccacattttaccttatattttgaaatgttgaccctttttttggcacaaaaacggctataaatccctgctttttgcacttcggcgctgaaaattttctggagaaaaaattttttcagttgccaaggatgttttttgtaaatgtgcccgacattggtcgagtggaacaagaaatcaggaaagcggtacttaaatgcgtaatttagcataaaaataattctaattgtcagtttaggaagtggatgctgggcttgcccctgaacattggagcaacatccaatggatgcaaccggggccaatgtccgttcatatgttttccattttcattccacttttaggtcattgattataccttctctggtcattcttgctttatttgtccttccatttggttttccttggtcgaatgatgactggctcaaaaaatgggcaacttctccgaatcgatcgtaacacatttctcaaagcagtttcaactgctaattttgttcagtcttccatgatggggcatcgtcttcgaatttatgacccggcattaaaggatggtaaattgaagatcaaatttcgtgacgtggcaggccttcacgaagcgaaggtggaaattagcgaatttgtggattatcttcgtcgacccaacaaatacacgcgattgggcgcgagactgccaaaaggtttttctttttgaataaaatagcgtcccaagtctctgttaggtgcccttctgactgggccgccaggctgcggaaagactcttttggccaaagcactcgccgcggaatcgactgtcccattcatcaagtgaataaccaaccacgaaacaatttattttcctaaaattactttttcagcattaacggcactgagtttgtggaaatgattggtggcctcggtgcttcgcgaatccgtcaattgtttaaggcggccaagtcgagggctccatgtataatgtgaatagaccgattagcaaatgtcgcttaatgttagtttatttgattaagttacattgatgaaattgacgccatcggtcgaaaacgtaattctgggtaattaataatataaaaaaattgattatattgaatccgcaaaaattataggcatggaaatgacgagcaggagcacacactaaatcagttgttggtcgagatggacggaatgttagtttgaacatgagaaaaatcacaatatttaacaaattcagggacacggcgaagggaattgttgtcattgggagcacaaatcgccctgatatgctggacaaagttctacatttaagccgtatcactttttattgatctcccattgaaaggctcttcttcgtcctggccgttttgatcgaaatgtcagtgttgacttacctactctgattgaacgtcgtgagttgttcgacttgtacttgcgcaagattaagaaggacaaccgactgacaggaattagccatcggctggctcaattgacccccggatttagcggtactcgctaattcgaaccaaaaccctaaaaaaatccttttcctttcgagctatttcatcttttctgcattaaacactacaaatttacttcgtccaagtttccaggtgctgatatcgcaaatgttatcaatgaagcagctattcatgccgcgacaattcaaaagaaaatggtggacatcgatggttggttttaaggaaaaattataattgttaacccaatgccgtagccagaagtaattttggtcaagtccaacaaaaactttccaattaatagatgtggattacgcactgcagaaaattttggctggaccagaaaaacgtagcaaagtattggtaaaggaggagcgtgaaatagtcgcttatcacgagtctggccatgcattggtcggatggttgctggaacacacagaagctctgctaaaagtacagagacccaacaaatttataaccaaatttatctattattaaggtgacaatcattccaaggacaagtgccgcccttggatttgcccaatactcaccgaaagaccgaaaactgttcactcgtgaggaattaatcgacagaatttgcatgatgttgggcggacgagcggcagaaaatgtgacatttgggcgaattacaacaggtgctcaaaacgacttggaaaaagtaattagaattatgctattgcactaataaataaacataaaatgaatttataggtaactaagcaagcacaagcgatggtcaaaatgtatggaatgagcgatgttttgggacctatcagtttcactcccgaacccggcgttgacccacaaagtgttcaatttcaaccgaagccttacagcaaaaagctaggaaacatcattgatcaggttcgtgcgaggcgtttaatacccaaaaaattgggaaggaaattaaaaaaacaatttgttttttgccttaaaaacattttgtttttctgaaataacgtattctttttctgtctgaattttacggattgaaaaagcgatataaacttattttggacaattgtttaacgaagaaaagaaaaattataatttattttaattttatatagtattcttgaggtaaattttcaacattctattttcaggaagttagccgacttgtatcggatgcttattttgttactgaaaagctccttcgcgaaaatagaaatatgctagaaatg

SEQ ID NO: 83652 - DNA, 629 bp, Heterodera glycines
atgggcattttcaagaaaagtgaaatattttacaacttttttgtgcactatcgtctcctctttgtaattctttattaatgctttagcttttttgatcattttatatgtcattttattaaggtgagtctcgcaaatttatccatcgcactttctcaagttggaaatgatcaaagaaacgatttgcaagtggacaatggcacagtgtgcaatttgcccttcttaaatcatccgtcgatgccaaagtcgcctgaccgatttgtgtcgctggttttaatggtggtgtctgtttttgtttcacataaattgtttgtcgtagcttttttgggattctcgagtgtcggagtaaaatctatgggtggactaaatcattaaatcattgattttgaaaatgaacttttataattcagaagggactgcaggcaaaagtggataacttgcatatttaggggggggggggactttacagaaaaaattatttgttaaaaatttttcaaaaagttactataatttttttttaatctaacaatcaaaaattgaaaatttatttttaaattaaccaaaagcaaattgcatgccaaatttacgctcattacctaaaattaagaccggacgggattctaatgttttta

SEQ ID NO: 83653 - DNA, 899 bp, Heterodera glycines
atgattgcggtgtgtctgctgctgctgatcgcgggtgtgacatcatacaatgtgccgcactgatcaaagagagattttcttttagttttttccatatgctttttctattttctatttgggtattagatgagtgatgctatccgtttttcaatagtttatttcatatttcctgttttttttgtaaattctttatgtataaattgttgacaaaaaaagttcagttcaaatttacattcggtgtaaagtttcgcgttggtacataggaaaatgatctttttcaaggtttattctagagaccgagccgggcccggtaccggtttttaccgggcccggcaaaccggcccggtgatttttggaaaaatccggtttgaccggtttttgagaggccaggcccggaaaccggttgcttctgaaaatatcagcccggtccgatccggcatttttggaaatctcggtctctagtttattcattaatttatttgggcaatgtgaaatttttaatacaaggaacaatttttagtttttttttgacgaaaaaattaattaaaataaaataatgtaaagaattttgctgtccctaatttaatttttttttttttgtgctaaaatcagttttctggacttttcgagggtctgatcacgaaactgaaatcggattcgcttaaaaggtaccggggaaattttaaaatttactagtatttagtatgccgaaatgagaggtgcatttttctctgcgctctctatttattgggttcctctcgttttttggggggattttgtatacccataattgaatctgaattttttgaatatgtaaaacacaagcaaataaaataagttttatattgtttatcatattaatatacagacattatcttaaacaaatatctctgaataaa

SEQ ID NO: 83654 - DNA, 1188 bp, Heterodera glycines
atgccattggacaaatttaagacggttattcaaggacttggaatgtgtgaaaaggaagtgatttggaaatatgcgaaacaggaggatcatggtcggatgtcactcttgcaaaagcatgctcctaatgtgcatcttgtggagcattacgatcaagccacagttattggtctgtaaattttatgtccatcaaaaaaatgccatggcatggttaggctaatctaggctaatccaccacggccggcgcaaaattcaaaaatttggaatttaaatttactatttttattggcaaatttaatgaaaaatttcaaaaaattttccgatgggcttgggtcaaccgattctttacgttttttcaatttttagccccccccccgtaaaatacagtatggctggcctctgtctacggtatcatattgtaaaagtgtgccaccattttcaggcaataaaaagacggaattggtgatcagcgaatgcgatattcgtatcgtaatggatgcgttaagcagtggaaaagcattgctttgtctgccgatgtttgccgaacagttttatgtgtcggaaaagctgcgacgcatgggcgctgcggttgtgcttgatccgcgcagtggcagtttcaccccggaggggatttccaaaagtatcggcgaagcattgacaaagcggtaatgtgcgcgcaaaatccttataatgatactttataggggagttgctcgagttttcggctctaaagtcgaggaatttctcggctttttagggtcgagagtcgcgactctcggggtcaatcccaagtcttgaaaaattacgactcctcactctcgagcagtcccaataatttgttgtattagattaattataatttatttattttaaaacattttttagttatgacgtttcatttccttcaaacgagtccctgaagcaaacaattttgaatgcattcaaggaacttggtttgttcaaaaattaatcatttttttcataaaaatagggggaaaaaatcatttatctgtttcaaattttctattccattcagcacgcagtccaaatagatgagatttaggggaagataaaaaaacaggcattttagtacgagtaaggcctatatacgaattttagggtgactcaaatatatctggggtggtttgtgccctgagggtttaaaaaatgccgaaatttcgctaaaataaa

SEQ ID NO: 83655 - DNA, 663 bp, Heterodera glycines
atgccgccaaaaaaggtaagtttgaaaacaatttttaaaaaataaagataaaacaattttttaaaaatgataattttataatttttttcagaaattgtccgaagtcctgccaaagccggtgatggtcacacggagtgcgaccaagcgtgagacggaggtgccaaaaaggcagatggccattcgcggcgctggtccaccaaagcaccgtgggttaaaaatgcgcagaatttaaattaatttaaaatttaaattaataaaagtaaaatttatatttaagcattatttccaccaccagcagcagcagcatcaactttttcaacttttacaccgccgacaccaccaccattttctactccatttcacaagcacgtctcatttttgacaccttcaccaccaccaccagcagatgatttggagtatggacctgcaccaccaccaccaccagcaacagttgatttggatcaaattccgcttccgccaacaccaccaccagcaacattttcagtggaattttggctacaacctgcaccaccaccaccagcagcagcaacagttcatttggatatgaatcccacatcatcttcaaaagcggcagcagcagacgaaattgaacgtgaaaaaaagaggaaaaagcggcgaggcaatcggtggagcaaaacaaag

SEQ ID NO: 83656 - DNA, 1224 bp, Heterodera glycines
aaattgtccgaagtcctgccaaagccggtgatggtcacacggagtgcggccaagcgtgcgacggagatgccaaaaaagcagatggccattcgctccggtggtccgccaaagcaccgtagggttaaaaacgcacagaatttaaattaatttcatttttaaattattttcataaagttaaaaataaaatttatatttaagccttatttccaccaccagtagcagcagctgtgcaattggatgttggattggagacaccacctccaccaccaccaccagcagcagcagcagcagcatcaacttttacaccgccgacaccaccaccatttcctactccatttcacaggcacttctcatttttaacaccgtcaccaccaccacctgcaacagttgatttggatcagattccacttccaccaacaccaccagcaacattttcattggatttttggctaccacccgcaccaccaccaccaccaccagcagcaacagttcatttggatatgaatcccacatcatcatcaaaggcggcagcagcagacgaaattgaacgtgaaaaaagaggaaaaagcggcgaggcaatcggtggagcagcacaggtcagatttggaatttatttttaaatttcaattcgattaaatttactttttttatttttaactttgtattacgaattataaatttgtttttttaaaattgtaatgaaattatagaagcgccagactgtgcgcgtaaagaagggtagtgtgccggcaaaggtagtgccgcgccaccctgagccaggctattttggcctcctgcgaggtcaaaagccgagaggtcactagtaaatgctactacatagactgggccggtgagtcttccccccccccactgccctccaactgttttgattaaaaaattttaaagaccagcgtggtcaggagagctggattctgtccacatgcaacgacgcattagaaattaccggcgaacatctcgaggattcggctgtggatgccgcatacgacgcggtgtacggcgagccggtcgctgaccatctagcgagaaaaatcgtaatgagacccaaataccacgatcgtgagttttttttttgtcgacaaatttttaaaataatttaaattgtgaaattcagtccggcgtcgaatggtcggagtcaatgctgcaccgatttgccgtcagcactttgctttccacacttgtgtcacaaaggaccaatttgataag

SEQ ID NO: 83657 - DNA, 414 bp, Heterodera glycines
atggcaaaattaaccgctgttaactctgcaaaaggaaagttttgtgacgggtattgttatcacaaacacaaaatgacaaaaaataaaacttggtggaagtgtgaactttaccaacaaggatgcaaaggtcggggttttgagagtaatgttgagtttttcggaattcgaatgcataatcatcctccagaccaaattctacttcaaatcgagatagaacagtagatttgaagatgtcaaacatagaaatcagatttcaccttggaatttcaaaaatatcacgtgaactttatttttcctctcagctgcgtgattttgggtaacccaaaagttgaaaaaaaaggtttgatatttcatgactctgagcttttgaatgagcttaatttttgtttaaaccggttcaattttagcgattga

SEQ ID NO: 83658 - DNA, 415 bp, Heterodera glycines
atgaatgataaaacgactactgggactgaaatcttcggcattccaaacactgggactcaatcctccagcattccagtcacatggactcaaatctccggcattccaaatacagggactcaatcctccagcattctaatcgccgggactcaaccctcaggaattccaatctctgggactcaaccctccagcattttaatcactgggactcaaccctgcggaattacaatcactgggactcaaccctccggcattccaagcactgggactcaacctcagcaaatttcttcagcattttttacatttgagtgctttgcgatattgaaccggtggggagggctcggccgcttcgcggcctcgcttccaaacatttatttttacgctcggtcattcgcggcggttcccgctgatttcgtca

SEQ ID NO: 83659 - DNA, 1401 bp, Heterodera glycines
atggatttgtacttcaccaatgtgcaaccattcctcgattttcctgttgttgagcaggaaattgagcgagaacggcaaattaaaaaagaaaatcgtgtcaattttattggaggaatcacaatgccaaagggtgttgtgccaaaattgaatggggtaatattggataacaaatataaaacaccaggcctagattaggcacaaaaaaacctggatttcctggataatattttagaatttgtttgattttttgactctttttaattttattttcctgattttttgtccaagaaatccaggtccaattccaatatgaaaaggcaaattagaaaattgtatcaattttattggcgcaatcacaatgccaaagggtgttgtgccaaaaatggatggggtaatgttggatttttaaaattatttgcaaaaaaaaatgacatgataaataggagggcttaggttggactttgataaaatttagtgaggtcgtttaggaatactcggttctatattataaatttggttacggtattgcgggcctatttacagtaatttagtgagggtcatttaggaagactctgttgtatattataaatatggtttatggtgttatggggtctgtttatagtaatttcgtaaggtcccttaaaagaagatctgttctatatgaatattttaataattaaaaaaaaatttttatttgcaggataccaaacaaatatttaaatctgccaacagtgaaaatgaaaatggtggcgttgtgttgctcagttttggctctgttgtggagatgaatgatggcgaagcacacgcagttgcactcaagaacattgtggtggaagtgttcaagcagtacccgcagatgaacatgatcatcaaatggggcaaaagggcgccaattggcaccggcgaacagtacaaaaagttggcggacaatgtgtatgccaagagttggctggaacagtcggcaattcttggtttaaaaaataaatttgaaattttttaaatttaaatttaaaaaaagacggcggactgaaactgttcatcacccatggcggacagaacagcattaatgaggcagtcaaaagtggcgttccgctgattttgttcccattctttggcgatcagtttaacaatgccgaggcattggcggcgcgaggggtggcaaaagtgattggtaaaatgccaattttgaaatttaatttcttgttttaaatttttcagacattcgctccaaaacattgaaaaatgattttgcggatgcattcaatgaaatgttaacaaattacacggagtataaacaaaaaatggacgaattgagcacaaaaatgaatgcggttgagccggaaaaagaatttattgaaaagtttcgacaactcagaaaaagcatttaatcttttgaataaa

SEQ ID NO: 83660 - DNA, 557 bp, Heterodera glycines
cgaagctttgatgaagttcaaactcggcactctcccactttttctgctatttagtgaatgtttggcggtgatacctttgagcttatcgaccgaacgatttttggtaagttaatttttaaaaaattctctaaacagcgtcgattgagaaggacaactttgaaaagatggggaaacgaagcgaagtcgaatacggtaattggcaattgcagaacacagtaacaggggggggggtctattcagaccaattcatcaagggaaccggcattccgatgatcggctttggcaagagggacaccgagttcgacccggcgaccattccgatgatggtagctggagaaagaatgctttggaattcaattttgttaagggcttcgggaaaagagggacgggcaggccattccgaaacaatgccatggagacgaagttgcaactttggagaatggggctgctgggataaaatgaaaacactcatcagcccatccaaatgatcgaatgctttgaacataaataaattacaataaagttaaacaaaaaaatgctaataaaaaggaggtcaa

SEQ ID NO: 83661 - DNA, 404 bp, Heterodera glycines
atgcgtactgtagcaacaaataccgtatagccgcgccgcgccgtcagacactttgatttttctaccataccgtatctttaaacagccaaacttctctcgtctaccgtacctgcctgcgtctaccgtaataaatcgaattttaaaattaattttttgtttttcgacgccagttaacccaccaattctctgctaacactcgctgaacccaggccaaacatggccattgtcgtggccacgcttgacgctctgcgctccgccgcttcggctggcggccgctcgttaggcttgtcattgcccatggcattgctgcttctcacgctccttttttggcattggcaccgcgggcgccgggctcatcggcacacattccctccggggccaacgccactgccgttgatcgggaa

SEQ ID NO: 83662 - DNA, 940 bp, Heterodera glycines
atgcccgggggcgtcgagttcagcatcatcccagcaagcagtgagcagcctcagcagcagcagcagttgccgttctttgtgcgccgtgacaccggtgaactgatcgcatttgcggaaattgatcgggaggagcaggcacaataccaattccgggttatggtaagtgtgtatcgtatacattttggtactaatttgtaagtgactggtttaaatggaaaaagggggtacagtatcccttcccatgattactgtaactgatcaccggggttacaatgactacctatcgttttactgtaggcgttcgaccccacacagaatcggagtaaatgggaaaaaggagtagagtaaacattccatctaactaatcttcgtgggtacgataggacagatcaatactgatcagatagaaagaaaagtacaacagcagatggatgaacagtacgcccaaaaaatagttgaattttcgccccttgcaacatagtatactgtaagtacaattttactgtaggctttcgacccggccaagaatcgaagtgccgagacccatgtgacggtgcacattctggacgtcaacgacaatttcccccaatttgtggagccgttgccacgagtgattgcgctcggccgactcagtccgcccggcacactgttggcccggttcagcgccgtcgacatggacgatggagcgcacggaactgttcgctttcaaatcagttcagttgctgcagcagcaacagatcgggttgatggtgatcagcagcaccagcggcatgatcagcaggagaacaacgagcaggatgatgccggtccgggcgcggacgggcacaggttgttcagcatggagccagacggtcggctgatgttccgtggattgccatcactactggcggccgagcaacaccatcaagatggagcagtacagcagcaacaacagcaacag

SEQ ID NO: 83663 - DNA, 612 bp, Heterodera glycines
atggaccgggacgggacccgggaccgggactcccgttttaaacgggactcccgtcccggtggcttgtccaaaaaaacgggaccgggaccgtgagtcccgttttaaacgggactcccgtcccggtggcttgtccaaaaaaacgggaccgggaccgggactcccgttttaaacgggactcccgtcccggtggcttgtccaaaaaaacgggaccgggaccgggagtcccggcaaaatcccggtgggatcccggtcccgtccgggctctaatgataagtaattgaaagcaaaatattagtgaattttgtgaaaaataatgcttataaaaataaaaatttataaataatggagttaaacaagaaatattttcatacaaatcgtcaaaaagttgtttaaaaactttcagaaataagatttattctccttcatacattgaatcaacaaaaataaatattttatatttaaaaaagaatacaattaaaaaaaacgtgaaaataataaattaatctaaatgctgatattttttattgtagaatcttcattgatgtaaattattaaattaaaagcaatattacaaaacaaataagcaatgaaattaaaaaacctttaatacaa

SEQ ID NO: 83664 - DNA, 706 bp, Heterodera glycines
atgcccatttgccgatgccaccattatttgtatgctaagaaacggattagagtgtgctcatcagtggaagaagcggacttgaaaaaacgcgaggcatacatttccggttattattataattatttttgaaattaaaaaaaaaattaaaattgcattgcaaaacaaaagctgtacattttgttttctcttttaaaaaatttaataaaatatttctttattgaaaagttattttaaaaaatttaatttaatccaaatttttgagtaaaaaccaaatttttataaatttaaagcattagaaaatgattaatttccccccttaaatattcaaagaaaaattaattaaaaagttaatctaaaataagagaaacttaaactattttcaggggaacatattgagaagaaaaatgacgtaaaaattttgcaggtgattttatttataaatgaaatgtcaaattcccaaaaaaagaaacaacgataaatgccaaatcttaatttaaatatttaataaaagtgaccctttttcagctgcttctcagttgaatattttatcaaaaaaaaacgttatacaaaaattacatttgtgataaaaatagaaaccttttaaaaaattaaaaaaagatcaaaaaattatccgataaaaatgtttacattaatttcctcaaaacagaaattaaattgtcgaattttttaatgaaaaatataatca

SEQ ID NO: 83665 - DNA, 1150 bp, Heterodera glycines
atgtctgacaaccgaaaagaagcagaggaaaaaatggcaaaatcaatgtaaaattaaaaatgctaattttcaattttcaattttgtttttccattttttcagtttcatctccggcgacggttggctttcggtgttcgatttgcttgagccttctcaacttggccttggaattgcgctgatcagccaccgttttaacttctacgtggatgaacacttgaagacgcgcaaatggacattcggaataattcgaattggaagcaaaatcagggagaatggcaccaacgaaatggaaattgtcaattgctatcgaaatccattgccaattgcgcaaaaaccggtgccaaagaaagtcgtcggatttaaagccatttcaatagagtaaaatggataaattatttattgtcaaatatacataaattagtatcatttctttttcagatacatcgataacaattccatcgcttttctccaccgtttttgtccacttttcgcctcattctgtccaattaatttggccatctgcacgaccaaacaccgaattttggccttcattctgcgcaacatttggccaatgatcgcgaaaaacatttgtgggatgtttttgtttgagaatgttttcagccctttgcataaattcgtcccatcatttctcaacgaatgtccatcacttcgcattgtctctttcatttttgacgacattttcgccgaatttccatttgatgacagtgccatcacatcggatggacaagcggtggttaagtggcttttcactccacttcaaaacgctgtgccaaaggtgttgatctgcacgttggacatggctgacgagaatttggcgtcgaagattgaagccttcaaagcggtgattttcaatgattttttttttttggctttttttcgttgttttttttggctctaacagaattggtcacttcaaccataaaagttgtaaaccttttggtttttcatgtccccctcccaaccgaaaagtgtcattcattttcatatttcttaaccaatttttccacatttttaggcttttgcctcggcttcatctcccgtcaatttcattgtcgtcatttgttttattccttcgtcttttgctgaccctgttgtgccatttgtgttgaccaacggaattgacccgtga

SEQ ID NO: 83666 - DNA, 451 bp, Heterodera glycines
atgaaggaattaaatgatgaaattaaagagagagaaaaggaagaaaaagacgacagaaagttggcttacaaattagcaaaggtaaaggaaaaaaataacggacaaaaaaatgtgcaaaaaaagagaaacgaaattttaaacggacgaccaacggacagaaaagtgaataaaaacgacaaaaatcatcaaatcaaaatgcaattgaaattgccaacctttgggaagaatttgaggaaaaaatggaaaaattgtatgaaaaaacgaaagaaaatgccaaggaagaaaaggctcaaaaaacgcatttctgcataaaaaattttcgattcagatgtcactatcggtcactaaaaatcactattttggcgcttcgtcactaaaatagttaaaattcactattttggcattttgtcactattttttcactatttcgacttttttggaaaatttctca

SEQ ID NO: 83667 - DNA, 1083 bp, Heterodera glycines
  unsure (1)..(1083): unsure at all n locations
atgcggacttcatcgacaaatttgcatccgttgaggtacgaatcttatgaggtgctcaaaaaacatgctaacgacattgacaaccgattgcattattcacttcaacggctcgacaattttactcggctcaactttttggtggaagtcgaacggaaaggaaaaacgaaaatgcaggaaggaaatgaggaggacgcatacatactttacagcagagccatgaccatttatcttatgatgagtgagtcaattgacgacaaattcaaacgaagctgcggaggtcaacttttttatgaaacttcacagcgtttgtgtgttgcttttgacaaggttgcagtgagtttacaacagcggtttatggagggacaaggcgatgagcctgaattttgtgatccagtggaactgcgttgggtcgaaatagttgaaaaaccgattcccgaaaatttgcactgtagtaaggactccaattcgtcggatgaccaggacaaaattcggtccctttcgccggcaaacgcaacagaacttgtggcaaccgaaaaattttcaaccaaaattaaggcggacaaagaaaaccacattttgcacataaaggacaagacggacaggggcattgggatgattagacatgccgtgaccaataacctggccacagttggacagtcaggcaccagcgagttcatctccaaattgttcgactcgtccatctcatcaaagcagaatcaggatttagttactcaatctctgcacctcaatgaggaagcacgcaactttttggagctggataggctgaaaaagtccgaaaaaatggagaaaccggtaaaagtgagcaaagaaaataagaaaggagaggaaaagtcaaaggaagtgaacaatgaggaaaatgagtacaacgaattctgcaagtcaacgactaaaaacattgacgagccattagtccatgtgcaattttttgctgaatttgagagctccttcaagtccattttttacgtgccggaaacgttgaccacagacgaattccaaaatcaaaatttggcattttcatcagggacgatgaaaaattcgagggaggngaagaaattggcagca

SEQ ID NO: 83668 - DNA, 2129 bp, Heterodera glycines
  unsure (1)..(2129): unsure at all n locations
atgcagcaaatgctcggctcgaccaccggcgggggcagtggcggaagcggtggcacaacgactaccgctgcgctcgacctgaacattgcgggcggagctgccggactcatcgacgccacagcaatgcccaccttccatttctcgcacacgcatggacaccaccagcacgtgtcaagtgagtcccagggttttattttgtcgtaacaaatcatggaaatttgttcgtattggttcatacatgatgtacaagggggttctcgaccaccccccccccccccccccgcccccaaaaagttttcaaaaattacgccgcaaaaaaacgtttttttaacaaaaaaagtcgtcgacttgccaaaaaatcgcaaactttgaaagtttttggtgaaaatcttgacaaattggcactcgaattttcaaaaatttccccggcggcgcctatcggcatcgccggcccacctgataccgaaattttttttggaaaaagcgcgccgaaaaaaaggtttttgaaaagcaaaaaaaaagtcggcagaaaaaaatggtctgaatagaaaaaaaaagtcgtcgccggagaaaaatttggaccttcgtatgaaaaatcggtcccgagacatccccctgtcccaaccgtccgtcgtatggcccttgggctgagacaccccttgtacatgtatgtattggttttcgggatctttgacaccaatttcgacactaattcttaacccgaaccctaacaagatgaaattcccgaatttcgataactgatgtcaaattcatggtcagcaacccaaaatccccgaacaatcgagttgatgtcatcatacaaaatgatttttcaaatcgaaagcccgcccccctttaaattttgaaaaattttattctttttctatattttgtaaattatcctttttcctaagtctgtgtccgtatcacattgtttaacttttttccattaaaagacgacccgtgaccaaataatttcttccatttgccattcccatgacccgtttttctgttccccatccccgctaatttgcctatggtcaatttttctgaatcctttttcattgtcaatggaaatttgtcattcgaaagcaactttcccatttatttatccgttacttgcgtcatttttactacttgcactttttgttgtaaatgtagagttgtttcttttgaattgctgattctcctcactttccattttcccttttcagctcctgcaatgctttccatcgtcgaagggctgaagtcgagcaatgaaattcgccaatccgaagcggcttcagagttggctgacattttgctgcttggcaatgaggtgggacagacagacacactaataaaacggaggcagatatttttggcaatcatcaatggtgtctcgacgaaaaaaaatgtttaaaatttgacaggtattttttctggctttaaaaatgcgcttatcatgaatctgaactcttatttttgaaatcattgatttttatctaggatttttcatcaactacttgattttttcaaatttaagannaaatagtctggcataaaattcatacacagatgtgtagagcataaaaagagtttcgaatgagctatttaatgtatggaaaagtcaagttttcaattttttacgactttttgaaaccctagggcttatatgagacaggggtctggggttcgagtccgcctggctgcgatttattttttatgacaattgatgaataatcagaggtaaaattaaggttcaagcataatctgagctcagattcgtgatcagcgcattttctaagtctcaaatttttaacattgttttcgtcgggacaccaattcttgatgattgccgtccttttcataacgttttcgtcgaaaatgtttttgattcgcgggcaaacagtgtaccccactcccacccagcaaatcagtaaaagacccaaactttttttgttgtaggacagtcttcccaatttgccaattgtggaaatagtgcagtcgctgtgcgcactgttgcaaaaggaccaaaattttgaattggtaattgttttttttgtttcatattttttatttgatgcattttttcaacagatgctgacagccgctcgttgcatcaccaacatgcaggaggcggtaataaa

SEQ ID NO: 83669 - DNA, 436 bp, Heterodera glycines
atgagattcttgaacatagctattttcctcccattccgtcactgtggctataaaaggttagttaacttccccacttggacagactcaagaagtggatgactctcggactcgatgactcatggattctcggatctcagaccccttccgcactcatccttttcctacttttaattcccgacttaattttaaataaatattgaataatttgaagtgattttgggattgggtcggaggctgattgggagctcaaaccggagtgattaaaaccccggaaaacttccaaacaatttgagaacggaacagtgcagcagaaagagtgaattaaaaacaaacaaagaaaacccttttaagaagccgcttttcctaggccttttaaaaagcttcggtcgataaaaaagtaaagaaaatattttaaaaagacaaaagttaaatggaa

SEQ ID NO: 83670 - DNA, 1089 bp, Heterodera glycines
atggtcgtgccgttggcgatggtacacgcggccgtcgctccgacgccacaagacgcggtaggggcacgtgttgccaaagcgggcacagcgcaagtaggagctgctctggcgacgcatggtcagcttcagcgagtgctcacggcacagtgccaaaatggcacgctttccgtacacgccgctggcgagcacacgccattcttcgcggcacgagttgcggacatttacagtggtaggtggttgagataaagcggaggccgaagcggcagagcaaggggaggagagcgtcaagcggaccagctggaaacgggggacctcaaattgtgccaaaaatggagagatttgatcaggatgtatccaggggaaagtgagggcacagaaatgaaaaaaattacaaaaataaacaaaaaattttgccaaatttcttgtttttctcacgcggcacattttttgataaattcactggagtttttttagcctaagcacaaaaaagaaagtctcaaagaaggacactgtattcgtccgtttgtgcctcccctggaatttgtttctgggtatgacgagcctagacttggtcgactagcaggacagggttcgaatttctacccgagctttttcccgggcatttttttttttttgctgaataccaaggtttgtgatcgtgtgaaactggtaaaatccttgtcttgatctcctgcccgagacctaacactcatcagggatgggtttggggtcggcggatcagcaaccaaatcagagcccctcggaaaaggcccaaccaatcactactgattagattatctaccctctgcttcccaggccccgcataattatgatgaatggacggcttcttattcgtccattaattagtgggtaattaattaataattaattaattaattaagaaaagtgcaaaatgctgacagcgcgaggagaaaaagtggcagctgctggcgaggaaggggaaggcggtgaagaaggattattgtccagatcagttggcaacggatggttgtgagcagagcgacagtacaacatgtgtttatttgcgtcgatcattgttctgttgaatttggggccattttttgacaa

SEQ ID NO: 83671 - DNA, 248 bp, Heterodera glycines
atgccaaaagttaatgtgaccaattcaaggtgaaaatcgaaacctaagccaggctttaagctgaaaacttagacctaaaaatttatttagatattttattcattatttttcagacacccaaaccacataagaaattgtttttctttgaaaaaagccattatattttgatcttcataaaaaaggacagtccttgaatgacaagaaaagtccttgcaaattaaaaaatccttgaaaattaaaaaaataaa

SEQ ID NO: 83672 - DNA, 588 bp, Heterodera glycines
atgtgcactttgcgcgcttacgatgtgagtgccatttaccgaattttacagccattacagtatgccaaatttatcgtgtgcacttttgcgcgcttacggtgtgagtgccactttgacggtgcacagtgtggtcaccactgtgcagaccaggatgacggcccacgcgttcttgacgataaagcatgcccacttggtgtacagggagtggacgaagcggattagcgggggcggctgcttatgcgccgtggccgacgacggcaccgagcgcagcgacagactgccggtggtggagctgctgctggacggatcatctacgacgcaaaaaataattagtagtgaaatgtgcgccaagtcttatgaatagggctaggatttttatgttttaacatattttttttgcggcttagttatggcgagagaagcccaaaaatagcattttctccgaacaatttttggtttagagcgacttataaaaacataaaaacacatattttggcgttttggcacataaaatatgttagcacatattttggggtttggcacatattttgcacatattttggcatttttgagaaaaattgcaataaa

SEQ ID NO: 83673 - DNA, 2985 bp, Heterodera glycines
atgatccgtccagcagcagctccaccaccggcagtctgtcgctgcgctcggtgccgtcgtcggccacggcgcataagcagccgcccccgctaatccgcttcgtccactccctgtacaccaagtgggcatgctttatcgtcaagaacgcgtgggccgtcatcctggtctgcacagtggtgaccacactgtgcaccgtcaaagtggcactcacaccgtaagcgcgcaaaagtgcacacgataaatttggcatactgtaatggctgtaaaattcggtaaatggcactcacatcgtaagcgcgcaaagtgcacatgggaatttggcgtactgtaatggctttcaaattcggtccaattaatatggcactcgcaccatattcgtacgctgacccacaaaatgtccagcccacgaaatgtccaagtctcgaatttgagttttttattattcagatgggcctaaggttaggcaaggggtaatatgaaggttatattcgtattcagcgaccccgaaaaccctaaaaatcctaaattagactcattttgtttttataaattttgaaaaattttggacatttcgtgggtttttactcttttggacatttcgtggcttggacactttgtgggggtgcctattcgtacactaaaatttggcgtactgtatcaaaatcaaagtgttaccgtaacactcatttaaaaatagtgaatgttttgtcttttgtttccgcatttttagcagggagttccggggcgaaaaaaaaagtcgggatattttcgggacaaaaaatttatcgggatcgggacctggattcacatccggaaggccaaaatttttcaaatcagacctcacactaaaagacttagtaatgtaccaaaccgtaattagtctcggtaattacaccctaattgaacacaactaattttgcagacagaaaaacgatatcaccggctatacgccgtacggggcacggtcaaggcatgaattggcaattcaggtaaacagaaatattccattcaaattttgatcagtacacaaaactcattaggaatattgctcgtctcgctttctcgcccttttttggcttctcgttctcgcttttctcgcattttatttttttgtccattctgatcaaaataatttccaaaatgaatgagtgttcatgatcaaatttgatcagaaatgttgtgatcaaatatttcatccgaacaaaaaatgaattttctttttgtataaattttgacaaaacattttttcaaaattgtttttcaaaaaacaaaaaacaattcagatactgtttttataataaacaaaattattttaagataaaaacaaattaaaaataataatttttagataaaaaataatttttctttattttataaaaatatttttaaaactattattttttttataaattttgaaaggaaattttttggcattttgcataaaaattcaataaaaaatatgccgaaaaggggacataattgggaacactgacactccgatcaacaacatttggccaattgtaaccaattttgccacttttcaaaggagcattttttcaacgcccaaggccttggccatccgttcggcgtgttcgttttgctgttgccgcgccgtgccgacgacaattttttgcgcccccaaatgctcgcggaagcggcacgcgttgacgagttggtcagcacgcggtttccgctgttcaaccaccggacaaatcggacagaaaattttgcccaattttgccgcgatttttgccaactcaatgaaccaatgcgacgatttgcggtcagagaaattaaaattataaaattaaatttaaaaattaaaatttttttcatttaaatttaaagctaattaggtaatttattttttaaattaaaatccgatgacaattcatgtaaaatttagaaaatttttaaatatatttattcgtttaaaatttaaaatgaatttattgcaattttcaactttttaattataaaataatttaaaaatctatttatagaaattaaacaataatttatagttagtttgataaattaagcatttctattttttaaaatttaattctctgtttaaatttaaaaagaatttattgcaatttatagcgtttaattaaataaaataattaaaaattgataattaatctatttttaatttttattagccaaatattcagtgaaaatttttatacaatatattttttttcattttttaggaagagaaaaaatttttttaagttcaatgatttttgccgacaattaattatttaatttaaaatcattttccacattttaggaaggctttcaattgcaatgggatatgttggttgccaatgagacattgaacgatgccattcatctcaactatccaatcagcagcattttgggccaaaaattcaacatccaagtcggtgacaggcatattggcaccagggatgtttcgggaatgtgtcaaaaatctccacatttttgagtcccgcatcccggacagaaaaatttggaacggcatcccggcctgagtccaaatctcgaatgctgaatcgcgacattttttcgggcccggtatcccggccagaaaatttgggtcatccctataagaatcttggatgccgaatcccgacattttcggataatcttaaatgccgatccgaaaatttttggatttttggaccaccgacacgaatcaccttctcgaacatctcgtattggtctccctctctacctatatacattggcattttgttgccataaaataaaatgtatgccaaatttgcagccaaatttcttcggcatccaatttcgtactgccgccactcccgcaacaacagcaacagcaaattcaacaacaagcagtaccagccacacaacaacagcactcggcagcggcggcggtttgtccatctccaacatgcgccgcgtggaaatggtggtgctcacttataaggcggaacgcatcggcgcgtggacagacgacgaaatcaagga

SEQ ID NO: 83674 - DNA, 599 bp, Heterodera glycines
aaatgcttaatttatcaaactaactataaattattgtttaatttctataaatagatttttaaattattttataattaaaaagttgaaaattgcaataaattcattttaaattttaaacgaataaatatatttaaaaattttctaaattttacatgaattgtcatcggattttaatttaaaaaataaattacctaattagctttaaatttaaatgaaaaaaattttaatttttaaatttaattttataattttaatttctctgaccgcaaatcgtcgcattggttcattgagttggcaaaaatcgcggcaaaattgggcaaaattttctgtccgatttgtccggtggttgaacagcggaaaccgcgtgctgaccaactcgtcaacgcgtgccgcttccgcgagcatttgggggcgcaaaaaattgtcgtcggcacggcgcggcaacagcaaaacgaacacgccgaacggatggccaaggccttgggcgttgaaaaaatgctcctttgaaaagtggcaaaattggttacaattggccaaatgttgttgatcggagtgtcagtgttcccaattatgtccccttttcggcatattttttattg

SEQ ID NO: 83675 - DNA, 466 bp, Heterodera glycines
atgtcgggattcggcatccaagattcttatagggatgacccaaattttctggccgggataccgggcccgaaaaaatgtcgcgattcagcattcgagatttggactcaggccgggatgccgttccaaatttttctgtccgggatgcgggactcaaaaatgtggagatttttgacacattcccgaaacatccctggtgccaatatgcctgtcaccgacttggatgttgaatttttggcccaaaatgctgctgattggatagttgagatgaatggcatcgttcaatgtctcattggcaaccaacatatcccattgcaattgaaagccttcctaaaatgtggaaaatgattttaaattaaataattaattgtcggcaaaaatcattgaacttaaaaaaattttttctcttcctaaaaaatgaaaaaaaatatattgtataaaaattttcactgaatatttggctaataaa

SEQ ID NO: 83676 - DNA, 509 bp, Heterodera glycines
  unsure (1)..(509): unsure at all n locations
atggtcggaaancgaggaccaaattcgaccttctctcggcgtcgcgattcccgtgagaagcagaaatatgccatgtccaacgtatttttggatctaatggatttgtccgcccgtttgttacgtcccggcggtcgtttggccttttggttccccgtttgcagatccgagtaattctcgagtccatttcccacaaatcccatgtgtttttcagatattccgaacgtattttgccccgcatggattgcatgcgattggtgtgcaactgcgaacaaacactcgcgaaggattcgtcccggtgactaaacgccatcgcttaattgctccatttgactgctatgcttttaaggcgccttttggtctatgaaaagcttcgccgtcctctgactgatggccaaaccaaaccaagtgaaagggcattcttcgaattggactgttatgccgagaaaacattccaccagaaagtgttcggaagcatcgaaaagaacgaggccaaggagtgtgctgattaa

SEQ ID NO: 83677 - DNA, 1005 bp, Heterodera glycines
atgtcgcaaggaagcctttcttcagcaccgtcgtcacaggatcaactgctggtcaagctggggagacatcagttgctccattggatgatttcgaatattcctgatgaatgcgatggagttcagacgggggacgaattgatgccgtatttaccgcccgtccctttttacggcacgtattcatataaattttccattgctcaatttttaataaattgccaattaaggtactgggtaccatcgcttcggttttttgctttttcgacaccgacagcgcatcgattttgccgaattcggcctcgaagggtgccccactaccaaagcacttttatcaaatcaattggtcctttttaagaagcgattcgctggtcgcacgttcattcagcacaaatgctttttacaaacaattcgaggacaaaatgagtccttctgcgcttcggttttgccaaataaaatgggataaaagttgcgaccaaacattgcatcgattgggtgcggtgaattgccaaaccaatgaatttatttattgtacaaattaattccaggtctgaagacaccacgttattggtatgaatggaatgagcaaatgggtccggaacaaaaggaattcccaatgaagccgatgccatttcaccagtgagaggctacaaacggactattcgaactaccccaaacatattgctttctttcagatatttgaacatgttccggaacccggaaacggtcaggcgggaagtgcagcggaaacggctggaaaagttggtgaaactgaagccagacgaaaaactggagccggaatacccggacatcaactaccaggcgaattggcttaagaaaccattgtttgagcaccaaaggctaatgaaggaaaacagtggggagggagtgtgggcggcaatgtattatgactatgagaatccgatggaacagcacgaaatggagaaataccagaggaaaatggacgaaaggagagacgaagagagtgcggaagaagccattggaatttga

SEQ ID NO: 83678 - DNA, 401 bp, Heterodera glycines
atgacttccgccgatggttccaatatgagcgagggttcgttagtcgtttcgtaaattttaattgtttttactttcagcgattatgcaaatggtccgtcccgccattgaacgcatggacgaacaggtgaagaacaccaggaagagtcagctgttcttggccaatcacatcgaccaaacatcagaaagtgggtgagcaattaatcatatcaagtcaaaagagagtcgtgtaaatgaacatttttaaaacgttatggtgtaattgttgaagcaaaaaatgctgaacatatttagagttaaagaatttggtggatgaacagcttttgccctatgatttggacgcgtacgtgcgaaaattggatgagagtcgaaagcgaatcaacggaatcagccaaaaacttcag

SEQ ID NO: 83679 - DNA, 851 bp, Heterodera glycines
  unsure (1)..(851): unsure at all n locations
ttggcatttacttttcctctccgtccctaatttcctcccattttccacaggngnttacattnttttctcctcccttattactccaggtactatctttccgtaacttcagttgggaaggctttttcctttcagaatcgacgacagattccctgccatttgtttgcttgtgaaacattgggcgaaagtcaaagggattagcgatgccagcggtggttacctcaacaggtgactgaatgactaacgcttaattgacagttaattggttgcccttttgctcagttactcgctgattttgatggttctccattttcttcagtgcggcgtcgacccgccggttcttccgaatttgcagcaactttacccggacttgttcagcttaagacgcccattcactgacttggtctatttcgaggatttgcccactcctttgccgggtgaagcaacaaagtgattttcgaagacaataaacctattgtatgtttcagaaatacagcaaaatgacaggactgtgggtgaattgctgatcgctttcttcgactatttcaatcgcttcgatttcaatcgatttgccatttccgtacgaaggggctgtgttttcccaaggtattgtaaaacaagtgtccccaatttatttgaatgcttttcacgaaaggactgaattgccaccaaacactgaacggttccgtctgttcattgaggagccatttgatcaccaaaacacggcccgatgtgtgaccaacgacgatcaatggatgatcattttggacaccattggcaaggcagcgaaggccctttcgccaaactcaaaacaggcaccagatttgctcaaacttggcatccgaatcaaacca

SEQ ID NO: 83680 - DNA, 837 bp, Heterodera glycines
gccaatacaattattcgtttcctctttggatttccgtgaggctcaattaacaccgaatggtccaatgcgtgtttgtaatgctatcctaatcaacggggagggaaagaccgttgaggtctcagcttggcgcttacaagcggatgtgttagcatcagccatgagaggctatttgtacattttcgtaaactgccgtgccaaaccaccgcgagaacggaccaattgttggttcagactgaacattgatgccatgagttcatacatggtacaggtccaggttcgagcgttgagagtagcaaaaaaatacgagattattttagccacatattgcagtgccacaaaatacaattgctcccgctcaaagccaaccgtccggttcaattatgcctaatgaaccgccggttaaacctttcttcagatttttaaattaaaatctattttcacccccagagatcacaaattgtcaattccggggcaaatttagtggctattcaaagccaacaaaatgaaaattccgtgcctatcacgcaatctgccccggtaaaaagtgttgtatttcagacaatttgatttttgaatttaatttatttcagtctaatcccttagctcatgatcaaaatttggtgcccagtggggcaaactcgcatcacactgatgagatagtggaggtgttttttatacaaataataataataataataatggcttttaagaccattttggattgaaaactttttttaaaaatgtttaaataacaaaatattcttgacttttcatttttttattgaaaatatattcaaaaaaagttattccttatgaagttgttttgaaatatagaaa

SEQ ID NO: 83681 - DNA, 781 bp, Heterodera glycines
  unsure (1)..(781): unsure at all n locations
atgccgcttgaggaagcggaccgtcccgatctcgttcttgaagcgctcatacagcatttgcttgatagagttctaactggccatcctcgtccactaatggtcggattacaacttcatccgccgggattcgacagaccatatattattcgactccgtccaccggaacaaaataatgcagcggcgctcgcagctgctattgaacgactcaatgagcagtctgcggccgggattgatctactttctggcacaatggtcacaaaagtgctcgctgtgtggccactagatcccattcgtgccgatccgcagagaggcggtttttaaacaaattgcattttaaattaataaattataattaggagggtgtgatctaaatgatgaacacaacgtgtcgcataacgtgcaatccatcgtgcgcgtagagaatcctgacgaccgtctatgtttagcacgtgccgtgctaatagggcttagagacagtgagtccaggatgcctaatggaggtggccttgacgcactccgtgcgtacgttggacatcaaaatcaacatggacctgaagcggtttccttgctgaggcgcactgtaaatccacacaacaaggacatgtacacgctacgggacgttgagcaactgcaaagatggttgaacaatgctcatggcattgggcagactcggctcgttgtatttgagaaagagcataataccggatcgtcttcaagggagaggngtgagccttggtttttanaattagaaattttttgcataaagtgcggcacagtttaa

SEQ ID NO: 83682 - DNA, 344 bp, Heterodera glycines
atgtgtatgggaaggcgtgtggattctcaaaagcaagtacgacagactccgtccgttgtgccaacaatttgtttgacccgttaccatttttggcaatcccagcttcgggggggttggggggtgtggggagaagactgaacttgaagattatgcatctgtttttgaatgcttcagtcagtccatctgacatattattggagttattaatacttttaagattacatttacccatattttaggtctatgctggattgttgtcttatgccgaaactgttaccgattcaggcctaagacatcgctatgaaaaagacggcatttgtcaattggcaaccgatctgaagtga

SEQ ID NO: 83683 - DNA, 517 bp, Heterodera glycines
  unsure (1)..(517): unsure at all n locations
atgaacgattatttgtgtattgcacttaaaaacaaagatcgaaaccagggatttgcaatataccaattaccaagattaaactttaaaattaggtaatttttaatttaccattagcctagctattcaggaaaaaaatatgttatgctgagcacaagtgaaacaaaatgtcaaaatcagcgaggagcaaatgctaagatttcatttctgtttaggggaatgattcatttgaataaaaacggagaatgtaaaagctaattttggagacaaattgtataaagtgaatgaatggttgttcaattaacgggcattttaatttaacaaaaaaaaagaatgtcaaaatttatgtacattatttttttcaataaatttcttattaaaaataagttttaaatataaactttcttttaaagaacaaaaaaacctaccttattacattttgagaatacacaaatttatttattanagctatttgcaaaactanatgataattnttaaaatcaaaaaataaattatttaa

SEQ ID NO: 83684 - DNA, 1918 bp, Heterodera glycines
atggcaatttacaaaaaatgtgaatttggtgttttgtcaggagaaattggccaaatacacacaaacaaaaaactaatcattgaacaatcgtggtggaaaattgggttccaaaaaaccgagtccgaaaattgttttttgtcaaaaatcagtttgtttggaaccccagggtcagagataatacattcaccagtagatgacacaaagaattgtaagtactcagatggacaatgccagttagaaaatggtgtttatcttttatgggaaattaagaaaaacattaaaaatctttttgatgaaaaaacttgtgtttataaaaaggaaacaaaaatcaatggcacttatgtcccaggtatttggatgtcaaatgataacaatcgggctttggtttttgatcaaaattcaaaaagggtagagtcatgtggtgaaaaattgcgtgttagtgcgcaaggatttgcaataattgaggaacaatttaaggaattgatgaaaaatgagcaaaattcgttagacaaaaacacgagaaacgggataaaaagattcaaacgttggaatactgctttctcaagtgaaatagagaatgctcccttggacggagaagttcgagcaagccaattggcaatgcaattacaagccggtgctttttatcaaaacaaggaaattaagaattcttttcataaattaattgaaatggtttgtaaaacattggatgataatattttcaatgggtattctcatttaaacccttccttgtttataagacaaaaaactggtcaagcttttttagaagggcgttggatttccgatgaaattttagaattttggggttgttctgcaattaatttctcctttgtcccgtcgttagatggaaaatgttatgaatttattccattaaatttttctttagaccataccgaaaaacttttgataggatttttggatccaatgacaatgattgttaaagaaaatagtgaaatccaaacatgcaatgagggacaattcaaaacccttttactgaacaataagctcataaaaataaaccaattaactggcaaatatacttttattggagaaccaactatttataaaatcgatcaaaaaatatggggtgaggaaaatttacctatttttcctttacaaattttcaaacaattaattttaacaaatttaacgaacaaacaaattgacatgctggaaatgcttcatgcattccgtactagccgaattattgacaatagaccaaatgaagaccgaaaaatttttgaattcaaaccaatttcaagcatttacctttcaaaatttaattactgaaattgattggtggaaatatgtaattcgatcagtcgttttagtcattataattaattgggtctacaaaatttataaatggaaacaaaaaatcatgatcagaaaagaaattgaaaagaggaatagtcaaaactttcagcaacaaactggtgccattcaaattccactggccgctctgaaacaacgtttcgttgggggagtgtcggcgcccacgaccgacgcagccgagatgccagagaatgccgagaatgccgaaagaattaaatgccaaaaacagaagagacggaggaaataattttgaacaaatttgcatttaattatttattaatttaaatttcattctccattttattattatcatccatatctttcagcctttgcctttgcgatcactttattcatttatggtaaagtcgttggagacaagaagaaaaagagcgatagggaatttcacagagtttaacaaaaggcggaaaatgtccgtgagcgaaaaaagggggaaagatgaaaaaaaaatccgttattcattcgcttaactttttaaaaaatctgttcaacgttcttgctctccgatttaaaaaatattatttgtcaatttcgtatttacgccgta

SEQ ID NO: 83685 - DNA, 297 bp, Heterodera glycines
atgccaataaatcctactaatgttattcgtttactgcaagagcattatcttaataaagctccaccaccgaccccattgacagccgaggaaaagctattggccgaagattttttgaaaactttggaatttggtgcaaaacaaggggttgaactcgagatttcggatgagcttgtctttgatgagttttcaacagttcatcaaagggaagatttgcacattcagacgaagaatttgacattgaccttgaatgtaaagctgaaagtgatgacagtggcgaacttttctcatcgccagcaa

SEQ ID NO: 83686 - DNA, 853 bp, Heterodera glycines
atgagctggcagaccatggagggcaccgagcgacaaattcggggtgagcgagtggggcatttacggaatttgaaactctaaaacgaattcgagacgctacaaattctcaggcaccaatgatattcgttcgaatttaacgaaccaaagccgaacctgaaaaacaaaaatttcaaatcccccgttttcaagaatggcgaaaacccagaaatttttctgcgaaattcaccgcaaaatttcatcgtttttgaaattttgaattaattttcagatttgctgaccacgtgtaccattgtgcatgtgtccgagtttggcattgcggcggacgatgaccggcgccagtgctgtgacagtgcggagaccgagttggccaaggcctacgacgcgtacatgcaggtctgttgtattttacaggtttttttctgattttggcactactcggtttttaataatttggcgccctaaattgtgtcaagaaaagtgtgagaagtcaaaagttatgccaatttttttaaagaaatgtgcaaaaataattattagacgccctaaaatgtatattttggacaaaattctgccaaaatttcttaaaaaattgaaaaaaatccactccctaacagaccttctcctactatttgtacaccgccaatttgatcatgcgtctggaggcccgcgcggatggcattggcaacgcgctgctgaactcctcggcacctgcgccgtcgtcgtcttcctccgctgccgttgatgaccatcatgttcaactacataaccaccagccgcagaattcatcgccgtcacggctcaccgtctgcggcacgtccatttgctcacaatcaatggcaacaggtgcaataaa

SEQ ID NO: 83687 - DNA, 1324 bp, Heterodera glycines
acgtgccaattgggccctccattccacgtgccaactgtggcaacagttggtcgacgatgccaaggaggaggcgcgccagcggagcatcggtgccgacgtgtgtgccaattatgtgtgcccggcaattgcgcagcggacaatggcactgcaaaaaattgccaaaaaggtggccaccggaggcggggagggcgagggatgaaaattttgaatactttaatcgatgaaaattagaaaacagtgttggcaaatatttcagtgtcgtgagattggcgtgttggcccaaagtgaggtggtccgtgtgctgcatgagctgcacaccgcgatgaaaacctaccaggtggacgagcaattttcaaaattgcacaaattaatttcaaagcggaccgcaattttgattagtttgcccaaaagtcgccaaaaatatatgttggcatttactcgagactaaatggcataatatttggtcccgctttttcatgtattttttttcaattcctccacaaaaagataaatattgtaaaatcccttaaaattttcatcaaaaatgggaaagaatttagaaaaccatcctctaaaaaattatttgccgtttttttgtagcattgtttttgccaattcaacgcactcggcggacagctgcagcaggcggaggcgcaacggaacaaagtggggccgaacagctcgacgcgcaagcaacgatcggcacaaaaaacatacgacaaagtgagggggcggggaggaaatgggaaaccacgaattttcgttttattttccgtgattatccattatttttataagttttagagttgttttctttgtggtcctgatttttcgggtggtttttttacaaaaaaaaaatttggcgctgaattttagaagcggcaaatgaaaccccgcaatttttatgccgttttgttttgtattctagcaaataaaaccagaaagatttagaatttaggtagaacaatgctgatttaaataaaaagcatgagaaaatagggagtttcggtgtttaaaaattccatttttatataattttttttaaatagaaaagcgagaaatacgcgtcggcacggctcaaatgcacgcgggcgcgcaacgaatatttgctgtgcatcgatgcggcaaatgcttcgttgcacaaattttttgcggacgacatttccgacttaatcgacgtacaatttttttttgggaatttttaaaaattttttctcattttcagtgcactgaccttggcatggactggtggctgagtttgctgttgcagaacatgatcacggcacgcaagtcggcgtgccaagtggagatgaacggtacgatg

SEQ ID NO: 83688 - DNA, 78 bp, Heterodera glycines
  unsure (1)..(78): unsure at all n locations
atggacgccgtcaaaatttttggcgaattntttcgcgaggacaaatttntctgtcaaagtatatggatatgtgccata

SEQ ID NO: 83689 - DNA, 1992 bp, Heterodera glycines
atggcaaattggaagggggttctcatcgccgctttttccattcgcattttgctgctgcaaaattttatttgtgatgcagcaacagagaaatgggtggtgaatcacaatgaaaaagggtcggtgcgaggcagaggagagggaggactgaaaataacaatttttgttttttgcatttaaaaaagttcgttttatttagatgttcaaaaatggaaaaaattttttgcgcaatttgcacactttaaaagaacggaatctaacagacaacattttaataaataatacaaatttaagtcaaatggacaaattttgtgttaactgtagcaattaagccagaaatatggaccttttaaattgataaattaatgaaatgccaagaattgtccataaaaattgctaaaattatttttaagcaaatatttgagtccttttgagtagataaaaaatgggatgggataagtgtccaacgaaacgggaaaaatttgttgctgttaaatattgaaaattcgcatttttaaccaattcaataatgaatggctaatttattgttatttcgtcgtggtcatcgccttttttttgtcgaaaaaaataactggggagcagtaaaaggcgatggaaatgaatttttgtggtggttgcgaaggaagaagagacgaaagagggaggggagtgggggacggataactgcattatttttgcttttattaaaatatgttgaacataatttaatgaaaaattaaataaatttttaattattataatggaatttttatgaataactgtttttgtgtgattgtttttgttattaaatatagtgcaaatattattttcttacacgtaaaattaatgaagtctaacatgtaccaaatatagcaaaatgttaaaaagcttttaaatcagttataacgaatgcgttttattagtcttttaaaaggcaatttttaaatgcttacgcaaaattaaaattaaaatttgaaaggtctggtgaattaatctgtgttttgcaaaagattttttttggtactctttgcagtcggagttgaaaggaattggccttgtgttttactgatttcaattcattgagaaaaattttgcatgcaagttttgaagagtttgaataaacaatatgaaaaagttatatggcagaggattattagcataaaaataggtgttaataattaaaaaattgctattttcatcgttaatacaaaaaaaagctgctgggcaaaaatagaaaagaggagtggctcttaagatgtaaaataaatgacattgtatcagagatttgtaaaatttattaaaaatatgagaatattgtatagaccaaaagtgccgattaattcgtatattaatcaaaaaaacttgctttcagaaaatattttaaaagttttaaacaaaaatatttaataaaaagaatatatttttaaatgcaaaaaagtaataataattaatttttatacacaaatataaagttttttttaaatttcttttcaaaatttgttgccaaagaaatttattcaaattcttatatggagtggaataataaaatgtcagctttcactcacggcaacatttgtcattttgctcatcgtatttgccattcgacattgccgcacgcagtcttcctttttgcaaaaattttgaatgtatttgtgatcaaaccaattttttgcaaaataattgaaaattttaattatagattataaaattaaaaatggttttgagtgatttgtcgaatgccgtcaacaatgggggaacactgagtttgcaagaactgcggcggcgccgtaggacggccattgtggttctggcgcccgacttggcggcccgacagcgacagttatggcgagaacgccaccgcagctcgaatgcaatcgaacagcaagatgttattgaattggattagaagatgacggcggaaaaagggcaatttggatgcttttttgttaattttttgttcgaatttctggtaattaatttgcttgaatctttata

SEQ ID NO: 83690 - DNA, 1530 bp, Heterodera glycines
atgttttattttatttttacaaggctaattgtgaattgatcgtagaatccttaaatgcctaattggtttcatttttccaagacctaaatttccgacctaaaaatcgaaactataaatattacgaaactaggatttttggcagcatattcacaaaacttaaaaaatataaaaatatttattttagtacaccaacattaattcggaattgattatttagttaaaattcgtttttttttgcctttcaggcgcgcgagtccgaatactcatacaaggttctcaagccgctggataagtttccggtacttatgcgtcgcttttcgagcgaaggccttccgtttactaccattgacccatacaccgcaaatttgtactttaaattggacgaaacttccgagggcccgggatcgccaaatcgtttgctgaaatttcaagtgttggtgctcttggctaagagcagtatccccgataaggcgcgtcacgtaattataattttattcaattcactcctgaaattcgaaaaattggttcttataaaataatatatataagatttcatttaatcaaaatcctaaaaaagattcattttgttaaaaacccactaacaatttttactaaaaaatttaaaatttaccaaaagacaaaattttttcaaaatttcgagttcaaaattcttcaaaatttctttatcaatttatcactatttatttttaatcacgttgttttccctttttagaaagtgcttctctgtcagcggcttaactccaaaggtgccaagtcggtgatgcttgaggactacggcgtcgatcatttcagagccgtttctgatccagcaaatgtgggtggggtttggccaaagcattgcttggttttcatccttttcagagatttaatttttaggttcgacgattccttttctttttgatttaaaattctttttcatatgttcttttttcaggaacatcccaatccttttctttttttttcttaattacttcaattttggatttaatttcgtcaaattggctttactgtttgtatacaatttttctgttgattttagacgaattttttttatcacacaaattcttttttgactacattttgattcaaccctcggtttaactcctgagatggggttttgtctttattttaattattaatattattaatttttgtccttttaggaatatgtgatgatcgaagttggttttgtccgcaattttgccgatccaccgttctatgaactcggagctgtgtgtgcgactatgaagaatctattgggctttttgacttcttacgtggatagcaaatttccctgccctttgaaatagggcaatgaacagacaaaatggcaaaaaaatgtcaattttttatttaattcgacaatttcatttttcaaaatttaaattaccattccagtggttttcaaatttttcattatgagtatcattgcttttgtggagagaaatcatttgttgttttgaataattgaattttgagagacataaataattcgtcgtattttagaaa

SEQ ID NO: 83691 - DNA, 1534 bp, Heterodera glycines
atgttttattttatttttacaaggctaattgtgaattgatcgtagaatccttaaatgcctaattggtttcatttttccaagacctaaatttccgacctaaaaattgaaactataaatattacgaaacttggatttttggcagcatattcacaaaacttaaaaaatataaaaatatttattttagtacaccttcaccattaattcggaattgattatttagttaaaattcgtttttttttgcctttcaggcgcgcgagtccgaatactcatacaaggttctcaagccgctggataagtttccggtacttatgcgtcgcttttcgagcgaaggccttccgtttactaccattgacccatacattgccaattcttacttcaaattggacgaaacttccgagggcccgggatcgccaaatcgtttgctgaaatttcaagtgttggtgctcttggataagagcagtatccccgataaggcgcgtcacgtaattataattttattcaattcactcctgaaattcgaaaaattggttcttataaaataatatatataagatttcatttaatcaaaatcctaaaaaagattcattttgttaaaaacccactaacaatttttactaaaaaatttaaaatttaccaaaagactcaaaattttttcaaaatttcgagttcaaaattcttcaaaatttctttatcaatttatcactatttatttttaatcacgttgttttccctttttagaaagtgcttctctgtcagcggcttaactccaaaggtgccaagtcggtgatgcttgaggactacggcgtcgatcatttcagagccgtttctgatccagcaaatgtgggtggggtttggccaaagcattgcttggttttcatccttttcagagatttaatttttaggttcgacgattccttttctttttgatttaaaattctttttcatatgttcttttttcaggaacatcccaatccttttcttttttttcttaattacttcaattttggatttaatttcgtcaaattggctttactgtttgtatacaatttttctgttgattttagacgaattttttttatcacacaaattcttttttgactacattttgattcaaccctcggtttaactcctgagatggggttttgtctttattttaattattaatattattaatttttgtccttttaggaatatgtgatgatcgaagttggttttgtccgcaattttgccgatccaccgttctatgaactcggagctgtgtgtgcgactatgaagaatctattgggctttttgacttcttatgtggatagcaaatttccctgccctttgaaatagggcaatgaacagacaaaatggcaaaaaaatgtcaattttttatttaattcgacaatttcatttttcaaaatttaaattaccattccagtggttttcaaatttttcattatgagtatcattgcttttgttgagagaaatcatttgttgttttgaataattgaattttgagagacataaataattcgtcgtattttagaaa

SEQ ID NO: 83692 - DNA, 1515 bp, Heterodera glycines
atggtacgtaataaacaaaaatttctttctgacattccttgctcttcttctgctctccaatgtaatgacgggttaaaagctcccgaaaaaagcggaaaagtggtgatagaaccggttcaaagctccggtaatcaaaagcggaatgaaacatttttcaagagaactaaaaaaaatgacagtgatatgttaataaatcttgatgagatagatgattttattgatatttcttataacaccaatattctgagtaaatcttatatggcggaaagaaaattaaaacaaaggaaaatgatgagtattacagaaaacagaattgaagaagaacgagaagcaaatagaaaaagaattagtcaaaaaagagctcaacttactgaagaagaagttgagagcgaaagaaaagcaaatagaattagttatacattaaaaaaaatacatatgattaatgaagagttagaatatgcaagagaatcacatagtcaaaacgttgaaatatcaagaaagcggagtaaaatggattatgatcaattatacggtattgctgcaaagcccaaaaaagcaattttttatgagttaggaccatttaaaatattttgttcaaagtgtagttctttacattttccggaagaatcattaagacaaaatcaaaatgatgaaaatagctttgctaattgttgtaagggcggcaaacttttaaatttagatgaaaaaattgagcaatatcctgaagaattgaaaattcttttcgatactgaacatccttattataaaaattttataacaaacattcgtcgctacaatagtgcttttgcatgtgcttcaataagttgttttaaatttaaatttcctacgcctgggcctccatgttataaaatacaaggccaaatttatcatagatttaattcaaatgcaatccctctcagtgaacacgaaatcccaacaaacgggcagctgtattttattgattctgatgaagcaaccgacattcggtgtggcatgaatgagggatgcaatgtaaatatcatgaagtatattgatgcatttattagaaaaaataacaaatttgcgcaatcatataaattaatgaaaactgtttatgagcaggaaaaagaaaaatgtcaaaatgaaggaaataaaatacctcagataaaattgctttttagtcttaaggaaaattgtgatcaaaggagatacaatttaccgcatattaatgaagtatgtgcaataatggtttgtgatgcgaatgacgatatcccaccagctaaaatagttgtttacccaaagggtgaaaaaaaattaaaggaaatatatcctttggataaatgcgttgaaccaatgtgttatccattactttacccagtttcaaatgaaggatttaattatgaagtaaaggacttaaatggaaaaaaaatttcactttgcgattatacaaaatttttattatttattaaagaaaatggaaaatttatgcctcactttcatgcaaaaaagctttttcaacagtgggtagtagactaa

SEQ ID NO: 83693 - DNA, 897 bp, Heterodera glycines
atggagtgccaattccgcgcacagtatccaccgtggttggttacggtaatggaggaggagacgccacacagtgaaagggacgacgaaatagcgaaattcgagcaaatgggcggggacgaggcaggcagaagtggacacggcgaaggcaacctttgaaggtgctgagtcgttatataaaaaccatcaaatggaaattttcaaccaaaatctgtccataacttttgtcaaagtcaaccaaattaaaccttcttgatatcattcgatagccctaacatttctctattagctcacctaaatttcaaaaaatttggtcaagtttaagcaaagttatggccaaaagagtctaaggcaccgggttttcaaacttttttggccataacctttttgaaactgagcgaaattttttgaaattttgcaggttaatagaggacaaatagggctatcgaatgatagtaagatcactttattttgttcgttctaagaatgttttgatcagaatttttgataatcaaaataattttatttttaattaaaaaatttatgttagaaattatttttgtttttaattttcttgctattagtcgatagctctatgtgtcctctattagcctgcaaaatttcaaaaaacagttttttgttgaaatttttcatttgatggttttttatataacgcccattttgatgggttttattagagattgacattttgaaaaaaacctggacctggattccatgttggacctggaccttgatttcctggacaaaaatccaggaaaattcaggtccaggaaaaatccaggttgccgaaaagagggcgcagaaaattgatccaaaaaatcgaaaaaagaaaaaattagaaatttaatttattttgtagcgcctgccgaaaattctaaa

SEQ ID NO: 83694 - DNA, 374 bp, Heterodera glycines
atggccgagtggtctaaggcgctagactcaagcgatgattggcttgcccgctatgctgggtcttctagtgggcgtatgcccgcgtgggttcgaatcccacttcctgcagtaactttttttccaattttaaataaaaatttttttttaggaatttaagagaattattaattattggatacattaattaattgcaatttttccttgcctaattcctcgctttttgccccgaaaatattctcggaacaaacaaaaaatgtaattggcaaaatgtggaaatgccgaagcagcagtaaatgcacaaaagtacaacacttgtggcacatggagcacaggctgaggggaacagttcaacaacaattaaagcattttgccaa

SEQ ID NO: 83695 - DNA, 652 bp, Heterodera glycines
atggaaaattatgatcagaaaacgtctcaatttggtgatcagcaacattttgatgctgatgcttatgtgtccgcgttggctgtgctcagtttgcccgttctcctggacacttctttattattgtgtgtgttcaaaatgcgtttaatttgatgaattttctgttgggttccaaaaatctcgacactttggtccgtgcaaaatcccgactttctggcaatttcgaacccattgtcttaatttgggcattttcgctccttgttcccaatttgtcgcccattaaagttacaccgatttgttgtctctgactttgttggcattggcactgtccctctccgaccgtccgttcccaatgttttcagtgtttgcattggcactttttgtgcggcaggtggatgaatgaatatttaatttaaattcagttttgattattacctattcttcagacaaacattgtttggctgtttttctccgcttttcccattgtttggcattctttacgctctttcctccaagggcaaatgtcgctttatcaaactgccattttcttggtaaacatacatatccacggatagagagcccggaacccacaaaaaaacatcggaatcccggtctaaaaaaaagtttcctgaatcgaaatcccgatcccaataaa

SEQ ID NO: 83696 - DNA, 1280 bp, Heterodera glycines
atgaacaacccgccatgcaaggcaattgtactgcttgacccggaaatgatcatgtgctgtcgcatgtgagtcgcgaacggttgacgaagcgatttaaacaaaaaaaaatttttacttaatttacaatagatttatttgaattcgaggttttgagcaggcgtgaaaaattgggagccaataattttagcataatggcagacaaattttcaaaaaatgccatccattgaatgtcttggaaaaagttggatgtgatacccgatcccaatttgtcatccattgacactgattttttttagtaaacttgatcagctacgtgccgtttttgttgctgcaagtcgcaattctgttcgtattttgttacatcagatgatcactgacaaattaatgtgcgttaaattaaattttatttacaattaatttatgactgccaaatttttccatttttatttcaattttcgataatttttggcgaagaatgtcagtaaatttgctgattccttaattattttacaaattgtttgtgttatgttgtcaactttattcttcagtgaagtgggcgtcaaggccaagccgtacatgacactgttggacgaatttgttgccgccggggcggtggagcgcatggagccgcaccagtgtgacaagagtgggctggtgttgcgcgaattgttggcctgctcaattgaaatggcggcacgcgagcggcggaaccatggcaacccgaaactgcgcgttctgttcttgtcaggtccttttttcttcctttatgatgcaattttgctggaaaagtcacgcctctcaccccgaaaatatcaacaaaaaacatagttttaatgggtgggataagttcgtgtttggattagacgtattgaagaccttttttggtaccagtttctttatttatcctattaaacaaatttatcggtctggtgctgcctattgacgctggtgccgaaaattttggacagagcgtttggatggggtgggtaccaatatgaaaaacccctaaatttaccattttttacattaacaattttggtgagaggggcacagacgctcataatggggggggggggggtgaaaaggtgaacccccgattttgttttaattaaaaaaaattccagcaatgattggccccaagtcggacgatgctaccaaattgggcaacagtcaaattgaattggtaaatgctggccaatttgtggagcaattcaaatgaagtgcccgggaaagaattttgaataggaaatagctcggcattacaccaaaaatattttcca

SEQ ID NO: 83697 - DNA, 424 bp, Heterodera glycines
atgtccggattccggactttcattttcggcatccggtcaaatccttggcccatacaggtatgtcgtcgttagtctgcactttctcttcattttcattctttattatttgtttctgcattttctatacatatgtgtctccctccaatgggcccctccatttgaagaccccatagaagaggttttaaaaataaaggacccgggccttcaattagaggaaatacggtaactctactacctaactgtttgtttctcgcttttgtaggcatttttgaacgcccattcgcctgtcagttacaccaaaaacggctggacgttgttattggctgttgaagaggggcccatttggtgggacaaaagcaattggacggaaagtgaacgcgcagtaagaggattatcacgcaattatttgaatgaaacaaactga

SEQ ID NO: 83698 - DNA, 683 bp, Heterodera glycines
atgccgaaaatcctcttcacaatcatcgctttcgtcaacatctcacaaattttattcgctactgctatgtataatggcgaagatatttgcggtaaaaccaaggaagattgtcaagcggcactgattgcttttatgaacggacgcggaaataaccagaactatcacccgagcggtaacacttaatatttacggaaataatgggcttaataagcattggattgatttctttatttgtgcgattggttgttttttagggcctttttctttggcttaggctccacacaaaacatcatatgagaacaaatgcatatgacaataataatacctaatatatgttttcagaaaacggtccaagaaaggttgataatgagtggtgtatttgggtgcaaagctatgtaacaagtggggccccaagatcaaaatggtgaagccatgaaaattgaaggcggacgaaagaatgatgaatgctaattgaccccatttgcttgttgttgttgttgtttcttttccgtcgggtcaattgtttgtccgcacttttttgggattagatatgtagattaaactttttgctatccattttcataaatattttttcagaaactgctctaaaacgcgccaaattttatttacaagataaataaggctctctgatgcttcttctatcaaaaagggagatgaataaa

SEQ ID NO: 83699 - DNA, 1072 bp, Heterodera glycines
atggatgccatggaaatttcgagtcagtcggccgtttcttcgggggaactttccttctcaaatggtctgctgcctccaccgccggcaccacctccaattttggatggcactgattgtgaggcttcttctttcattgttccaccgcctccccctcctcctccgttgcacggtgaattaattatgaaaaaagcaaaacaagttagtaaattccagaagagaatgcatcatttcttctccagtcctcatctctcaatcaaaatcacttcaagtcgtctcctccgtcgcaaattatggccaaagtttcgccaccgaatatccaatcttctccccatccaaatccaattcgttcttctgaaaacctcaacacttatgcattcatcactgatcaagaacactttcctgcagttgttcgacaattcaaaagacactcaagacgttcaaaaataaaccgaggaaaacaatttccattgcgatttccgaagcctacgaaggcatcgtcaaggaagggaaatgtcggagaacgtattggtcctcatcagaaaatggttgcaacaacgtcaacaatggacaccacaagacccgtccccctactttctcttaatttgaccgaaccaactccagagacagctttaagaaagaccgacgaaatgccaaacaacacagtgggcacatccgtgccaaggcaacaacaaacgaactgtgtgaagaaagtgaatgacaacgacagccagcaaccgaaaccatcgcgagaagtcccaattatggtcgatttagaattcatcagaaatacgccgccaccgcccataccggacataatcaagaggaggacaacgagtgataacagggtgaggagaccactcgcttaatacatatttgaaattgtaagcctaatctctaatgattattgtttttgtcttaggtcgctgcgatgagaatgatcccaccacaaattcttatcacgtcgcaaccaccaaaaatccccccacagccattgcttcgtatggaccttccaacaccgccaattttccttaaaggccgtcctccgcccactttcagacaacctaatttttaa

SEQ ID NO: 83700 - DNA, 1101 bp, Heterodera glycines
atgataagtcggaaaagcttcacacaaaagcaaattcaagtgacaacccaaaaaacaaaaaaggagacggcagaaacgcaacaacagaacggaaatgaaacagcgagaaaaaagacggacacggaggggcaaaatgacgggaaacgtcaaaaggtttttgtctttttataacctcaaataataacaataaatcaatttcctcagaaaccaacttctcttctaaaacgtaaaacgaatacaaccgatgaactggaacaaacgaatgaacggaagcaaaaactaatgcccaaaggacaaattgaaaaaatggtccaaaaccagtcaaagacagaagaaaagtaacaatttctaccgattttttatttaagtaatttttttattttagaaaatttaacaataagccagcgacaatcgaacaacaaacgattaacggcgtcaatcccttagatacgattttggacgaaatcgaagcttttgatacggcaaacaagaaaaagaaaggtaaattataatgccatggttttaggctttctctactgttttatttctttcctattaagttgagagtgaagaagatgaggccgacaatgcgccgtgttcgagccgacaactgccgccaactccgatgcccggttcctaccgctctttgaacagaatggagctagcgcgacaggaccaagatcacggcatggtccacaccttcttggaaaggaacgatttgatgcagcgaatattggcatataaaatgctcaaaggacgagtggagtcgtattctacaattaggatcaaaattgacctggacaactgtacgattcccgattatgaagtacagaaatttggagtgattttatttttccatttgattttaagctaagcccaactgaatttgacatggattttccggcaatgccttctgctgcgacgattgatgatgttgctgttggcacgaaacctgaagtaaatagttcggaaacgcccgaacaatcagccctaaagcgaggtccaatgactccgcccggctcaccaggaacaaacctatcatcggcgcctgaagcggaagcgaaaccgacaggaagcattctgcccaatcgaaatattgtg

SEQ ID NO: 83701 - DNA, 405 bp, Heterodera glycines
atgtccggttacgtcgtctctttcgcttattccgtcgagaattacggccctcgagaattgtgcgaaattttgattgaagacgttgaggggatgaagcacgatttgcgagcaatggtcaattgcagcaaaggtggcggggaacgaattgtggacggaatcgatgccaaattggacagaaaaacagcaatagccgaaggtgaaaagatggcatttatcaccggcatcgatttggccatttgataaccaatattatggcttactttttttctcaattaatcacgatttaatatttttcgaatataaaataattttttaataacagattaagaattaatttaaaaaatattaaatataaatgatttttaaaatttttaaagaaaaaatcaaacaactaagaaattgata

SEQ ID NO: 83702 - DNA, 83 bp, Heterodera glycines
atgaacaatgtccgcaccaaaagtttagtggaacacgctgaagcaaaaggaatcgacacaaacacaatcattctggccataaa

SEQ ID NO: 83703 - DNA, 1016 bp, Heterodera glycines
atggccgcttccgacgtgttcgaggcaatgttccgttttgactccgcaaatgccacgacttccacttcaaaacgtaataaaactgttggcctaaaaacattccctcaagattttggggaaaagtaaaaatctgagattttttggtattttacagttaattaaatgaaagtttcaattttcagcccctttggatttggccagcagcagcaaccctgtggtggtcagcgacgtcgacgccgatgtgttcagggcgatgttgggctttatttatgcggacgatttgagtgggatgaacggcgacaatttgttcgacgtgctttacgctggtaaaactttaaaattcattattttcttcgtttattttaatcacttttagccaaaaagtacaacatcgccggactggtcaaagcatgcgccgaatttcccatttctgagttgggcaatgtcttccacactttggacgaggcgcgacttttcggagagaaagtaacattttcaaggaatacgaattaaatgggaccgaactgctcgagagtgaatctcggcttcaaatcccggcacaatcctctacatatggaaaaactcgtttttaaaggcattcgccgaacactgcttggaatacattgaccaaaatgcggacactttgctcaaatcggaggaatttctgcgcattgatcagcaaatgttgtgcgacattttgaagagtgatcagctggtgatcagcagagaatttacgctttggaaagctgtaaaattggatttttaaaattgtttaattaattaaaatttgttttttcggcactccgttgggccgattggcaatgtgagcaaaaaggcatcgaatgttcgggagagaatcggcgggaaatgctcggcttggcactgttcgaaattcgcttcccacacatcacaaaggaggacttttcgaagagcattggtaatgccaattttatttattaaattttgtctaatttgggtaaaattaaaaaccaattaattctggcgtcacgcggaaa

SEQ ID NO: 83704 - DNA, 197 bp, Heterodera glycines
atggacggcgatgggttcggttcatttcaaaagagagcgttggattcactcgaaggcgacgatttcatggggctgaagaaaaagaaggctttgactacagcggacggggacggcttcactgatttgggcaaaagagcattggatgttcttgacggagatgattttgttggcttcaaaaaacgcagcgaaatgcaaaa

SEQ ID NO: 83705 - DNA, 1765 bp, Heterodera glycines
atgttttatttattttggtgtgagcacgccacgttcgatcaggtcgggaatctcgacagccatccatgggccaaggccaagtgagaaggcatgggcaatgccaaacttcggcacatttctggaagcatatggaacagggctggccgtgatcacggaaatcacggggtttttggggtgccgtgatctcggatcacgggtcacggattttttcaaattttccgtgattttgatccgtgattggcattttatatagggaatttttattgagacgaaaatagtaaagtggtgtgaagaaatttttgagaaaaatagataaattctttcctgcttacaaattagaaagtaaacatatatatgtagtctgttggttaagccttctgtctttcgttgtctgtcccttgcgttcaattccccattgggataggacaatttatatattttgttttgataattttaattgaaatttaattaacaagaaatttcataacattgaaaattatttttctttattttttaaaacgtccatagaccaataaattaaccaatgattggacatattttggacaaaatctgttaacaaattcactcaaaatttttcccggcggcgcctgtcggcaccaccggcagacggacccccattttaccgtatttttgaaattttgaccccaaaatggcagaaaaattaccatttttggcatataaactgctaaaaaccctattttttctctccgtcgcttaaatttaaaacgacaggcctaatcaaaattttcagaaaattttccaaccctctaagaattttttctaaaattttcccgacgttcagtatcttttggggtgttcagatcgtcatgaagaactgagcatgttggtccaaaagattttttcagcatcaaaagttagcttacaaattagaggaaatttttctctacataaatagatttttggttaaatttaagaaaaatttgaaaaatcttaataaattagttaaaaataaaaaattttccttggagatttctacaaaaagctctaattttcctcaaaaaattgccaaaaatcgtaaacttagtcattttttggaaaaggtctccgcaaaaaaagcggtttatatgttttggtttctttaaaacattttttgggaatttttcccgcgattaaattccgttttttaaataaatttaaataaaaaatcattagaaaattttttttttataatcacggatcacggctcacggatcacggaaatcacggggattttggggtgccgtgatcacggttcacgggtcacggatttttttaaaagccccgtgatcacggctcacggatttccgtgattggaaattcaatcacggccagccctgaaactgatgaattttttttgtttttaacacaactttgcggctttcttaggagcttgcaaaagacatatgttttttgctgtcacttggaaccggaagaatgccaccaagaaatgtcgaaaacattgacatagttttgagccaactttttcatcgcttgtgcggtctatcgatgccatgaaaaacctcaaaacgattatggttaatcaggtgcatcttttgagctccagttcgcattttgaacattttgcaattttttcaggtcaccaactctgatggagctcagttgagcttgcccgaacgaaatggtttttttgtcattttatttttttgtatttttgtgattttacaaaacattattaccgagcccggatttatatgcaaatgcatattttttgctatgctctgaa

SEQ ID NO: 83706 - DNA, 147 bp, Heterodera glycines
agaaatgtgccgaagtttggcattgcccatgccttctcacttggccttggcccatggatggctgtcgagattcccgacctgatcgaacgtggcgtgctcacaccaaaataaataaaacattgttgctgcaaaagaagagggcaccgg

SEQ ID NO: 83707 - DNA, 463 bp, Heterodera glycines
cgtgttatcgcagaggttgacctcactataagcacgggcggcataactttgagcggcccccgtctgtctgttccccgtttcattccttttgaggaaaacgggcgttgccgcgcatgtaaaggaactgaggctgaggtggacacaatggtcaccaaggagggaatcaccttatggtgcacacgaatagaaaaggctcagtttgtcccttttgatgttgtctacgagcttcccggtcattgtttctttcgcgtgaagaataaggcacgtgtgttcagcgttccatatagcgaactgtcgtcctcagacaagtgcgtccagccgctaccaccaccaccaccaccaccaaaacctcaacggacaccggacgacgaggaggagaagaatttgagacgtaaggcaaaggtggcgcttgacttagtggaagccggacttatggcagacgcaatgatgcaggatgggacgc

SEQ ID NO: 83708 - DNA, 336 bp, Heterodera glycines
atgaacaaacaaaaaaacgcaggaggatgggtgaagaatgatggtaaattcattgcctattttcctttttcttgaaaatcggtccactttccaaagctttttcaatttttaatggaaaaaacgtctaatttctagagcccggaaatttcaaatttgcggatcccgctgcgggattggtactgaaaattctttgcgggacgggatcccgcgggattaatcccgcaaatcccgcatttaaaatttgcgggatcccgcgcgggattgcgggattttggaaaattcgaaaaaatttcaattaaattcaaaaaatttccaaaaatcaaaaaatgctgaaaa

SEQ ID NO: 83709 - DNA, 460 bp, Heterodera glycines
atgccaattacgctcaaaaagcggaagaatggcgaagaaaactccttttttgtgagcagtacaaaaatgatgcgcaaatacagcggaattgagacgatttcataaatggaatagccgacaaaggaaagagttgaaatcatttttgggaaaagtcagcttaatacattaattcgtgaaccaattaaatgtggctaatttcttattcaaaagaccttaaaatttatcgataaaatagtgacattatgccataaaatttcaaaattataagtatatttaagaaatcagaataatttctaccccaaaatcagaacattcttataaataagaacaaatggaagccctggtttaaaggccagcttggactctctattattggcgctaacgaaatcagatgattaaagtgaaaaaaggaagatttacgagcatttaaaaagaaaaaatggtttttttttgggttaaa

SEQ ID NO: 83710 - DNA, 912 bp, Heterodera glycines
ataagaagaattggaacctttgcacataagctattacaccagcaatttaaaaaaggcgaaaaagcggcgcctgcggcgcgaaaagtgaatgaatttctcggcgcggatgtgatctctcctcgtcaagcgcaaaaatggttccaacaattccgggcggggagaaacagcaccaaacgcaacgacacccggaaagttcctgcgcagaattgtcggtgggacattgccataaaacaacaacatggcgctggcttcggaaatctggtcgtcggccgatgaggagcaaatgggtggcacaccgtccgactgatcagcagaaacagcggcggctaaacctgtgtctttcgaacatcgcaaggcaccggagaggttatgtgctgaaccggctggtgacatgcgacgaaagctacatctgttacgatggcacagcacagaaaattgtttggagaaagaaggaggaagacccaattttggtcccccgactcaacctgcaccaaaaaaagcgcatgttgtgtatcttttggtcagtacatggcccactgtactgggaactgctggcacctggcactattttggacagtaatagatacataaaccaactgcgggcggtggatatcgcttaccgcatccggcgccagcagggccaatacccagtacatttcccagacattgaattggaatttgttgccccacccgccttatagccctgacctagccccctcggattaccacctttttctttctctcaaaaactttttacggggtaggcgcttcactgaagacgccgaggtcgaggaggcggtggggcagtacctgacctcaaagatcggcacagattttttccgtcgcggcattaggaaacttccttctcgttggagaaaggttgttagggtccagggaaactattttgttgag

SEQ ID NO: 83711 - DNA, 554 bp, Heterodera glycines
gcgaaaaacttaccaaaaccaaagacgatgacaattcatggtcatcctcgtcattgtattcttcgtcctcatcaccttcagcctctaaatcaagcagttcagaggcaatggaagagacgaaaaaagaaaaatcgaaaacaaaaaggaaaaagaaaaatgggagaaaaaggaaacataaacagaagaccaaaaaagaaagtgcagtggagaaaaaggaaaaacggggaaataatgatgatgatgatgatggttctgctgccagcagtggttcgtcaagttcaagcagtagttcatctgctgactcggacgaattggatgacaaaaagaaaaacaaacaattggccaaggtgaaagaggagcagaaacaggggtcaaaaggaaaaaacaaagcaaaaaggaagcaaaagaaaggagagaaaaaagggaaaaaggattacgaagataaaggtgaagaggaagaaagccattcatcaagcagtagcagtagcagcagcagtgaagagccaaaaagagaggaaaagaaaaagcgccgaaagagaaagaggagtcattga

SEQ ID NO: 83712 - DNA, 772 bp, Heterodera glycines
atgtcagaattcaaaaagtgcgattgcgaaaatagtaaatttgaggttattggcgcttatcaacatgatctgtctgcaacacttaatcagtttatatttaaatcataattagcagaatgtgaaattctctcatttgttaccaaaagaggatttttttctcttccacaaaaaattagttccttctcatataaaaatggagctgcacctttgcacattaaaattcaaagtccaacagctggagaaaaagtaaaacataaaattagaatttcaataattaggggtaattaaaattgcctaaggtattcgttggctatttcactgcggccgacggagcaattcgttgtgtcgccgtcaaattagtcaacagaacagaagcggcttcatctctttttaagaattcgatcagattgatggataaaatctacgaaaaatttgagaaagagcagaggaaacatttagtcgaaataattgacacgtaagaaaatttaattaattaaaataataatttctttcttaaaattttattttttcagtggctatacaacaccctatatggagggcattgtgataatggaattgggcgacgagtcactccgccaacgattgaaaagcggcagacacccggcactcggcgcaaatgaccgtgacttaatgagtgccgtagaaaaattggctcagccacttgtcgagtttcatgaaagtccggcattaatttgaacatttggttgcccaggactttcccaggggaaatcccggtcctagtttttcaaaa

SEQ ID NO: 83713 - DNA, 1581 bp, Heterodera glycines
atggatgtgaacccgcgaaactatttgtacgtgtcggagaatggaaatttgttactgaaattgatcgattttgagggctctcaattgctccggaataaattggataaaaatgaatgtgttccaatcggtgagcatgctttcaccccagagtacacggggccagaatattacggcgagcatggcagagaggtgggcgcaaggatggggaacgtggtagaaaagtcgggaaaaggttgtgccaatccgagagagggcaaatgccatggccgagtgggaagggccaagggcaaaacatgcaaaaacaaagattatcgttacgactaacggcagctcagcaatactcctctttaatgctgttttaactgtcagatttcgactaaatttgacatttggtcagtgggaataattgtcttcgaaattctgcttggtcatttacgtgccgaacaagggaaggggccgatggaagaggtgaaaatggaaatgatcaagttcacaatttttaagtgaaaatggaaatgatcaagttcacaatttttaagtgaaaatggaaatgatcaagttcacaatttttaaacatatgtaggatgaacaaaaatcaatgctttttgcaattggcaatttattcctcggatttacgcgaaacaatctattcagaagtccgggggaattcaaaaatatgccaattgactattcgaaaagggaatggtttgaacagaacaccaatgcaatggagacggtgctgcaactttggcagaaatttccaaagacggcactgctggttacggtaatggcaagggaaatattgtagtggtgcttttgtgccgaggacaaaacaatgatggcattttcatgaattaaaggcagagcgattatttatagtgaaaacgaaccaatatgtattatatgaaattaattttagaatatgttaaatgtcgacagaaagacgcgtttaacagccaaagggattttaaattatattaaaggatcatgccaaattggagagttcagagaagtcaaaagttccaaagatttgcgaatttttaattcagtgaagttcggcgaatttttaaataaactgcgaattatcaaactaaagaataaagcgaaatgtttgattgaaaagtatagggaattgaatggaacatacaaaaaaataaagataatggtaaagaaagtgatcgaagagcaacaaatggaaatcgaagaaaagaaaaacccggaaaaactcgacgattgcgaaacgaattgatcggcggaaaagcgaagcacccttcaaaatttatctaaaggatttatttgaatgacgtgattacaagccattttagtgtacggaagaaaaaatgttcctttttccctttggtgatatgtcaaaattttctcactgatcccctaaactttttttaaaaaaaatcgtttttttagtaaatcttactctagaacattgtttaagtaattttcttaaaattggtaaattggtgtaaaaaaaatttagaaaaatttttgttcagttgctaggtcgaactttaaaaaatatcaatgataagaatattttaattattatattattttatttgcagaata

SEQ ID NO: 83714 - DNA, 493 bp, Heterodera glycines
atggcgagtcattccgatgaatacgaaattgatgaattttggttggataacattgcctatgatgacggcgagccacgtccaaagtcgaaaaaatgcgaaattattgcagggattgatcttcaaagtcccagacaacggcgagagtgggctgaaagtcgaatcttccgtcaatactacgatattattttggatggaaatggaaatttgactaattatgtaatatgcaaatcctgcgtgccacctgcgaaacctgttacatttaattatgccgggtttcataatttgcggtatattaaagactttaatttaaatatttttggatttgaggagacatttggaaaattggcatgggataaaatttggcacaaatgacaaatatgacaaaatggaattagcattggttgaattttgtgttgctgatggacgtcccttttcaattatcaagggcgaaggattcaagcatttcatggatgcttatgccgaattaatgtaa

SEQ ID NO: 83715 - DNA, 735 bp, Heterodera glycines
atgcacgtagactttgatccgctcggagtcgactggacccccatgttcacatgcgcccaaaacgacgcaatcgtgcactcgggccccgccgacgcgggccacggactcaacagcatcacgacacctatgggaaccgccgaggccgccgcagcagcacacaactatcttatgattggtggtggccatactacctaccccgtgttctccggcctaccgtaccagcgcggcgccgggcttggctccatgttcagaagcttcctccgcttcctgttgccaattggtcgacaggctggcgccgcaattgggcgccaagggctcgagtccggcgcccgcgttctctccaacgtgctcgacggacagaacttgaaggagtcgctggtcagcgagggacgcaccggcctcaaaaatctgctagacaaagcggcggacaccgtggcaaagagtcggcagaacggtggcggcaacttcgacttcaaacgatacagacagaatgccgccgaactcaaagagggcataaaaagtggaaagaaaggcctcttttccacaatgggtccgccaacggcacctgctaagcaacacaaaaaggagcttcaaactctggaacgcatactccgccgacaacaaccgggctcaacaccccgcaagcgctcccgcaccgtgaaaacgcccgccaacagcgacgacaagaagcgaccgcgacgtgcgccccgctttgacacactcggcgcctactga

SEQ ID NO: 83716 - DNA, 2376 bp, Heterodera glycines
atgcgcgagaaactgaccctccaacagcgagaatatgaggcacaacaacagctccgacagcacatccaggagttcatcgacaaattccgctacaacgccaagcgagcctccatggtgcagtcgcgcatcaaaatgctggaaaaattgtaaacattaatacattaaaaagatttgataaattctaaaactttagataaacaaaaaagtttctaaatttcctttaatttgcttctctatttaaaattatttgcttcgtatcttctatctgtcttttatcatggaaattgattacaaataatagtatgataaaggggacgtgtcaaaatttcaccgccgaaacaagaaaaaaaattattgcaaattttttaataagaaactatccagaaaaataaaatccttcagtttttttgaaattttctgatgaattactaagttttttcaaacgtttttccaataaatcgctaaaaatttttcaaaaaattttttcttagagttttcttataaattttcaaagtttgaaaaaattataattaattttcggtggtgagatttttgggtgcaccctatgataaaatgttatttttcgacatttttttaaaagttttcgcgttattttgcattttttgttgtggtgctcactttgcgttccaatgtttcagaccggtgctgcaacccgtcgagttcgactcggacgtggtgttccacttcaaagactgcgacaagttgggcaacccggtgctgcagctggacgaagtggccttccgctactccaaggaaacgccgtacattttccaggttgcgtaccataatttttttatgggccggggaggttgcaaatcgctgggatagggaagggatgaccgaattttgggatgggtccaagcgcaaatttacatctgtttttgttgggaacagcttatcccccctattttataaaaaaagaaaagtttttgatttttctttgaaataagaaaaggataaagaattttttgaaaaagaaattccaggggggagaaacgcttgcgcccgttttgtgctcttccctgataatttactgcggatgaatacacttttgtaatattttttaaaaaaatttgttaaaaacacaaatgctaattttccattttttggtttgaaagttgaaagttgaaactttttaaaaaatatatatttttattgaaaatttcttgtgaaattgtgaattgattaacaaataaaatgggaaaacaggtgatcattttaaatctttgtttgtttttggcgtttttctttatgattcgcttaatattcccccaaaaaatatattttttctgcttttccgattcctaatttttgtattttgcagaaggtttgcatcggttctcgctccgactcgcgcatttgcattgtgggcgaaaacggggccggcaaaacgacgctgctcaaactgttgctgggcgaccacagccccaccaatggcacacggagtgccaaccgtcggctgaacattggctacttcacgcagcaccacgtggaccaattggacttggacgactcaccgctggaactgctcgcccaacgctttcccggccttggccaggtgggcgccgcaattttttctggcattcagcattttatttcaccgtatttcctaaaatagagcctccgggggctttgtttttcaaccccttaggggggggggcgggtattttaaggggttctaattccaaaattaacaaataattttttacataattacattaattgcactaaaatttccggccacaaaaattcataaatttctcttacagaatttttttttcattattttttgaaaattaaaaattttcgggctcttcatttttctaaattctaattattatttttgagtgtgtattattttattgatgttggttgcgttcataaaaccttgccaatttatttcttttcccaggaggagtaccgtgccgcaatgggccgttttggtctgtccggtgacattgccttccaatccatcgccactctctccggtacttttccgttccaaaaataatgaaaaaattaaatctaaaaaatttaaaaaaaacatatttttctatttgaaaattattttcaggaggacaaaagtctcggcttgccttcacttgtctttctcttcaacagtgagtttttcggagtgttaaaatttataattaaatttaaaacaatccttaaaataattttaccttatttcttggcaggcccaattatttggtaatggacgagcccaccaaccatttggacatcgaaacggtggacgcacttggcaaagcattgaacgattttaaagtgcgttatttcactagtttgaaatttttcaaccaaaatcttacaatttagaaattttttaaattagaa

SEQ ID NO: 83717 - DNA, 709 bp, Heterodera glycines
atgttcttgaaatttaattccattatttgtgcgtttgcttttattattcgtaattatggctttttcgttcatggcggcagcatgggcttcaactcaatgtgtgaaagcacaatttatagcaaacaatttgaaaatttgaaggctcaaagctatgtatgtaaataattttttaaaaatttcaaaaacaatttagatattaattagaaaattacaataattagatttaatgaggaaatgaataaggaattttcaatggcaaaaattaaaacaagcatcaaaaattttttaatgattaaaaaaagaagtcaatttagttttttgtagaaattgataaattttgtaataaatttaactttttaaaaaaagttaaaaaataaaataaaaatttatttaggaatagataaaaaaaaattatttgatagaaaatatatttttaaaggaaaatgtatgaatattatataaaaaaatttcctattctttttaagaccaccaaaaaaatacaaaaacaaattatttaaatatatttgtaatatttaatatatttttttcacagacattcttcattggtaattatttcaacggcgctttagtgacagccccgaacacaattaatggactctattcgggtgttaacaaaaatggaatttattgcattggaaatgcgtcaagtaaaacggaaaatttattttaaaatttacaataattataa

SEQ ID NO: 83718 - DNA, 985 bp, Heterodera glycines
gaacataagttgtgccataaagacgattcgtccaatatcaacgagtacaacccgtggcctttgtatcaattcagtggaacgcttaggcaatttttttaggaaattcccaaaatttttaatagtttaaaaagcaatattttggctatctttccgttttttaacaacatattcaattttttaggttcaccttgataaaaacttctttttttgaagccttaaattttcctgactttttaaccaattaaaaaaattgcctattttccaggcccgccccacaaagtgcgcgccgcgctgtcccggaacatattccgaggcctgattatgcgttgcatccggaaggcgtttcgttggaggaacgaaacgcacgaaacagtggacaaattcgtgtaggattttagggggtaaattttcaaaaaaaaatttttttttagttttgtattgaagcgaaataaatgggagggtctgatcaaaaaaaaaaaaaaattattttttgaattttcatctgaatttttaaggtgttgaacgaggaggaacagttgggaatgcgtttggccgccaaattgggccgcgaggtgctcgacgaggcggcacgtgccattgagcctggcgtaatgaattttttttttattaaaatcccataaaaatacaaaccggatcaggggattccggaaaatagtttttttcccctaaatcctatccatttcatgtttccaagctgatttttttcaaattggttatggtctttggttgttgttagacatttggttttaaagaaagttgttcaattttttttcatttttcaaaaaattcgaatcaaataaaaacgccaatttttcgtatgattcgatttaaataagtgccattatttgtattaaacatcaggtgaccaccgatgagattgaccgtgttgtgcacgaggcgtgcattgagcgggagtgctatccgaacccactgggctactacaaattcccgaagagttgttgta

SEQ ID NO: 83719 - DNA, 522 bp, Heterodera glycines
atgccgacggtgccgccgccaacggacactttcaaaaaggagactttcgaggcaattattcccgaaaaatcggttaatgatcggccgcttcagttgtttaaccccggctcggctgctcagctgatcagtgaaatcagtgccttgccatccgaagggcgcccccgggtaaattttaattgctttttccctattaaagtgccgttctcccaagaatttcttccctcagcagcccactccacagccccaaccaaatccgaccttctttcgagctaccgtaagaatgaaattgctgtttttcgaaatcctaaggctttttctcaggaaccgacgccttttgttgttgccacgacgccttccttcttccgacccaatcagcaattccagcgatttggccaaaattctggtggtttgcaaaggatcattgcatttcaccgatcaaaacatgttcagcttgccgtgacgcgacttcgactcgccattgcttacaatgggtccaattttgtccgacaaatccgtggatga

SEQ ID NO: 83720 - DNA, 131 bp, Heterodera glycines
cggaggaactgaaccattttgaacaattagtccagtccttttaaatgaaccgcccattatgggtctctgactctctctctctctctcctccccctacccttcagtctctctttccgttctctctctctctc

SEQ ID NO: 83721 - DNA, 438 bp, Heterodera glycines
ggttcgatgaaactttttaaaatataagcctaaactttttggcctgtttaaaaaggaattaaaaatttttaaaatatttattcatctcccttttgatagaaaaagcatcagagagccttatttaacttttaattaacatttggtgcgtttcagagcacgttctaaaaaatatttatgaattaattttgcaaaataataaataattaatgaaaaagtcagaatttcgaaaaattttaaaaacaacaagcgttggcattttttcaggttaagttagtcctttacaatggagaaggcctgcaaaatttggagagatatatcgattttagtgcgctaggttcgatgaaactttttaaaatataagcctaaacttttttggctgtttaaaaaggaattaaaatttttaaatatttatcatctcccctttgataaaaaagcatc

SEQ ID NO: 83722 - DNA, 5802 bp, Heterodera glycines
atgccgtcaaagaagaaaaaagagagagccgctcgacgtggaaggaatgatttcgctgctgaaactactccgatcaatcagatgtctatattagccatatcgactccacaatcatgcttgtcaacattttcgcagttatcatcagcatcaccaatagtgcgcccaagaaaacgtttgtacaatgcaaccgcaacaccttcatcgaactcgactttaattcatacaaattcttgctctgaaacgccaaaaagaaacagaggaagaccaaaaaaacgaacacgaattgcgggcccgggtcgtgggcatcgcagcagctcatcttcgtgtcataatacaccagcacctgtttctaatctacaagctttaccaccaaatgaagagatgcctcacactgagtcgaattctgaaccactaatgatcgaagaaggaccacttatgtcaagtgatggacatgttgcgcaaccagagttatttgcaagccgaaatgagttattaaatttgtggaataatcaaaacgagatgtgcgatgaccgtgtcatttacgcctacatgcgttatctggcaagtattaataatgacaaacgtgttgcagttgttgcgccatcttacaccgacccaaacgtacactacggccctggagcaatccatttggaacttaatgatcactgctacaaccactcagtagactatgatgtcctgctcgtgcctgtcgtttttcctggacattttacgctcatgatatttgaccgctccaacagagaagaattacgttgttggttcattgattcattgccgcctactcgaaacttgaccgctgattttaacaaccgtcttaatgatagcagatttccgggatttgaccaaaaccgaatcattctcctgaaccaaattatttgtcaattgactcaaggtctcgaaccatctgcctttgaaattcaaattcttccgccaaatcaatacacataccagttagatggaattaattgtggtttttttacaattttgtacgctgaatcttatttgatgaacaaccgctgcctttttttgcccaaccttgacatcaatactgagagaaaaagaattatttcacaactcgcaaaattacttctatcagacacagttgaatattttccgaggaatacaaatggacaacaaaatcttggacaaagaaatattttcttacgaggtgcacaaataccacatcaaagatgttctacgcccatcatggaaactcattttaatagccgggagccatcaaccaattccgtttcatcatcccgacgttcttcacgtattgcgagccatcaatcaagccgagaatcttctattgttgacgaatctacaaccatatcaatcaatcaattaactcgccgttgtcatgtaagacacaagggaattccgtgtgccgatattcgagccaaccattatcaaccatattatgactctggaaatattggtgataaaatatgcgctttttgcaaggcgaagctcttcaacagtgaagccacagcaaaacatggcaagacttcttcagcaatttgctgcaattttggaaaaatctgcttgccaaaacttagcgatttgcctgctgaattatatgctctttcaactgaaaactcagcagaagctaaagaatttcggaagaatcaaaatgcctacaattcattgcttgcgtttgcgtctgtttctgttggatacaaagaaaactctgtgggtggcgatgtgtgtttcatgctgaatgggatgtttgtccgccggatcagttcgcttttttctggacaaatggcaccaaatttcgcgcaattatttgtgttagaccctgaacaggcactggagcaccgaaaaaagaacacacgatatggtggcgatcgtgtaaacccaaacactctgaaaaaattggatgcaatactacgtcaacaccatccactggcaaatcaactcatgaattttcatcaacaatatcaatcaaagcttgcagagggtggcccggatgccgtacataacttccgtctcacacttcttgaagcacgaatggcaccaactggaatacgggatccaaatctgcacccacgacagaccaatcttccaactgaaggtacattatttgctgtatggacagaatcggaccgcccaccaatggaaagaggcatttggatcactacagaacaaggccaacttcagcaatttccaccatatcatccgtcaactgacacactgtgttatccattggtttttccaagtggagacgacggatatcacaaaaaactgtataaaagcactttgcatatcgaggaacggcacaacgaacaaagagaaggagaaacaatattggatattgatgttgatgttgaatctaattatgaatcaacaaacgacacagaaagccagtcagaccggaccagcttggcttcgcacgaaagcgatggagaagtaaggcctttcagaaaaatgtctttaagagaatatgttcgatatcgattggcaatcagggttgacgaaacgtatcatcacatttggatcgtcgccggtggactcagccaaaaaattgtgttggattatgctgccagaattgatgcagatgttgccgagtatcttcgtcgtcctgaatttgaccttcgtggcaccatgccagaacacttgcttcgatggttcgcgcgcaatgcaggtctcacctcgccagaagaaattggttcaattgttttgttccgaaaaacacaaccaggcacacttgcctacttccaaaacaaatactatgatgctaccactataatggcacgcatcaggaaacctgatcgagcttgcttcatgctcacgtggacttgtaacccacggtggcctgaaatcaagcggaacttcatgcgtgctgaccaaaaaatggtagaccgctttgacattctgtgccgggtctatgaagacaaacgaaggcatttacaccaccttttggaggataaaaaaatccttggaacacagattggatatggtgaggggcgagaatttcagaaaagaattggaggaccacatttacatcgactttttcaatcggatattttggccatcccggaatgcgtggaaaatttgatttgggctcatattcctgctgaacctaatgcacaagaccaatcttcatgggcgaactttattcgcaaagtgaggaaccttctgccaaagtatcaattccatgattgtggaattcattgccaaaacgctcgtggacgctgctcaaaaggcttcccaaaaccattcagcaaattcacaatcctttttgatgacaagcccgcagtctataaacgactacaaccaacggacggaggcgaaacactgactgtaaagcgggggctttccgaaataacttatgataattcacgagttattccttacaatccattcattttggttctatacgagacacatcacaacttggagttcgcatatggaaaatcaacaaatatgaagtatccacttaaatatccgctcaagggaccatcttattcatatataagaagtgaacataccaacaaaacgaacattgatgagccagcatcctacgcgagagtattgtacagatccccagttgaggctttttcaaggattatgtcatacagatacacattcatgtcacacactgtcatggcactttcaattcatcttcccggacagcaaaaaatgtatttacggccgggacaaaacgcacaggagctcgcacagcaaattctggcaggacaaatggagcttccggtcactcccctctctgcgtattggcaacaatggcgtaatgaccctgcgttgaagaacattttatttgaaaatatgcctgaaaaatattatttcgacaaacagaaaaaagtttggaagccaagaatacgaaatgcccaacgaaaacaaatattgggacggatttatccaattctgccacgttctcatgagaagttcgcattattcattctcaccaagcattttgctggtgaccctgagcatttgaaattggttaatggacatcaatgcgaaagcttcctggaagcagcccgacttcgtggtctcatcaaggattcaaatgtatggatacgaaccctacaggaaggagccaattatctcaatccagcccaaatgcgccagttgttcgccagtattcttctttttggcaacacggaagattgtctcattgatgcattggcactttggaaccaatttttgccgcatatgtacgatatacgttgtagtgatgcagaacgaccaattcgaattgatcaggcactcgcccttcttgaacgacttttggttagacaaggaaaaacttgtgaagattttggacttccggcgcctatgaactcaattgtcaacgacccaacacgtggtgtgaacgatttctttttcccaggccatctggctgatgatgacgttgacgaaacagttgatacacgacagtttgattcggcaagaatgaatcccgagcaggagaaatttttccaaatggtcagaaagatcgcctcaactcgaccaaccactgcagaaaaccgtctattctttttgtctggtgacggaggcaccggaaaaactttccttctcaattatctattgtatcaattgcgcagaattggtaaaaaagtgattgccaccgcctcaacaggcatggcctccacacgcttttacgcaggtggcacaacagtgcattctgcttttcgccttggcattcaggttgaagccggaaaaattccctcaataccaatggaaagctatttcggacgcagaattatcgaagctgaggtcattattattgatgaaatcacgatgttggaaaaaactgtcttggaaaatgtggatttgttgtgcaggcaaatggttcctcgcttcggccaacttccctttgcaggaaaagttgttatactttcgggtgattggaaacagtcgctgccagttgttactgaagcatatggcactgaacctcaagtcgcagcatgtattcaatcttcaccgctctaccagctcttcacaaagataaggctcgtacagaacatgcgtgttaattctcaggacattgaattcattgaatggttgaagaaggttggtacaggtgcattcggtgacacagtgccaattccaaaggagtgggtggtttattcacgcgacgaagtcgtttcttctgtatttgatcaaggctttttacagccagcaaatgaaatgctgaagcgattaatgctggcaacaaccaaccgaattgtggacatgaataatgatgccatattgagaaatatcaattccgattacaccgactacttctctgatgacagaccaattgacgcgaacccaatggcacttaatgctgctgaccaggatgttgcacacctcaatttgctgaaccctgctggcattccggcgcatcatcttcggctaaaagttggctcgataattgtgttgttgataaatttaaacacggccaaatcactgtgcaatggtactcgattgattgtcaaaaaattgaccgattatttgattgttgccgaagcaataactggtgcaacagctcaaagtggaattgaagtagcaataccaaaagttgcagcaacttacaaagacaaacagccaaacggagttaacttcgaaagattccagttccccgttcgggtggctttcacaatgactgtgactaaggcccaaggacaaacatgcgagcggctgggcatcgacttcaccgaagaggcatttgcccacggtcagacatacactgctttttcacgagctacaagctctgattccattcgggtgtatgccccgaataagccagttgatgcagacggaaatgttttg

SEQ ID NO: 83723 - DNA, 1136 bp, Heterodera glycines
atgatgacaggtcgcgatctgatcaacggtacggtaagggacgagcgcgagagttggacactcagtgacgcataccgtaacgttgtacgcgcacaatccttccgtaaccgactgttttggacgtcgtcaagctgcggtgactcacacccatggggaaagctgcttgttcagcgaggaatttgatcacgctaacaaggctgtacacctcagcaaatagtgcgtaatgagaaaatgataatttttatgttaaaattattaaaaatttaaattttattaattttgttaaatattttcaaatttttgttcgtaccacctgcagatttttgttaactcatagatgaaaatcacttagattggcgcacaaaaatacaccatgcattaacacgctcaagagacccttctctccgatcttgatcaattgaattcaatcgattctggttatctattccccgatgaaaatgctccgaattcaactgctggtcaagcgttggccaaatggttacgaactccgacaaaaaatggtcaaccgaaggaattgcgttgctcgcattttgcttttatgaaaataaacaattggttccacaatcacaagcaggtggtcgacacattttctctcacaatttgtgcttttatcgacaaggatttcgagactaaacactttgtttttgttttaccaatttttgtgtttaggcatttctccgtgccaccacttcggtcagttacaatatgcgaattactttttataagaaaacaaggccaattccatttgaattggtgaacgaacggacgaatgagaagctgacactgacgaaggagaaagagtgcggtgatgaaatctgtgattttctgatgaaacggtgtccaataattgaggagacggcggcgcttcaatgggaaaacgacgaaaatttggatcatttgaacggagtcttcttccgtcatactatcattcggtgagcagcaaaggccttacttttgtataaagtacggacatgacgatagtatctacatactttcccagcaattttggcaggaccagcaagagcatacatgaaaagggggcgggtgggtaaactgaaatttttgcgaaggggtgtccgtccatgaaaagaattttaatgaattttcttaataaa

SEQ ID NO: 83724 - DNA, 1557 bp, Heterodera glycines
atggcacttcacttcactcaatggcactcaattacagcgaatggcacttcatttctgtcaatggcacttcacttcactcaatggcactcaattttagcgagtggcactttacttcactcaatagcacttcatttctgtcaatggcacttcacttcactcaatggcactcaatttcagcgagtggcactttacttcactcaatggcacttcatttctgtcaatggcacttcatttcactcaatggcactcaattacagcgaatggcacttcacttcactcaatgacacttcatttcagtcagtggcacttcacttcactcaatggcacttcatttcactcaatggcacttcatttctgtcaatggtacttcacttcactcaatggcacttcacttcactcaatggcacttcatttctgtcaatggcacttcacttcactcaatggcactcaatgtcagcgagtggcactttacttcactcaatggcacttcatttctgtcaatggcacttcacttcatggaatggcacttcacttcactcaatggcacttcatttctgtcaatggcacttcacttcactcaatggcacttcacttcactcaatggcacttcatttctgtcaatggcacttcttcactcaatggcactcaatttcagcgagtggcactttacttcactcaatgacacttcatttctgtcaatggcacttcacttcatggaatggcacttcacttcactcaatggcacttcacttcactaaatggcacttcatttcactcaatggcacttcatttcactcaatggcactcaattacagcgaatggcacttcatttcactcaatggcactcaattacagcgaatggcacttcacttcactcaatggcactcaattacagcgaatggcacttcatttctgtcaatggcacttcacttcactcaatggcactcaattttagcgagtggcactttacttcactcaatagcacttcatttctgtcaatggcacttcacttcactcaatggcactcaatttcagcgagtggcactttacttcactcaatggcacttcatttctgtcaatggcacttcacttcatggaatggcacttcacttcactcaattgcacttcatttctgtcaatggcacttcacttcactcaatggcacttcacttcactcaatggcacttcatttctgtcaatgcacttcacttcactcaatggcacttcatttctgtcaatggcacttcatttcactcaatggcactcaattacagcgaatggcacttcacttcgctcaatggcacttcatttcagtcaatggcacttcacttcactcaatgtcacttcatttcactcaatggcacttcatctctgtcaatggcacttcacttcactcaatggcactcaatttcagcgagtggcactttacttcactcaatggcacttcatttctgtcaatggcacttcacttcactcaatgacacttcatttctgtcaatggcacttcacttcatggaatggcacttcacttcactcaatgtcacttcacttcactaa
